United States Patent Application Publication US 2024/0327476 A1 - sequence listing, part 2

SEQ ID NO: 971 - DNA, 2963 bp, Homo sapiens
  source 1..2963: mol_type = unassigned DNA
agaccgagccctgggaggctacgggctcccccggaaaccctgccaggggagccgggttttgagctcaggcgcctctagcggcggcccccagaaatctgactcgcgaggccagagttgcagggactgaatagcaaactgaggctgagtagggaacagaccatgaggtcagtgcagatcttcctctcccaatgccgtttgctccttctactagttccgacaatgctccttaagtctcttggcgaagatgtaatttttcaccctgaaggggagtttgactcgtatgaagtcaccattcctgagaagctgagcttccggggagaggtgcagggtgtggtcagtcccgtgtcctacctactgcagttaaaaggcaagaagcacgtcctccatttgtggcccaagagacttctgttgccccgacatctgcgcgttttctccttcacagaacatggggaactgctggaggatcatccttacataccaaaggactgcaactacatgggctccgtgaaagagtctctggactctaaagctactataagcacatgcatggggggtctccgaggtgtatttaacattgatgccaaacattaccaaattgagcccctcaaggcctctcccagttttgaacatgtcgtctatctcctgaagaaagagcagtttgggaatcaggtttgtggcttaagtgatgatgaaatagaatggcagatggccccttatgagaataaggcgaggctaagggactttcctggatcctataaacacccaaagtacttggaattgatcctactctttgatcaaagtaggtataggtttgtgaacaacaatctttctcaagtcatacatgatgccattcttttgactgggattatggacacctactttcaagatgttcgtatgaggatacacttaaaggctcttgaagtatggacagattttaacaaaatacgcgttggatatccagagttagctgaagttttaggcagatttgtaatatataaaaaaagtgtattaaatgctcgcctgtcatcagattgggcacatttatatcttcaaagaaaatataatgatgctcttgcatggtcgtttggaaaagtgtgttctctagaatatgctggatcagtgagtactttactagatacaaatatccttgcccctgctacctggtctgctcatgagctgggtcatgctgtaggaatgtcacatgatgaacaatactgccaatgtaggggtaggcttaattgcatcatgggctcaggacgcactgggtttagcaattgcagttatatctctttttttaaacatatctcttcgggagcaacatgtctaaataatatcccaggactaggttatgtgcttaagagatgtggaaacaaaattgtggaggacaatgaggaatgtgactgtggttccacagaggagtgtcagaaagatcggtgttgccaatcaaattgtaagttgcaaccaggtgccaactgtagcattggactttgctgtcatgattgtcggtttcgtccatctggatacgtgtgtaggcaggaaggaaatgaatgtgaccttgcagagtactgcgacgggaattcaagttcctgcccaaatgacgtttataagcaggatggaaccccttgcaagtatgaaggccgttgtttcaggaaggggtgcagatccagatatatgcagtgccaaagcatttttggacctgatgccatggaggctcctagtgagtgctatgatgcagttaacttaataggtgatcaatttggtaactgtgagattacaggaattcgaaattttaaaaagtgtgaaagtgcaaattcaatatgtggcaggctacagtgtataaatgttgaaaccatccctgatttgccagagcatacgactataatttctactcatttacaggcagaaaatctcatgtgctggggcacaggctatcatctatccatgaaacccatgggaatacctgacctaggtatgataaatgatggcacctcctgtggagaaggccgggtatgttttaaaaaaaattgcgtcaatagctcagtcctgcagtttgactgtttgcctgagaaatgcaatacccggggtgtttgcaacaacagaaaaaactgccactgcatgtatgggtgggcacctccattctgtgaggaagtggggtatggaggaagcattgacagtgggcctccaggactgctcagaggggcgattccctcgtcaatttgggttgtgtccatcataatgtttcgccttattttattaatcctttcagtggtttttgtgtttttccggcaagtgataggaaaccacttaaaacccaaacaggaaaaaatgccactatccaaagcaaaaactgaacaggaagaatctaaaacaaaaactgtacaggaagaatctaaaacaaaaactggacaggaagaatctgaagcaaaaactggacaggaagaatctaaagcaaaaactggacaggaagaatctaaagcaaacattgaaagtaaacgacccaaagcaaagagtgtcaagaaacaaaaaaagtaaccgggcaatccatactcattcagtaacacaggctcatttatttaaccagctaatcatttatccaaaggctttccattcttctcccaatatttttttactttaatttttcccacaagttttgatcagcaaataaacagcattcttgttttggaaacaaaccagtgcattctacttctcgagtgttcacttgcccctcagtttgtgaccaagttgtgggtattctgagaatcatgctctaatggcttttccatacactaaagctctgaaagtagtgagtttcctagaattaccatgctattcaaggtatagtcttgtttctcagaatcccagggaacaaagcaattgtctgcctctccctctgcctccctcaacttgatccatgtgaacatccgcacctgcacccatgctgatcaataaatgccgacaacaca

SEQ ID NO: 972 - DNA, 2346 bp, Homo sapiens
  source 1..2346: mol_type = unassigned DNA
atgaggtcagtgcagatcttcctctcccaatgccgtttgctccttctactagttccgacaatgctccttaagtctcttggcgaagatgtaatttttcaccctgaaggggagtttgactcgtatgaagtcaccattcctgagaagctgagcttccggggagaggtgcagggtgtggtcagtcccgtgtcctacctactgcagttaaaaggcaagaagcacgtcctccatttgtggcccaagagacttctgttgccccgacatctgcgcgttttctccttcacagaacatggggaactgctggaggatcatccttacataccaaaggactgcaactacatgggctccgtgaaagagtctctggactctaaagctactataagcacatgcatggggggtctccgaggtgtatttaacattgatgccaaacattaccaaattgagcccctcaaggcctctcccagttttgaacatgtcgtctatctcctgaagaaagagcagtttgggaatcaggtttgtggcttaagtgatgatgaaatagaatggcagatggccccttatgagaataaggcgaggctaagggactttcctggatcctataaacacccaaagtacttggaattgatcctactctttgatcaaagtaggtataggtttgtgaacaacaatctttctcaagtcatacatgatgccattcttttgactgggattatggacacctactttcaagatgttcgtatgaggatacacttaaaggctcttgaagtatggacagattttaacaaaatacgcgttggatatccagagttagctgaagttttaggcagatttgtaatatataaaaaaagtgtattaaatgctcgcctgtcatcagattgggcacatttatatcttcaaagaaaatataatgatgctcttgcatggtcgtttggaaaagtgtgttctctagaatatgctggatcagtgagtactttactagatacaaatatccttgcccctgctacctggtctgctcatgagctgggtcatgctgtaggaatgtcacatgatgaacaatactgccaatgtaggggtaggcttaattgcatcatgggctcaggacgcactgggtttagcaattgcagttatatctctttttttaaacatatctcttcgggagcaacatgtctaaataatatcccaggactaggttatgtgcttaagagatgtggaaacaaaattgtggaggacaatgaggaatgtgactgtggttccacagaggagtgtcagaaagatcggtgttgccaatcaaattgtaagttgcaaccaggtgccaactgtagcattggactttgctgtcatgattgtcggtttcgtccatctggatacgtgtgtaggcaggaaggaaatgaatgtgaccttgcagagtactgcgacgggaattcaagttcctgcccaaatgacgtttataagcaggatggaaccccttgcaagtatgaaggccgttgtttcaggaaggggtgcagatccagatatatgcagtgccaaagcatttttggacctgatgccatggaggctcctagtgagtgctatgatgcagttaacttaataggtgatcaatttggtaactgtgagattacaggaattcgaaattttaaaaagtgtgaaagtgcaaattcaatatgtggcaggctacagtgtataaatgttgaaaccatccctgatttgccagagcatacgactataatttctactcatttacaggcagaaaatctcatgtgctggggcacaggctatcatctatccatgaaacccatgggaatacctgacctaggtatgataaatgatggcacctcctgtggagaaggccgggtatgttttaaaaaaaattgcgtcaatagctcagtcctgcagtttgactgtttgcctgagaaatgcaatacccggggtgtttgcaacaacagaaaaaactgccactgcatgtatgggtgggcacctccattctgtgaggaagtggggtatggaggaagcattgacagtgggcctccaggactgctcagaggggcgattccctcgtcaatttgggttgtgtccatcataatgtttcgccttattttattaatcctttcagtggtttttgtgtttttccggcaagtgataggaaaccacttaaaacccaaacaggaaaaaatgccactatccaaagcaaaaactgaacaggaagaatctaaaacaaaaactgtacaggaagaatctaaaacaaaaactggacaggaagaatctgaagcaaaaactggacaggaagaatctaaagcaaacattgaaagtaaacgacccaaagcaaagagtgtcaagaaacaaaaaaagtaa

SEQ ID NO: 973 - DNA, 542 bp, Homo sapiens
  source 1..542: mol_type = unassigned DNA
cagctatgggctggaggccccggagagctcgggggaccccgttgctgctgctgctactactgctgctgctctggccagtgccaggcgccggggtgcttcaaggacatatccctgggcagccagtcaccccgcactgggtcctggatggacaaccctggcgcaccgtcagcctggaggagccggtctcgaagccagacatggggctggtggccctggaggctgaaggccaggagctcctgcttgagctggagaagaaccagctgctggccccaggatacatagaaacccactacggcccagatgggcagccagtggtgctggcccccaaccacacggtgagatgcttccatgggctctgggatgcaccgccagagggcaggcgagaagcgcgcaggacccggaagtacctggaactgtacattgtggcagaccacaccctgttcttgactcggcaccgaaacttgaaccacaccaaacagcgtctcctggaagtcgccaactacgtggaccaggtggtgaactctgcgggagatgctcatgga

SEQ ID NO: 974 - DNA, 380 bp, Homo sapiens
  source 1..380: mol_type = unassigned DNA
gagccggagttgcgagccgctgcctagaggccgaggagctcacagctatgggctggaggccccggagagctcgggggaccccgttgctgctgctgctactactgctgctgctctggccagtgccaggcgccggggtgcttcaaggacatatccctgggcagccagtcaccccgcactgggtcctggatggacaaccctggcgcaccgtcagcctggaggagccggtctcgaagccagacatggggctggtggccctggaggctgaaggccaggagctcctgcttgagctggagaagaaccagctgctggccccaggatacatagaaacccactacggcccagcccaggagtgccgcgacctctgctgctttgctcacaac

SEQ ID NO: 975 - DNA, 3452 bp, Homo sapiens
  source 1..3452: mol_type = unassigned DNA
cggcggcctgaggctgcaccgggcacgggtcggccgcaatccagcctgggcggagccggagttgcgagccgctgcctagaggccgaggagctcacagctatgggctggaggccccggagagctcgggggaccccgttgctgctgctgctactactgctgctgctctggccagtgccaggcgccggggtgcttcaaggacatatccctgggcagccagtcaccccgcactgggtcctggatggacaaccctggcgcaccgtcagcctggaggagccggtctcgaagccagacatggggctggtggccctggaggctgaaggccaggagctcctgcttgagctggagaagaaccacaggctgctggccccaggatacatagaaacccactacggcccagatgggcagccagtggtgctggcccccaaccacacggatcattgccactaccaagggcgagtaaggggcttccccgactcctgggtagtcctctgcacctgctctgggatgagtggcctgatcaccctcagcaggaatgccagctattatctgcgtccctggccaccccggggctccaaggacttctcaacccacgagatctttcggatggagcagctgctcacctggaaaggaacctgtggccacagggatcctgggaacaaagcgggcatgaccagccttcctggtggtccccagagcaggggcaggcgagaagcgcgcaggacccggaagtacctggaactgtacattgtggcagaccacaccctgttcttgactcggcaccgaaacttgaaccacaccaaacagcgtctcctggaagtcgccaactacgtggaccagcttctcaggactctggacattcaggtggcgctgaccggcctggaggtgtggaccgagcgggaccgcagccgcgtcacgcaggacgccaacgccacgctctgggccttcctgcagtggcgccgggggctgtgggcgcagcggccccacgactccgcgcagctgctcacgggccgcgccttccagggcgccacagtgggcctggcgcccgtcgagggcatgtgccgcgccgagagctcgggaggcgtgagcacggaccactcggagctccccatcggcgccgcagccaccatggcccatgagatcggccacagcctcggcctcagccacgaccccgacggctgctgcgtggaggctgcggccgagtccggaggctgcgtcatggctgcggccaccgggcacccgtttccgcgcgtgttcagcgcctgcagccgccgccagctgcgcgccttcttccgcaaggggggcggcgcttgcctctccaatgccccggaccccggactcccggtgccgccggcgctctgcgggaacggcttcgtggaagcgggcgaggagtgtgactgcggccctggccaggagtgccgcgacctctgctgctttgctcacaactgctcgctgcgcccgggggcccagtgcgcccacggggactgctgcgtgcgctgcctgctgaagccggctggagcgctgtgccgccaggccatgggtgactgtgacctccctgagttttgcacgggcacctcctcccactgtcccccagacgtttacctactggacggctcaccctgtgccaggggcagtggctactgctgggatggcgcatgtcccacgctggagcagcagtgccagcagctctgggggcctggctcccacccagctcccgaggcctgtttccaggtggtgaactctgcgggagatgctcatggaaactgcggccaggacagcgagggccacttcctgccctgtgcagggagggatgccctgtgtgggaagctgcagtgccagggtggaaagcccagcctgctcgcaccgcacatggtgccagtggactctaccgttcacctagatggccaggaagtgacttgtcggggagccttggcactccccagtgcccagctggacctgcttggcctgggcctggtagagccaggcacccagtgtggacctagaatggtttgcaatagcaaccataactgccactgtgctccaggctgggctccacccttctgtgacaagccaggctttggtggcagcatggacagtggccctgtgcaggctgaaaaccatgacaccttcctgctggccatgctcctcagcgtcctgctgcctctgctcccaggggccggcctggcctggtgttgctaccgactcccaggagcccatctgcagcgatgcagctggggctgcagaagggaccctgcgtgcagtggccccaaagatggcccacacagggaccaccccctgggcggcgttcaccccatggagttgggccccacagccactggacagccctggcccctggaccctgagaactctcatgagcccagcagccaccctgagaagcctctgccagcagtctcgcctgacccccaagcagatcaagtccagatgccaagatcctgcctctggtgagaggtagctcctaaaatgaacagatttaaagacaggtggccactgacagccactccaggaacttgaactgcaggggcagagccagtgaatcaccggacctccagcacctgcaggcagcttggaagtttcttccccgagtggagcttcgacccacccactccaggaacccagagccacattagaagttcctgagggctggagaacactgctgggcacactctccagctcaataaaccatcagtcccagaagcaaaggtcacacagcccctgacctccctcaccagtggaggctgggtagtgctggccatcccaaaagggctctgtcctgggagtctggtgtgtctcctacatgcaatttccacggacccagctctgtggagggcatgactgctggccagaagctagtggtcctggggccctatggttcgactgagtccacactcccctggagcctggctggcctctgcaaacaaacataattttggggaccttccttcctgtttcttcccaccctgtcttctcccctaggtggttcctgagcccccacccccaatcccagtgctacacctgaggttctggagctcagaatctgacagcctctcccccattctgtgtgtgtcggggggacagagggaaccatttaagaaaagataccaaagtagaagtcaaaagaaagacatgttggctataggcgtggtggctcatgcctataatcccagcactttgggaagccggggtaggaggatcaccagaggccagcaggtccacaccagcctgggcaacacagcaagacaccgcatctacagaaaaattttaaaattagctgggcgtggtggtgtgtacctgtaggcctagctgctcaggaggctgaagcaggaggatcacttgagcctgagttcaacactgcagtgagctatggtggcaccactgcactccagcctgggtgacagagcaagaccctgtctctaaaataaattttaaaaagacat

SEQ ID NO: 976 - DNA, 3677 bp, Homo sapiens
  source 1..3677: mol_type = unassigned DNA
gggcggcggtccgggagtggcgacccggctcccccatggcgcgcgccgtcggggcccctggccaggctccgagcggggttggcggggaggggaggcgggagcgagggcgggcggtgggaggtgggggcgggaaggtccgaaggcggcggcctgaggctgcaccgggcacgggtcggccgcaatccagcctgggcggagccggagttgcgagccgctgcctagaggccgaggagctcacagctatgggctggaggccccggagagctcgggggaccccgttgctgctgctgctactactgctgctgctctggccagtgccaggcgccggggtgcttcaaggacatatccctgggcagccagtcaccccgcactgggtcctggatggacaaccctggcgcaccgtcagcctggaggagccggtctcgaagccagacatggggctggtggccctggaggctgaaggccaggagctcctgcttgagctggagaagaaccacaggctgctggccccaggatacatagaaacccactacggcccagatgggcagccagtggtgctggcccccaaccacacggatcattgccactaccaagggcgagtaaggggcttccccgactcctgggtagtcctctgcacctgctctgggatgagtggcctgatcaccctcagcaggaatgccagctattatctgcgtccctggccaccccggggctccaaggacttctcaacccacgagatctttcggatggagcagctgctcacctggaaaggaacctgtggccacagggatcctgggaacaaagcgggcatgaccagccttcctggtggtccccagagcaggggcaggcgagaagcgcgcaggacccggaagtacctggaactgtacattgtggcagaccacaccctgttcttgactcggcaccgaaacttgaaccacaccaaacagcgtctcctggaagtcgccaactacgtggaccagcttctcaggactctggacattcaggtggcgctgaccggcctggaggtgtggaccgagcgggaccgcagccgcgtcacgcaggacgccaacgccacgctctgggccttcctgcagtggcgccgggggctgtgggcgcagcggccccacgactccgcgcagctgctcacgggccgcgccttccagggcgccacagtgggcctggcgcccgtcgagggcatgtgccgcgccgagagctcgggaggcgtgagcacggaccactcggagctccccatcggcgccgcagccaccatggcccatgagatcggccacagcctcggcctcagccacgaccccgacggctgctgcgtggaggctgcggccgagtccggaggctgcgtcatggctgcggccaccgggcacccgtttccgcgcgtgttcagcgcctgcagccgccgccagctgcgcgccttcttccgcaaggggggcggcgcttgcctctccaatgccccggaccccggactcccggtgccgccggcgctctgcgggaacggcttcgtggaagcgggcgaggagtgtgactgcggccctggccaggagtgccgcgacctctgctgctttgctcacaactgctcgctgcgcccgggggcccagtgcgcccacggggactgctgcgtgcgctgcctgctgaagccggctggagcgctgtgccgccaggccatgggtgactgtgacctccctgagttttgcacgggcacctcctcccactgtcccccagacgtttacctactggacggctcaccctgtgccaggggcagtggctactgctgggatggcgcatgtcccacgctggagcagcagtgccagcagctctgggggcctggctcccacccagctcccgaggcctgtttccaggtggtgaactctgcgggagatgctcatggaaactgcggccaggacagcgagggccacttcctgccctgtgcagggagggatgccctgtgtgggaagctgcagtgccagggtggaaagcccagcctgctcgcaccgcacatggtgccagtggactctaccgttcacctagatggccaggaagtgacttgtcggggagccttggcactccccagtgcccagctggacctgcttggcctgggcctggtagagccaggcacccagtgtggacctagaatggtgtgccagagcaggcgctgcaggaagaatgccttccaggagcttcagcgctgcctgactgcctgccacagccacggggtttgcaatagcaaccataactgccactgtgctccaggctgggctccacccttctgtgacaagccaggctttggtggcagcatggacagtggccctgtgcaggctgaaaaccatgacaccttcctgctggccatgctcctcagcgtcctgctgcctctgctcccaggggccggcctggcctggtgttgctaccgactcccaggagcccatctgcagcgatgcagctggggctgcagaagggaccctgcgtgcagtggccccaaagatggcccacacagggaccaccccctgggcggcgttcaccccatggagttgggccccacagccactggacagccctggcccctggaccctgagaactctcatgagcccagcagccaccctgagaagcctctgccagcagtctcgcctgacccccaagcagatcaagtccagatgccaagatcctgcctctggtgagaggtagctcctaaaatgaacagatttaaagacaggtggccactgacagccactccaggaacttgaactgcaggggcagagccagtgaatcaccggacctccagcacctgcaggcagcttggaagtttcttccccgagtggagcttcgacccacccactccaggaacccagagccacattagaagttcctgagggctggagaacactgctgggcacactctccagctcaataaaccatcagtcccagaagcaaaggtcacacagcccctgacctccctcaccagtggaggctgggtagtgctggccatcccaaaagggctctgtcctgggagtctggtgtgtctcctacatgcaatttccacggacccagctctgtggagggcatgactgctggccagaagctagtggtcctggggccctatggttcgactgagtccacactcccctggagcctggctggcctctgcaaacaaacataattttggggaccttccttcctgtttcttcccaccctgtcttctcccctaggtggttcctgagcccccacccccaatcccagtgctacacctgaggttctggagctcagaatctgacagcctctcccccattctgtgtgtgtcggggggacagagggaaccatttaagaaaagataccaaagtagaagtcaaaagaaagacatgttggctataggcgtggtggctcatgcctataatcccagcactttgggaagccggggtaggaggatcaccagaggccagcaggtccacaccagcctgggcaacacagcaagacaccgcatctacagaaaaattttaaaattagctgggcgtggtggtgtgtacctgtaggcctagctgctcaggaggctgaagcaggaggatcacttgagcctgagttcaacactgcagtgagctatggtggcaccactgcactccagcctgggtgacagagcaagaccctgtctctaaaataaattttaaaaagacatatta

SEQ ID NO: 977 - DNA, 1971 bp, Homo sapiens
  source 1..1971: mol_type = unassigned DNA
gagccggagttgcgagccgctgcctagaggccgaggagctcacagctatgggctggaggccccggagagctcgggggaccccgttgctgctgctgctactactgctgctgctctggccagtgccaggcgccggggtgcttcaaggacatatccctgggcagccagtcaccccgcactgggtcctggatggacaaccctggcgcaccgtcagcctggaggagccggtctcgaagccagacatggggctggtggccctggaggctgaaggccaggagctcctgcttgagctggagaagaaccacaggctgctggccccaggatacatagaaacccactacggcccagatgggcagccagtggtgctggcccccaaccacacggtgagatgcttccatgggctctgggatgcaccgccagaggtacccccccaccattcctacccctactcctccttgcattcctaaggggcggttggagccagcccctaccacaccctccctcttgcccctcttgctccagccctggctgagatttggggctggccccttcctccctaggatcattgccactaccaagggcgagtaaggggcttccccgactcctgggtagtcctctgcacctgctctgggatgaggtgagctctgggagaggaggctgggcctgggatggggaaagagctccctcacacccgctcctacccctctgcaccctagtggcctgatcaccctcagcaggaatgccagctattatctgcgtccctggccaccccggggctccaaggacttctcaacccacgagatctttcggatggagcagctgctcacctggaaaggaacctgtggccacagggatcctgggaacaaagcgggcatgaccagccttcctggtggtccccagagcagggtcaggggcatcgatcggatgggagtgggaatgctgtatctatagccctccaaatcagaagagacgggaattcacaggcctcgagtcccagtatttttattgaagtctgaagaaacaagttccagaaaacatgttaaacttccttctgggagctgggattggtggtcagggctcaagcccagcagcttccacgagcttcagcgctgcctgactgcctgccacagccacggggtttgcaatagcaaccataactgccactgtgctccaggctgggctccacccttctgtgacaagccaggctttggtggcagcatggacagtggccctgtgcaggctgaaaaccatgacaccttcctgctggccatgctcctcagcgtcctgctgcctctgctcccaggggccggcctggcctggtgttgctaccgactcccaggagcccatctgcagcgatgcagctggggctgcagaagggaccctgcgtgcagtggccccaaagatggcccacacagggaccaccccctgggcggcgttcaccccatggagttgggccccacagccactggacagccctggcccctggaccctgagaactctcatgagcccagcagccaccctgagaagcctctgccagcagtctcgcctgacccccaagatcaagtccagatgccaagatcctgcctctggtgagaggtagctcctaaaatgaacagatttaaagacaggtggccactgacagccactccaggaacttgaactgcaggggcagagccagtgaatcaccggacctccagcacctgcaggcagcttggaagtttcttccccgagtggagcttcgacccacccactccaggaacccagagccacattagaagttcctgagggctggagaacactgctgggcacactctccagctcaataaaccatcagtcccagaagcaaaggtcacacagcccctgacctccctcaccagtggaggctgggtagtgctggccatcccaaaagggctctgtcctgggagtctggtgtgtctcctacatgcaatttccacggacccagctctgtggagg

SEQ ID NO: 978 - DNA, 2619 bp, Homo sapiens
  source 1..2619: mol_type = unassigned DNA
cagctatgggctggaggccccggagagctcgggggaccccgttgctgctgctgctactactgctgctgctctggccagtgccaggcgccggggtgcttcaaggacatatccctgggcagccagtcaccccgcactgggtcctggatggacaaccctggcgcaccgtcagcctggaggagccggtctcgaagccagacatggggctggtggccctggaggctgaaggccaggagctcctgcttgagctggagaagaaccagctgctggccccaggatacatagaaacccactacggcccagatgggcagccagtggtgctggcccccaaccacacggtgagatgcttccatgggctctgggatgcaccgccagagggcaggcgagaagcgcgcaggacccggaagtacctggaactgtacattgtggcagaccacaccctgttcttgactcggcaccgaaacttgaaccacaccaaacagcgtctcctggaagtcgccaactacgtggaccaggagtgccgcgacctctgctgctttgctcacaactgctcgctgcgcccgggggcccagtgcgcccacggggactgctgcgtgcgctgcctgctgaagccggctggagcgctgtgccgccaggccatgggtgactgtgacctccctgagttttgcacgggcacctcctcccactgtcccccagacgtttacctactggacggctcaccctgtgccaggggcagtggctactgctgggatggcgcatgtcccacgctggagcagcagtgccagcagctctgggggcctggctcccacccagctcccgaggcctgtttccaggtggtgaactctgcgggagatgctcatggaaactgcggccaggacagcgagggccacttcctgccctgtgcagggagggatgccctgtgtgggaagctgcagtgccagggtggaaagcccagcctgctcgcaccgcacatggtgccagtggactctaccgttcacctagatggccaggaagtgacttgtcggggagccttggcactccccagtgcccagctggacctgcttggcctgggcctggtagagccaggcacccagtgtggacctagaatggtgtgccagagcaggcgctgcaggaagaatgccttccaggagcttcagcgctgcctgactgcctgccacagccacggggtttgcaatagcaaccataactgccactgtgctccaggctgggctccacccttctgtgacaagccaggctttggtggcagcatggacagtggccctgtgcaggctgaaaaccatgacaccttcctgctggccatgctcctcagcgtcctgctgcctctgctcccaggggccggcctggcctggtgttgctaccgactcccaggagcccatctgcagcgatgcagctggggctgcagaagggaccctgcgtgcagtggccccaaagatggcccacacagggaccaccccctgggcggcgttcaccccatggagttgggccccacagccactggacagccctggcccctggaccctgagaactctcatgagcccagcagccaccctgagaagcctctgccagcagtctcgcctgacccccaagatcaagtccagatgccaagatcctgcctctggtgagaggtagctcctaaaatgaacagatttaaagacaggtggccactgacagccactccaggaacttgaactgcaggggcagagccagtgaatcaccggacctccagcacctgcaggcagcttggaagtttcttccccgagtggagcttcgacccacccactccaggaacccagagccacattagaagttcctgagggctggagaacactgctgggcacactctccagctcaataaaccatcagtcccagaagcaaaggtcacacagcccctgacctccctcaccagtggaggctgggtagtgctggccatcccaaaagggctctgtcctgggagtctggtgtgtctcctacatgcaatttccacggacccagctctgtggagggcatgactgctggccagaagctagtggtcctggggccctatggttcgactgagtccacactcccctggagcctggctggcctctgcaaacaaacataattttggggaccttccttcctgtttcttcccaccctgtcttctcccctaggtggttcctgagcccccacccccaatcccagtgctacacctgaggttctggagctcagaatctgacagcctctcccccattctgtgtgtgtcggggggacagagggaaccatttaagaaaagataccaaagtagaagtcaaaagaaagacatgttggctataggcgtggtggctcatgcctataatcccagcactttgggaagccggggtaggaggatcaccagaggccagcaggtccacaccagcctgggcaacacagcaagacaccgcatctacagaaaaattttaaaattagctgggcgtggtggtgtgtacctgtaggcctagctgctcaggaggctgaagcaggaggatcacttgagcctgagttcaacactgcagtgagctatggtggcaccactgcactccagcctgggtgacagagcaagaccctgtctctaaaataaatttt

SEQ ID NO: 979 - DNA, 3674 bp, Homo sapiens
  source 1..3674: mol_type = unassigned DNA
gggcggcggtccgggagtggcgacccggctcccccatggcgcgcgccgtcggggcccctggccaggctccgagcggggttggcggggaggggaggcgggagcgagggcgggcggtgggaggtgggggcgggaaggtccgaaggcggcggcctgaggctgcaccgggcacgggtcggccgcaatccagcctgggcggagccggagttgcgagccgctgcctagaggccgaggagctcacagctatgggctggaggccccggagagctcgggggaccccgttgctgctgctgctactactgctgctgctctggccagtgccaggcgccggggtgcttcaaggacatatccctgggcagccagtcaccccgcactgggtcctggatggacaaccctggcgcaccgtcagcctggaggagccggtctcgaagccagacatggggctggtggccctggaggctgaaggccaggagctcctgcttgagctggagaagaaccacaggctgctggccccaggatacatagaaacccactacggcccagatgggcagccagtggtgctggcccccaaccacacggatcattgccactaccaagggcgagtaaggggcttccccgactcctgggtagtcctctgcacctgctctgggatgagtggcctgatcaccctcagcaggaatgccagctattatctgcgtccctggccaccccggggctccaaggacttctcaacccacgagatctttcggatggagcagctgctcacctggaaaggaacctgtggccacagggatcctgggaacaaagcgggcatgaccagccttcctggtggtccccagagcaggggcaggcgagaagcgcgcaggacccggaagtacctggaactgtacattgtggcagaccacaccctgttcttgactcggcaccgaaacttgaaccacaccaaacagcgtctcctggaagtcgccaactacgtggaccagcttctcaggactctggacattcaggtggcgctgaccggcctggaggtgtggaccgagcgggaccgcagccgcgtcacgcaggacgccaacgccacgctctgggccttcctgcagtggcgccgggggctgtgggcgcagcggccccacgactccgcgcagctgctcacgggccgcgccttccagggcgccacagtgggcctggcgcccgtcgagggcatgtgccgcgccgagagctcgggaggcgtgagcacggaccactcggagctccccatcggcgccgcagccaccatggcccatgagatcggccacagcctcggcctcagccacgaccccgacggctgctgcgtggaggctgcggccgagtccggaggctgcgtcatggctgcggccaccgggcacccgtttccgcgcgtgttcagcgcctgcagccgccgccagctgcgcgccttcttccgcaaggggggcggcgcttgcctctccaatgccccggaccccggactcccggtgccgccggcgctctgcgggaacggcttcgtggaagcgggcgaggagtgtgactgcggccctggccaggagtgccgcgacctctgctgctttgctcacaactgctcgctgcgcccgggggcccagtgcgcccacggggactgctgcgtgcgctgcctgctgaagccggctggagcgctgtgccgccaggccatgggtgactgtgacctccctgagttttgcacgggcacctcctcccactgtcccccagacgtttacctactggacggctcaccctgtgccaggggcagtggctactgctgggatggcgcatgtcccacgctggagcagcagtgccagcagctctgggggcctggctcccacccagctcccgaggcctgtttccaggtggtgaactctgcgggagatgctcatggaaactgcggccaggacagcgagggccacttcctgccctgtgcagggagggatgccctgtgtgggaagctgcagtgccagggtggaaagcccagcctgctcgcaccgcacatggtgccagtggactctaccgttcacctagatggccaggaagtgacttgtcggggagccttggcactccccagtgcccagctggacctgcttggcctgggcctggtagagccaggcacccagtgtggacctagaatggtgtgccagagcaggcgctgcaggaagaatgccttccaggagcttcagcgctgcctgactgcctgccacagccacggggtttgcaatagcaaccataactgccactgtgctccaggctgggctccacccttctgtgacaagccaggctttggtggcagcatggacagtggccctgtgcaggctgaaaaccatgacaccttcctgctggccatgctcctcagcgtcctgctgcctctgctcccaggggccggcctggcctggtgttgctaccgactcccaggagcccatctgcagcgatgcagctggggctgcagaagggaccctgcgtgcagtggccccaaagatggcccacacagggaccaccccctgggcggcgttcaccccatggagttgggccccacagccactggacagccctggcccctggaccctgagaactctcatgagcccagcagccaccctgagaagcctctgccagcagtctcgcctgacccccaagatcaagtccagatgccaagatcctgcctctggtgagaggtagctcctaaaatgaacagatttaaagacaggtggccactgacagccactccaggaacttgaactgcaggggcagagccagtgaatcaccggacctccagcacctgcaggcagcttggaagtttcttccccgagtggagcttcgacccacccactccaggaacccagagccacattagaagttcctgagggctggagaacactgctgggcacactctccagctcaataaaccatcagtcccagaagcaaaggtcacacagcccctgacctccctcaccagtggaggctgggtagtgctggccatcccaaaagggctctgtcctgggagtctggtgtgtctcctacatgcaatttccacggacccagctctgtggagggcatgactgctggccagaagctagtggtcctggggccctatggttcgactgagtccacactcccctggagcctggctggcctctgcaaacaaacataattttggggaccttccttcctgtttcttcccaccctgtcttctcccctaggtggttcctgagcccccacccccaatcccagtgctacacctgaggttctggagctcagaatctgacagcctctcccccattctgtgtgtgtcggggggacagagggaaccatttaagaaaagataccaaagtagaagtcaaaagaaagacatgttggctataggcgtggtggctcatgcctataatcccagcactttgggaagccggggtaggaggatcaccagaggccagcaggtccacaccagcctgggcaacacagcaagacaccgcatctacagaaaaattttaaaattagctgggcgtggtggtgtgtacctgtaggcctagctgctcaggaggctgaagcaggaggatcacttgagcctgagttcaacactgcagtgagctatggtggcaccactgcactccagcctgggtgacagagcaagaccctgtctctaaaataaattttaaaaagacatatta

SEQ ID NO: 980 - DNA, 2078 bp, Homo sapiens
  source 1..2078: mol_type = unassigned DNA
cggcggcctgaggctgcaccgggcacgggtcggccgcaatccagcctgggcggagccggagttgcgagccgctgcctagaggccgaggagctcacagctatgggctggaggccccggagagctcgggggaccccgttgctgctgctgctactactgctgctgctctggccagtgccaggcgccggggtgcttcaaggacatatccctgggcagccagtcaccccgcactgggtcctggatggacaaccctggcgcaccgtcagcctggaggagccggtctcgaagccagacatggggctggtggccctggaggctgaaggccaggagctcctgcttgagctggagaagaaccaggatgccctgtgtgggaagctgcagtgccagggtggaaagcccagcctgctcgcaccgcacatggtgccagtggactctaccgttcacctagatggccaggaagtgacttgtcggggagccttggcactccccagtgcccagctggacctgcttggcctgggcctggtagagccaggcacccagtgtggacctagaatggtgtgccagagcaggcgctgcaggaagaatgccttccaggagcttcagcgctgcctgactgcctgccacagccacggggtttgcaatagcaaccataactgccactgtgctccaggctgggctccacccttctgtgacaagccaggctttggtggcagcatggacagtggccctgtgcaggctgaaaaccatgacaccttcctgctggccatgctcctcagcgtcctgctgcctctgctcccaggggccggcctggcctggtgttgctaccgactcccaggagcccatctgcagcgatgcagctggggctgcagaagggaccctgcgtgcagtggccccaaagatggcccacacagggaccaccccctgggcggcgttcaccccatggagttgggccccacagccactggacagccctggcccctggaccctgagaactctcatgagcccagcagccaccctgagaagcctctgccagcagtctcgcctgacccccaagcagatcaagtccagatgccaagatcctgcctctggtgagaggtagctcctaaaatgaacagatttaaagacaggtggccactgacagccactccaggaacttgaactgcaggggcagagccagtgaatcaccggacctccagcacctgcaggcagcttggaagtttcttccccgagtggagcttcgacccacccactccaggaacccagagccacattagaagttcctgagggctggagaacactgctgggcacactctccagctcaataaaccatcagtcccagaagcaaaggtcacacagcccctgacctccctcaccagtggaggctgggtagtgctggccatcccaaaagggctctgtcctgggagtctggtgtgtctcctacatgcaatttccacggacccagctctgtggagggcatgactgctggccagaagctagtggtcctggggccctatggttcgactgagtccacactcccctggagcctggctggcctctgcaaacaaacataattttggggaccttccttcctgtttcttcccaccctgtcttctcccctaggtggttcctgagcccccacccccaatcccagtgctacacctgaggttctggagctcagaatctgacagcctctcccccattctgtgtgtgtcggggggacagagggaaccatttaagaaaagataccaaagtagaagtcaaaagaaagacatgttggctataggcgtggtggctcatgcctataatcccagcactttgggaagccggggtaggaggatcaccagaggccagcaggtccacaccagcctgggcaacacagcaagacaccgcatctacagaaaaattttaaaattagctgggcgtggtggtgtgtacctgtaggcctagctgctcaggaggctgaagcaggaggatcacttgagcctgagttcaacactgcagtgagctatggtggcaccactgcactccagcctgggtgacagagcaagaccctgtctctaaaataaattttaaaaagacat

SEQ ID NO: 981 - DNA, 2507 bp, Homo sapiens
  source 1..2507: mol_type = unassigned DNA
gagccggagttgcgagccgctgcctagaggccgaggagctcacagctatgggctggaggccccggagagctcgggggaccccgttgctgctgctgctactactgctgctgctctggccagtgccaggcgccggggtgcttcaaggacatatccctgggcagccagtcaccccgcactgggtcctggatggacaaccctggcgcaccgtcagcctggaggagccggtctcgaagccagacatggggctggtggccctggaggctgaaggccaggagctcctgcttgagctggagaagaaccacaggctgctggccccaggatacatagaaacccactacggcccagatgggcagccagtggtgctggcccccaaccacacggatcattgccactaccaagggcgagtaaggggcttccccgactcctgggtagtcctctgcacctgctctgggatgagtggcctgatcaccctcagcaggaatgccagctattatctgcgtccctggccaccccggggctccaaggacttctcaacccacgagatctttcggatggagcagctgctcacctggaaaggaacctgtggccacagggatcctgggaacaaagcgggcatgaccagccttcctggtggtccccagagcaggggcaggcgagaagcgcgcaggacccggaagtacctggaactgtacattgtggcagaccacaccctgttcttgactcggcaccgaaacttgaaccacaccaaacagcgtctcctggaagtcgccaactacgtggaccagcttctcaggactctggacattcaggtggcgctgaccggcctggaggtgtggaccgagcgggaccgcagccgccgccagctgcgcgccttcttccgcaaggggggcggcgcttgcctctccaatgccccggaccccggactcccggtgccgccggcgctctgcgggaacggcttcgtggaagcgggcgaggagtgtgactgcggccctggccaggagtgccgcgacctctgctgctttgctcacaactgctcgctgcgcccgggggcccagtgcgcccacggggactgctgcgtgcgctgcctgctgaagccggctggagcgctgtgccgccaggccatgggtgactgtgacctccctgagttttgcacgggcacctcctcccactgtcccccagacgtttacctactggacggctcaccctgtgccaggggcagtggctactgctgggatggcgcatgtcccacgctggagcagcagtgccagcagctctgggggcctggctcccacccagctcccgaggcctgtttccaggtggtgaactctgcgggagatgctcatggaaactgcggccaggacagcgagggccacttcctgccctgtgcagggagggatgccctgtgtgggaagctgcagtgccagggtggaaagcccagcctgctcgcaccgcacatggtgccagtggactctaccgttcacctagatggccaggaagtgacttgtcggggagccttggcactccccagtgcccagctggacctgcttggcctgggcctggtagagccaggcacccagtgtggacctagaatggtgtgccagagcaggcgctgcaggaagaatgccttccaggagcttcagcgctgcctgactgcctgccacagccacggggtttgcaatagcaaccataactgccactgtgctccaggctgggctccacccttctgtgacaagccaggctttggtggcagcatggacagtggccctgtgcaggctgaaaaccatgacaccttcctgctggccatgctcctcagcgtcctgctgcctctgctcccaggggccggcctggcctggtgttgctaccgactcccaggagcccatctgcagcgatgcagctggggctgcagaagggaccctgcgtgcagtggccccaaagatggcccacacagggaccaccccctgggcggcgttcaccccatggagttgggccccacagccactggacagccctggcccctggaccctgagaactctcatgagcccagcagccaccctgagaagcctctgccagcagtctcgcctgacccccaagatcaagtccagatgccaagatcctgcctctggtgagaggtagctcctaaaatgaacagatttaaagacaggtggccactgacagccactccaggaacttgaactgcaggggcagagccagtgaatcaccggacctccagcacctgcaggcagcttggaagtttcttccccgagtggagcttcgacccacccactccaggaacccagagccacattagaagttcctgagggctggagaacactgctgggcacactctccagctcaataaaccatcagtcccagaagcaaaggtcacacagcccctgacctccctcaccagtggaggctgggtagtgctggccatcccaaaagggctctgtcctgggagtctggtgtgtctcctacatgcaatttccacggacccagctctgtggagg

SEQ ID NO: 982 - DNA, 3029 bp, Homo sapiens
  source 1..3029: mol_type = unassigned DNA
agctatgggctggaggccccggagagctcgggggaccccgttgctgctgctgctactactgctgctgctctggccagtgccaggcgccggggtgcttcaaggacatatccctgggcagccagtcaccccgcactgggtcctggatggacaaccctggcgcaccgtcagcctggaggagccggtctcgaagccagacatggggctggtggccctggaggctgaaggccaggagctcctgcttgagctggagaagaaccacaggctgctggccccaggatacatagaaacccactacggcccagatgggcagccagtggtgctggcccccaaccacacggtgagatgcttccatgggctctgggatgcaccgccagaggatcattgccactaccaagggcgagtaaggggcttccccgactcctgggtagtcctctgcacctgctctgggatgagggcaggcgagaagcgcgcaggacccggaagtacctggaactgtacattgtggcagaccacaccctgttcttgactcggcaccgaaacttgaaccacaccaaacagcgtctcctggaagtcgccaactacgtggaccagggatgccctgtgtgggaagctgcagtgccagggtggaaagcccagcctgctcgcaccgcacatggtgccagtggactctaccgttcacctagatggccaggaagtgacttgtcggggagccttggcactccccagtgcccagctggacctgcttggcctgggcctggtagagccaggcacccagtgtggacctagaatggtgtgccagagcaggcgctgcaggaagaatgccttccaggagcttcagcgctgcctgactgcctgccacagccacggggtttgcaatagcaaccataactgccactgtgctccaggctgggctccacccttctgtgacaagccaggctttggtggcagcatggacagtggccctgtgcaggctgaaaaccatgacaccttcctgctggccatgctcctcagcgtcctgctgcctctgctcccaggggccggcctggcctggtgttgctaccgactcccaggagcccatctgcagcgatgcagctggggctgcagaagggaccctgcgtgcagtgggtaggctccgagcgcctgcttcctgagcctactcctgcggttcccctcctcagagctctgctggggctgtgggagctggggcaggccctcagccttgcccccaggtgcagagagcagccccagaggccatggaaagaagtagctttgaacaggaggttccagtggcctcccagtcaagcgagggggtggatccctgccccaccaccagcaccgcaaggcatggccctctacctcccagagatgggggcagagggcataacagacaggggcagggcaccacctgggccccgggtggcagctaagaggaccctgacaaagcgagttgtgattgagggtctgtgggcagaggagcaaggtggccagagcctggcgtgtcagcacggagggggcgctgcagagggtggcggctgcttctcatccccaggcgggagtctcagggcaggggagaatgttttgaaggaacatcacaggaaatgacaaggccttgggggatgggatggggacagtcaaagatggcttggaatcatcaagggcagcagggcacccaggggcaaggagagcagacatagctgccgaaggggcggacatccaaggttctttggaagctgagcgatgccagcatctggagagtgccaggctgctgtcagagcctggaggaaatgttaggactagagagaggaggtgccagccgagggcatgaggctcacttggagcctggatcccaaggctcccctgaagagggagcaggaagggagctgagagggtgacttggagcagatgggtgccccaagaaactcagtaaacgcagaactccctgggctggacaccatgctgcggggaggcaataacccactcaggatcactgtgccaacctcctggactcttatcacgttgctcagccccaaagatggcccacacagggaccaccccctgggcggcgttcaccccatggagttgggccccacagccactggacagccctggcccctggaccctgagaactctcatgagcccagcagccaccctgagaagcctctgccagcagtctcgcctgacccccaagatcaagtccagatgccaagatcctgcctctggtgagaggtagctcctaaaatgaacagatttaaagacaggtggccactgacagccactccaggaacttgaactgcaggggcagagccagtgaatcaccggacctccagcacctgcaggcagcttggaagtttcttccccgagtggagcttcgacccacccactccaggaacccagagccacattagaagttcctgagggctggagaacactgctgggcacactctccagctcaataaaccatcagtcccagaagcaaaggtcacacagcccctgacctccctcaccagtggaggctgggtagtgctggccatcccaaaagggctctgtcctgggagtctggtgtgtctcctacatgcaatttccacggacccagctctgtggagggcatgactgctggccagaagctagtggtcctggggccctatggttcgactgagtccacactcccctggagcctggctggcctctgcaaacaaacataattttggggaccttccttcctgtttcttcccaccctgtcttctcccctaggtggttcctgagcccccacccccaatcccagtgctacacctgaggttctggagctcagaatctgacagcctctcccccattctgtgtgtgtcggggggacagagggaaccatttaagaaaagataccaaagtagaagtcaaaagaaagacatgttggctataggcgtggtggctcatgcctataatcccagcactttgggaagccggggtaggaggatcaccagaggccagcaggtccacaccagcctgggcaacacagcaagacaccgcatctacag

SEQ ID NO: 983 - DNA, 812 bp, Homo sapiens
  source 1..812: mol_type = unassigned DNA
gctgcaccgggcacgggtcggccgcaatccagcctgggcggagccggagttgcgagccgctgcctagaggccgaggagctcacagctatgggctggaggccccggagagctcgggggaccccgttgctgctgctgctactactgctgctgctctggccagtgccaggcgccggggtgcttcaaggacatatccctgggcagccagtcaccccgcactgggtcctggatggacaaccctggcgcaccgtcagcctggaggagccggtctcgaagccagacatggggctggtggccctggaggctgaaggccaggagctcctgcttgagctggagaagaaccagtttgcaatagcaaccataactgccactgtgctccaggctgggctccacccttctgtgacaagccaggctttggtggcagcatggacagtggccctgtgcaggctgaaaaccatgacaccttcctgctggccatgctcctcagcgtcctgctgcctctgctcccaggggccggcctggcctggtgttgctaccgactcccaggagcccatctgcagcgatgcagctggggctgcagaagggaccctgcgtgcagtggccccaaagatggcccacacagggaccaccccctgggcggcgttcaccccatggagttgggccccacagccactggacagccctggcccctggaccctgagaactctcatgagcccagcagccaccctgagaagcctctgccagcagtctcgcctgacccccaagcagatcaagtccagatgccaagatcctgcctctggtgagaggtagctcct

SEQ ID NO: 984 - DNA, 3367 bp, Homo sapiens
  source 1..3367: mol_type = unassigned DNA
atccctgcagtggaagtgaggaggaagaaaggtgaactccttttctcaagcacttctgctctcctctaccagaatcactcagaatgcttcccgggtgtatattcttgatgattttactcattcctcaggttaaagaaaagttcatccttggagtagagggtcaacaactggttcgtcctaaaaagcttcctctgatacagaagcgagatactggacacacccatgatgatgacatactgaaaacgtatgaagaagaattgttgtatgaaataaaactaaatagaaaaaccttagtccttcatcttctaagatccagggagttcctaggctcaaattacagtgaaacattctactccatgaaaggagaagcgttcaccaggcatcctcagatcatggatcattgtttttaccaaggatccatagtacacgaatatgattcagctgccagtatcagtacgtgtaatggtctaaggggattcttcagaataaacgaccaaagatacctcattgaaccagtgaaatactcagatgagggagaacatttggtgttcaaatataacctgagggtgccgtatggtgccaattattcctgtacagagcttaattttaccagaaaaactgttccaggggataatgaatctgaagaagactccaaaataaaaggcatccatgatgaaaagtatgttgaattgttcattgttgctgatgatactgtgtatcgcagaaatggtcatcctcacaataaactaaggaaccgaatttggggaatggtcaattttgtcaacatgatttataaaaccttaaacatccatgtgacgttggttggcattgaaatatggacacatgaagataaaatagaactatattcaaatatagaaactaccttattgcgtttttcattttggcaagaaaagatccttaaaacacggaaggattttgatcatgttgtattactcagtgggaagtggctctactcacatgtgcaaggaatttcttatccagggggtatgtgcctgccctattattccaccagtatcattaaggatcttttacctgacacaaacataattgcaaacagaatggcacatcaactggggcataaccttgggatgcagcatgacgagttcccatgcacctgtccttcaggaaaatgcgtgatggacagtgatggaagcattcctgcactgaaattcagtaaatgcagccaaaaccaataccaccagtacttgaaggattataagccaacatgcatgctcaacattccatttccttacaattttcatgatttccaattttgtggaaacaagaagttggatgagggtgaagagtgtgactgtggccctgctcaggagtgtactaatccttgctgtgatgcacacacatgtgtactgaagccaggatttacttgtgcagaaggagaatgctgtgaatcttgtcagataaaaaaagcagggtccatatgcagaccggcgaaagatgaatgtgattttcctgagatgtgcactggccactcgcctgcctgtcctaaggaccagttcagggtcaatggatttccttgcaagaactcagaaggctactgtttcatggggaaatgtccaactcgtgaggatcagtgctctgaactatttgatgatgaggcaatagagagtcatgatatctgctacaagatgaatacaaaaggaaataaatttggatactgcaaaaacaaggaaaacagatttcttccctgtgaggagaaagatgtcagatgtggaaagatctactgcactggaggggagctttcctctctccttggagaagacaagacttatcaccttaaggatccccagaagaatgctactgtcaaatgcaaaactatttttttataccatgattctacagacattggcctggtggcgtcaggaacaaaatgtggagagggaatggtgtgcaacaatggtgaatgtctaaacatggaaaaggtctatatctcaaccaattgcccctctcagtgcaatgaaaatcctgtggatggccacggactccagtgccactgtgaggaaggacaggcacctgtagcctgtgaagaaaccttacatgttaccaatatcaccatcttggttgttgtgcttgtcctggttattgtcggtatcggagttcttatactattagttcgttaccgaaaatgtatcaagttgaagcaagttcagagcccacctacagaaaccctgggagtggagaacaaaggatactttggtgatgagcagcagataaggactgagccaatcctgccagaaattcatttcctaaataaacctgcaagtaaagattcaagaggaatcgcagatcccaatcaaagtgccaagtgagcttgaagttggatatccaaaatggccgtgcaagcttaggctggggattctggatgcaacgtctttacaaccttacctagatatctgctactcacatttttggtagtgtttcaaacgttctttatccagacagacaatgtttaagagaaacaacttatttctgttaatatttaccggtagaattcacaccctctatcataaacatatgctgcagaaaaaaaatgtcttgtggtctttcaaatgctctttagcacaatataaaaattcgtaaccttgctgtagtattttcctacaaaatgttactctgctttcttttaagaatccaaactttaaggatgataacttacagtctaagaagaaaacattgcatataaaaagttacttttttggaaacataaaagtacgttttaaaacttgaacatgacatcattagcactaattctggtttaaatgaaagtcctgcagaaatgccaaagaaggcagggcagagcggcacggattctaggtaattaaaagtgaaagaggcagaagaatagtggacagaactgcaggatagtccttaaaataatggtggtgggaaaggaaaacacagaatgctcctggcaattctaaattcctaggtttgcctttctagaattccttaagaagctgacagagaaatcagagggttacaagaatttcagaaaatttactccaagtgagaggacatactcacaactcctatgaagggtttctaaggtctttgtcctgtgcaatttgacaatgtgccatttctgtgctgtctctgccctctccctatccgtttgttatgggatgggggattaccctgggaatgatttcagctgcttcttacacagatgcctctcaaggtgttcttttgtgtcctctattttcttcttgtgaactgttaaagctacatgcattattttttttccatttactgaaataaagttttcaagttctaaataaaaatattctgactcgatgaaataaataaaggctacaaaagaaggaagaaa

SEQ ID NO: 985 - DNA, 2068 bp, Homo sapiens
  source 1..2068: mol_type = unassigned DNA
gtttgccctcgtagctatttcctggagggaaggggtagctacagtttcctgtccctcttcagcacttctccagctccatatcgcagaaatggtcatcctcacaataaactaaggaaccgaatttggggaatggtcaattttgtcaacatgatttataaaaccttaaacatccatgtgacgttggttggcattgaaatatggacacatgaagataaaatagaactatattcaaatatagaaactaccttattgcgtttttcattttggcaagaaaagatccttaaaacacggaaggattttgatcatgttgtattactcagtgggaagtggctctactcacatgtgcaaggaatttcttatccagggggtatgtgcctgccctattattccaccagtatcattaaggatcttttacctgacacaaacataattgcaaacagaatggcacatcaactggggcataaccttgggatgcagcatgacgagttcccatgcacctgtccttcaggaaaatgcgtgatggacagtgatggaagcattcctgcactgaaattcagtaaatgcagccaaaaccaataccaccagtacttgaaggattataagccaacatgcatgctcaacattccatttccttacaattttcatgatttccaattttgtggaaacaagaagttggatgagggtgaagagtgtgactgtggccctgctcaggagtgtactaatccttgctgtgatgcacacacatgtgtactgaagccaggatttacttgtgcagaaggagaatgctgtgaatcttgtcagataaaaaaagcagggtccatatgcagaccggcgaaagatgaatgtgattttcctgagatgtgcactggccactcgcctgcctgtcctaaggaccagttcagggtcaatggatttccttgcaagaactcagaaggctactgtttcatggggaaatgtccaactcgtgaggatcagtgctctgaactatttgatgatgaggcaatagagagtcatgatatctgctacaagatgaatacaaaaggaaataaatttggatactgcaaaaacaaggaaaacagatttcttccctgtgaggagaaagatgtcagatgtggaaagatctactgcactggaggggagctttcctctctccttggagaagacaagacttatcaccttaaggatccccagaagaatgctactgtcaaatgcaaaactatttttttataccatgattctacagacattggcctggtggcgtcaggaacaaaatgtggagagggaatggtgtgcaacaatggtgaatgtctaaacatggaaaaggtctatatctcaaccaattgcccctctcagtgcaatgaaaatcctgtggatggccacggactccagtgccactgtgaggaaggacaggcacctgtagcctgtgaagaaaccttacatgttaccaatatcaccatcttggttgttgtgcttgtcctggttattgtcggtatcggagttcttatactattagttcgttaccgaaaatgtatcaagttgaagcaagttcagagcccacctacagaaaccctgggagtggagaacaaaggatactttggtgatgagcagcagataaggactgagccaatcctgccagaaattcatttcctaaataaacctgcaagtaaagattcaagaggaatcgcagatcccaatcaaagtgccaagtgagcttgaagttggatatccaaaatggccgtgcaagcttaggctggggattctggatgcaacgtctttacaaccttacctagatatctgctactcacatttttggtagtgtttcaaacgttctttatccagacagacaatgtttaagagaaacaacttatttctgttaatatttaccggtagaattcacaccctctatcataaacatatgctgcagaaaaaaaatgtcttgtggtctttcaaatgctctttagcacaatataaaaattcgtaaccttgctgtagtattttcctacaaaatgttactctgctttcttttaagaatccaaactttaaggatgataacttacagtctaagaag

SEQ ID NO: 986 - DNA, 3279 bp, Homo sapiens
  source 1..3279: mol_type = unassigned DNA
agaccgtgtcccgcggggctgtcacctccgcctctgctccccgacccggccatgcgcggcctcgggctctggctgctgggcgcgatgatgctgcctgcgattgcccccagccggccctgggccctcatggagcagtatgaggtcgtgttgccgtggcgtctgccaggcccccgagtccgccgagctctgccctcccacttgggcctgcacccagagagggtgagctacgtccttggggccacagggcacaacttcaccctccacctgcggaagaacagggacctgctgggctccggctacacagagacctatacggctgccaatggctccgaggtgacggagcagcctcgcgggcaggaccactgcttctaccagggccacgtagaggggtacccggactcagccgccagcctcagcacctgtgccggcctcaggggtttcttccaggtggggtcagacctgcacctgatcgagcccctggatgaaggtggcgagggcggacggcacgccgtgtaccaggctgagcacctgctgcagacggccgggacctgcggggtcagcgacgacagcctgggcagcctcctgggaccccggacggcagccgtcttcaggcctcggcccggggactctctgccatcccgagagacccgctacgtggagctgtatgtggtcgtggacaatgcagagttccagatgctggggagcgaagcagccgtgcgtcatcgggtgctggaggtggtgaatcacgtggacaagctatatcagaaactcaacttccgtgtggtcctggtgggcctggagatttggaatagtcaggacaggttccacgtcagccccgaccccagtgtcacactggagaacctcctgacctggcaggcacggcaacggacacggcggcacctgcatgacaacgtacagctcatcacgggtgtcgacttcaccgggactaccgtggggtttgccagggtgtccgccatgtgctcccacagctcaggggctgtgaaccaggaccacagcaagaaccccgtgggcgtggcctgtaccatggcccatgagatgggccacaacctgggcatggaccatgatgagaacgtccagggctgccgctgccaggaacgcttcgaggccggccgctgcatcatggcgggcagcattggctccagtttccccaggatgttcagtgactgcagccaggcctacctggagagctttttggagcggccgcagtcggtgtgcctcgccaacgcccctgacctcagccacctggtgggcggccccgtgtgtgggaacctgtttgtggagcgtggggagcagtgcgactgcggcccccccgaggactgccggaaccgctgctgcaactctaccacctgccagctggctgagggggcccagtgtgcgcacggtacctgctgccaggagtgcaaggtgaagccggctggtgagctgtgccgtcccaagaaggacatgtgtgacctcgaggagttctgtgacggccggcaccctgagtgcccggaagacgccttccaggagaacggcacgccctgctccgggggctactgctacaacggggcctgtcccacactggcccagcagtgccaggccttctgggggccaggtgggcaggctgccgaggagtcctgcttctcctatgacatcctaccaggctgcaaggccagccggtacagggctgacatgtgtggcgttctgcagtgcaagggtgggcagcagcccctggggcgtgccatctgcatcgtggatgtgtgccacgcgctcaccacagaggatggcactgcgtatgaaccagtgcccgagggcacccggtgtggaccagagaaggtttgctggaaaggacgttgccaggacttacacgtttacagatccagcaactgctctgcccagtgccacaaccatggggtgtgcaaccacaagcaggagtgccactgccacgcgggctgggccccgccccactgcgcgaagctgctgactgaggtgcacgcagcgtccgggagcctccccgtcttcgtggtggtggttctggtgctcctggcagttgtgctggtcaccctggcaggcatcatcgtctaccgcaaagcccggagccgcatcctgagcaggaacgtggctcccaagaccacaatggggcgctccaaccccctgttccaccaggctgccagccgcgtgccggccaagggcggggctccagccccatccaggggcccccaagagctggtccccaccacccacccgggccagcccgcccgacacccggcctcctcggtggctctgaagaggccgccccctgctcctccggtcactgtgtccagcccacccttcccagttcctgtctacacccggcaggcaccaaagcaggtcatcaagccaacgttcgcacccccagtgcccccagtcaaacccggggctggtgcggccaaccctggtccagctgagggtgctgttggcccaaaggttgccctgaagccccccatccagaggaagcaaggagccggagctcccacagcaccctaggggggcacctgcgcctgtgtggaaatttggagaagttgcggcagagaagccatgcgttccagcattccacggtccagctagtgccgctcagccctagaccctgactttgcaggctcagctgctgttctaacctcaggaatgcatctacctgagaggctcctgctgtccacgccctcagccaattccttctccccgccttggccacgtgtagccccagctgtctgcaggcaccaggctgggatgagctgtgtgcttgcgggtgcgtgtgtgtgtacgtgtctccaggtggccgctggtctcccgctgtgttcaggaggccacatatacagcccctcccagccacacctgcccctgctctggggcctgctgagccggctgccctgggcacccggttccaggcagcacagacgtggggcatccccagaaagactccatcccaggaccaggttcccctgcgtgctcttcgagagggtgtcagtgagcagactgcaccccaagctcccgactccaggtcccctgatcttggggcctgtttcccatgggattcaagagggacagccccagctttgtgtgtgtttaagcttaggaatcgcctttatggaaagggctatgtgggagagtcagctatcttgtctggttttcttgagacctcagatgtgtgttcagcagggctgaaagcttttattctttaataatgagaaatgtatattttactaataaattattgaccgagttctgtagattcttgttaga

SEQ ID NO: 987 - DNA, 2441 bp, Homo sapiens
  source 1..2441: mol_type = unassigned DNA
agaccgtgtcccgcggggctgtcacctccgcctctgctccccgacccggccatgcgcggcctcgggctctggctgctgggcgcgatgatgctgcctgggcctgcacccagagagggtgagctacgtccttggggccacagggcacaacttcaccctccacctgcggaagaacagggacctgctgggctccggctacacagagacctatacggctgccaatggctccgaggtgacggagcagcctcgcgggcaggaccactgcttctaccagggccacgtagaggggtacccggactcagccgccagcctcagcacctgtgccggcctcaggtggggtcagacctgcacctgatcgagcccctggatgaaggtggcgagggcggacggcacgccgtgtaccaggctgagcacctgctgcagacggccgggacctgcggggtcagcgacgacagcctgggcagcctcctgggaccccggacggcagccgtcttcaggcctcggcccggggactctctgccatcccgagagacccgctacgtggagctgtatgtggtcgtggacaatgcagagttccagatgctggggagcgaagcagccgtgcgtcatcgggtgctggaggtggtgaatcacgtggacaagctatatcagaaactcaacttccgtgtggtcctggtgggcctggagatttggaatagtcaggacaggttccacgtcagccccgaccccagtgtcacactggagaacctcctgacctggcaggcacggcaacggacacggcggcacctgcatgacaacgtacagctcatcacgggtgtcgacttcaccgggactaccgtggggtttgccagggtgtccgccatgtgctcccacagctcaggggctgtgaaccaggaccacagcaagaaccccgtgggcgtggcctgtaccatggcccatgagatgggccacaacctgggcatggaccatgatgagaacgtccagggctgccgctgccaggaacgcttcgaggccggccgctgcatcatggcgggcagcattggctccagtttccccaggatgttcagtgactgcagccaggcctacctggagagctttttggagcggccgcagtcggtgtgcctcgccaacgcccctgacctcagccacctggtgggcggccccgtgtgtgggaacctgtttgtggagcgtggggagcagtgcgactgcggcccccccgaggactgccggaaccgctgctgcaactctaccacctgccagctggctgagggggcccagtgtgcgcacggtacctgctgccaggagtgcaaggtgaagccggctggtgagctgtgccgtcccaagaaggacatgtgtgacctcgaggagttctgtgacggccggcaccctgagtgcccggaagacgccttccaggagaacggcacgccctgctccgggggctactgctacaacggggcctgtcccacactggcccagcagtgccaggccttctgggggccaggtgggcaggctgccgaggagtcctgcttctcctatgacatcctaccaggctgcaaggccagccggtacagggctgacatgtgtggcgttctgcagtgcaagggtgggcagcagcccctggggcgtgccatctgcatcgtggatgtgtgccacgcgctcaccacagaggatggcactgcgtatgaaccagtgcccgagggcacccggtgtggaccagagaaggtgtgcaaccacaagcaggagtgccactgccacgcgggctgggccccgccccactgcgcgaagctgctgactgaggtgcacgcagcgtccgggagcctccccgtcttcgtggtggtggttctggtgctcctggcagttgtgctggtcaccctggcaggcatcatcgtctaccgcaaagcccggagccgcatcctgagcaggaacgtggctcccaagaccacaatggggcgctccaaccccctgttccaccaggctgccagccgcgtgccggccaagggcggggctccagccccatccaggggcccccaagagctggtccccaccacccacccgggccagcccgcccgacacccggcctcctcggtggctctgaagaggccgccccctgctcctccggtcactgtgtccagcccacccttcccagttcctgtctacacccggcaggcaccaaagcagggtgctgttggcccaaaggttgccctgaagccccccatccagaggaagcaaggagccggagctcccacagcaccctaggggggcacctgcgcctgtgtggaaatttggagaagttgcggcagagaagccatgcgttccagcattccacggtccagctagtgccgctcagccctagaccctgactttgcaggctcagctgctgttctaacctcaggaatgcatctacctgagaggctcctgctgtccacgccctcagccaattcctt

SEQ ID NO: 988 - DNA, 3077 bp, Homo sapiens
  source 1..3077: mol_type = unassigned DNA
ctgtcacctccgcctctgctccccgacccggccatgcgcggcctcgggctctggctgctgggcgcgatgatgctgcctgcgattgcccccagccggccctgggccctcatggagcagtatgaggtcgtgttgccgtggcgtctgccaggcccccgagtccgccgagctctgccctcccacttgggcctgcacccagagagggtgagctacgtccttggggccacagggcacaacttcaccctccacctgcggaagaacagggacctgctgggctccggctacacagagacctatacggctgccaatggctccgaggtgacggagcagcctcgcgggcaggaccactgcttctaccagggccacgtagaggggtacccggactcagccgccagcctcagcacctgtgccggcctcaggggtttcttccaggtggggtcagacctgcacctgatcgagcccctggatgaaggtggcgagggcggacggcacgccgtgtaccaggctgagcacctgctgcagacggccgggacctgcggggtcagcgacgacagcctgggcagcctcctgggaccccggacggcagccgtcttcaggcctcggcccggggactctctgccatcccgagagacccgctacgtggagctgtatgtggtcgtggacaatgcagagttccagatgctggggagcgaagcagccgtgcgtcatcgggtgctggaggtggtgaatcacgtggacaagctatatcagaaactcaacttccgtgtggtcctggtgggcctggagatttggaatagtcaggacaggttccacgtcagccccgaccccagtgtcacactggagaacctcctgacctggcaggcacggcaacggacacggcggcacctgcatgacaacgtacagctcatcacgggtgtcgacttcaccgggactaccgtggggtttgccagggtgtccgccatgtgctcccacagctcaggggctgtgaaccaggaccacagcaagaaccccgtgggcgtggcctgtaccatggcccatgagatgggccacaacctgggcatggaccatgatgagaacgtccagggctgccgctgccaggaacgcttcgaggccggccgctgcatcatggcgggcagcattggctccagtttccccaggatgttcagtgactgcagccaggcctacctggagagctttttggagcggccgcagtcggtgtgcctcgccaacgcccctgacctcagccacctggtgggcggccccgtgtgtgggaacctgtttgtggagcgtggggagcagtgcgactgcggcccccccgaggactgccggaaccgctgctgcaactctaccacctgccagctggctgagggggcccagtgtgcgcacggtacctgctgccaggagtgcaaggtgaagccggctggtgagctgtgccgtcccaagaaggacatgtgtgacctcgaggagttctgtgacggccggcaccctgagtgcccggaagacgccttccaggagaacggcacgccctgctccgggggctactgctacaacggggcctgtcccacactggcccagcagtgccaggccttctgggggccaggtgggcaggctgccgaggagtcctgcttctcctatgacatcctaccaggctgcaaggccagccggtacagggctgacatgtgtggcgttctgcagtgcaagggtgggcagcagcccctggggcgtgccatctgcatcgtggatgtgtgccacgcgctcaccacagaggatggcactgcgtatgaaccagtgcccgagggcacccggtgtggaccagagaaggtttgctggaaaggacgttgccaggacttacacgtttacagatccagcaactgctctgcccagtgccacaaccatggggtgtgcaaccacaagcaggagtgccactgccacgcgggctgggccccgccccactgcgcgaagctgctgactgaggtgcacgcaggctgccagccgcgtgccggccaagggcggggctccagccccatccaggggcccccaagagctggtccccaccacccacccgggccagcccgcccgacacccggcctcctcggtggctctgaagaggccgccccctgctcctccggtcactgtgtccagcccacccttcccagttcctgtctacacccggcaggcaccaaagcaggtcatcaagccaacgttcgcacccccagtgcccccagtcaaacccggggctggtgcggccaaccctggtccagctgagggtgctgttggcccaaaggttgccctgaagccccccatccagaggaagcaaggagccggagctcccacagcaccctaggggggcacctgcgcctgtgtggaaatttggagaagttgcggcagagaagccatgcgttccagcattccacggtccagctagtgccgctcagccctagaccctgactttgcaggctcagctgctgttctaacctcaggaatgcatctacctgagaggctcctgctgtccacgccctcagccaattccttctccccgccttggccacgtgtagccccagctgtctgcaggcaccaggctgggatgagctgtgtgcttgcgggtgcgtgtgtgtgtacgtgtctccaggtggccgctggtctcccgctgtgttcaggaggccacatatacagcccctcccagccacacctgcccctgctctggggcctgctgagccggctgccctgggcacccggttccaggcagcacagacgtggggcatccccagaaagactccatcccaggaccaggttcccctgcgtgctcttcgagagggtgtcagtgagcagactgcaccccaagctcccgactccaggtcccctgatcttggggcctgtttcccatgggattcaagagggacagccccagctttgtgtgtgtttaagcttaggaatcgcctttatggaaagggctatgtgggagagtcagctatcttgtctggttttcttgagacctcagatgtgtgttcagcagggctgaaagcttttattctttaataatgagaaatgtatattttactaataaattattgaccgagttc

SEQ ID NO: 989 - DNA, 3839 bp, Homo sapiens
  source 1..3839: mol_type = unassigned DNA
cggcagggttggaaaatgatggaagaggcggaggtggaggcgaccgagtgctgagaggaacctgcggaatcggccgagatggggtctggcgcgcgctttccctcggggacccttcgtgtccggtggttgctgttgcttggcctggtgggcccagtcctcggtgcggcgcggccaggctttcaacagacctcacatctttcttcttatgaaattataactccttggagattaactagagaaagaagagaagcccctaggccctattcaaaacaagtatcttatgttattcaggctgaaggaaaagagcatattattcacttggaaaggaacaaagaccttttgcctgaagattttgtggtttatacttacaacaaggaagggactttaatcactgaccatcccaatatacagaatcattgtcattatcggggctatgtggagggagttcataattcatccattgctcttagcgactgttttggactcagaggattgctgcatttagagaatgcgagttatgggattgaacccctgcagaacagctctcattttgagcacatcatttatcgaatggatgatgtctacaaagagcctctgaaatgtggagtttccaacaaggatatagagaaagaaactgcaaaggatgaagaggaagagcctcccagcatgactcagctacttcgaagaagaagagctgtcttgccacagacccggtatgtggagctgttcattgtcgtagacaaggaaaggtatgacatgatgggaagaaatcagactgctgtgagagaagagatgattctcctggcaaactacttggatagtatgtatattatgttaaatattcgaattgtgctagttggactggagatttggaccaatggaaacctgatcaacatagttgggggtgctggtgatgtgctggggaacttcgtgcagtggcgggaaaagtttcttatcacacgtcggagacatgacagtgcacagctagttctaaagaaaggttttggtggaactgcaggaatggcatttgtgggaacagtgtgttcaaggagccacgcaggcgggattaatgtgtttggacaaatcactgtggagacatttgcttccattgttgctcatgaattgggtcataatcttggaatgaatcacgatgatgggagagattgttcctgtggagcaaagagctgcatcatgaattcaggagcatcgggttccagaaactttagcagttgcagtgcagaggactttgagaagttaactttaaataaaggaggaaactgccttcttaatattccaaagcctgatgaagcctatagtgctccctcctgtggtaataagttggtggacgctggggaagagtgtgactgtggtactccaaaggaatgtgaattggacccttgctgcgaaggaagtacctgtaagcttaaatcatttgctgagtgtgcatatggtgactgttgtaaagactgtcggttccttccaggaggtactttatgccgaggaaaaaccagtgagtgtgatgttccagagtactgcaatggttcttctcagttctgtcagccagatgtttttattcagaatggatatccttgccagaataacaaagcctattgctacaacggcatgtgccagtattatgatgctcaatgtcaagtcatctttggctcaaaagccaaggctgcccccaaagattgtttcattgaagtgaattctaaaggtgacagatttggcaattgtggtttctctggcaatgaatacaagaagtgtgccactgggaatgctttgtgtggaaagcttcagtgtgagaatgtacaagagatacctgtatttggaattgtgcctgctattattcaaacgcctagtcgaggcaccaaatgttggggtgtggatttccagctaggatcagatgttccagatcctgggatggttaacgaaggcacaaaatgtggtgctggaaagatctgtagaaacttccagtgtgtagatgcttctgttctgaattatgactgtgatgttcagaaaaagtgtcatggacatggggtatgtaatagcaataagaattgtcactgtgaaaatggctgggctcccccaaattgtgagactaaaggatacggaggaagtgtggacagtggacctacatacaatgaaatgaatactgcattgagggacggacttctggtcttcttcttcctaattgttccccttattgtctgtgctatttttatcttcatcaagagggatcaactgtggagaagctacttcagaaagaagagatcacaaacatatgagtcagatggcaaaaatcaagcaaacccttctagacagccggggagtgttcctcgacatgtttctccagtgacacctcccagagaagttcctatatatgcaaacagatttgcagtaccaacctatgcagccaagcaacctcagcagttcccatcaaggccacctccaccacaaccgaaagtatcatctcagggaaacttaattcctgcccgtcctgctcctgcacctcctttatatagttccctcacttgatttttttaaccttctttttgcaaatgtcttcagggaactgagctaatactttttttttttcttgatgttttcttgaaaagcctttctgttgcaactatgaatgaaaacaaaacaccacaaaacagacttcactaacacagaaaaacagaaactgagtgtgagagttgtgaaatacaaggaaatgcagtaaagccagggaatttacaataacatttccgtttccatcattgaataagtcttattcagtcatcggtgaggttaatgcactaatcatggattttttgaacatgttattgcagtgattctcaaattaactgtattggtgtaagagttttgtcattaagtgtttaagtgttattctgaattttctaccttagttatcattaatgtagttcctcattgaacatgtgataatctaatacctgtgaaaactgactaatcagctgccaataatatctaatatttttcatcatgcacgaattaataatcatcatactctagaatcttgtctgtcactcactacatgaataagcaaatattgtcttcaaaagaatgcacaagaaccacaattaagatgtcatattattttgaaagtacaaaatatactaaaagagtgtgtgtgtattcacgcagttactcgcttccatttttatgacctttcaactataggtaataactcttagagaaattaatttaatattagaatttctattatgaatcatgtgaaagcatgacattcgttcacaatagcactattttaaataaattataagctttaaggtacgaagtatttaatagatctaatcaaatatgttgattcatggctataataaagcaggagcaattataaaatcttcaatcaattgaacttttacaaaaccacttgagaatttcatgagcactttaaaatctgaactttcaaagcttgctattaaatcatttagaatgtttacatttactaaggtgtgctgggtcatgtaaaatattagacactaatattttcatagaaattaggctggagaaagaaggaagaaatggttttcttaaatacctacaaaaaagttactgtggtatctatgagttatcatcttagctgtgttaaaaatgaatttttactatggcagatatggtatggatcgtaaaattttaagcactaaaaattttttcataacctttcataataaagtttaataataggtttattaactgaatttcattagttttttaaaagtgtttttggtttgtgtatatatacatatacaaatacaacatttacaataaataaaatacttgaaattctc

SEQ ID NO: 990 - DNA, 4651 bp, Homo sapiens
  source 1..4651: mol_type = unassigned DNA
gcactcgctggaaagcggctccgagccaggggctattgcaaagccagggtgcgctaccggacggagaggggagagccctgagcagagtgagcaacatcgcagccaaggcggaggccgaagaggggcgccaggcaccaatctccgcgttgcctcagccccggaggcgccccagagcgcttcttgtcccagcagagccactctgcctgcgcctgcctctcagtgtctccaactttgcgctggaagaaaaacttcccgcgcgccggcagaactgcagcgcctccttttagtgactccgggagcttcggctgtagccggctctgcgcgcccttccaacgaataatagaaattgttaattttaacaatccagagcaggccaacgaggctttgctctcccgacccgaactaaaggtccctcgctccgtgcgctgctacgagcggtgtctcctggggctccaatgcagcgagctgtgcccgaggggttcggaaggcgcaagctgggcagcgacatggggaacgcggagcgggctccggggtctcggagctttgggccagtacccacgctgctgctgctcgccgcggcgctactggccgtgtcggacgcactcgggcgcccctccgaggaggacgaggagctagtggtgccggagctggagcgcgccccgggacacgggaccacgcgcctccgcctgcacgcctttgaccagcagctggatctggagctgcggcccgacagcagctttttggcgcccggcttcacgctccagaacgtggggcgcaaatccgggtccgagacgccgcttccggaaaccgacctggcgcactgcttctactccggcaccgtgaatggcgatcccagctcggctgccgccctcagcctctgcgagggcgtgcgcggcgccttctacctgctgggggaggcgtatttcatccagccgctgcccgccgccagcgagcgcctcgccaccgccgccccaggggagaagccgccggcaccactacagttccacctcctgcggcggaatcggcagggcgacgtcggcggcacgtgcggggtcgtggacgacgagccccggccgactgggaaagcggagaccgaagacgaggacgaagggactgagggcgaggacgaaggggctcagtggtcgccgcaggacccggcactgcaaggcgtaggacagcccacaggaactggaagcataagaaagaagcgatttgtgtccagtcaccgctatgtggaaaccatgcttgtggcagaccagtcgatggcagaattccacggcagtggtctaaagcattaccttctcacgttgttttcggtggcagccagattgtacaaacaccccagcattcgtaattcagttagcctggtggtggtgaagatcttggtcatccacgatgaacagaaggggccggaagtgacctccaatgctgccctcactctgcggaacttttgcaactggcagaagcagcacaacccacccagtgaccgggatgcagagcactatgacacagcaattcttttcaccagacaggacttgtgtgggtcccagacatgtgatactcttgggatggctgatgttggaactgtgtgtgatccgagcagaagctgctccgtcatagaagatgatggtttacaagctgccttcaccacagcccatgaattaggccacgtgtttaacatgccacatgatgatgcaaagcagtgtgccagccttaatggtgtgaaccaggattcccacatgatggcgtcaatgctttccaacctggaccacagccagccttggtctccttgcagtgcctacatgattacatcatttctggataatggtcatggggaatgtttgatggacaagcctcagaatcccatacagctcccaggcgatctccctggcacctcgtacgatgccaaccggcagtgccagtttacatttggggaggactccaaacactgccccgatgcagccagcacatgtagcaccttgtggtgtaccggcacctctggtggggtgctggtgtgtcaaaccaaacacttcccgtgggcggatggcaccagctgtggagaagggaaatggtgtatcaacggcaagtgtgtgaacaaaaccgacagaaagcattttgatacgccttttcatggaagctggggaatgtgggggccttggggagactgttcgagaacgtgcggtggaggagtccagtacacgatgagggaatgtgacaacccagtcccaaagaatggagggaagtactgtgaaggcaaacgagtgcgctacagatcctgtaaccttgaggactgtccagacaataatggaaaaacctttagagaggaacaatgtgaagcacacaacgagttttcaaaagcttcctttgggagtgggcctgcggtggaatggattcccaagtacgctggcgtctcaccaaaggacaggtgcaagctcatctgccaagccaaaggcattggctacttcttcgttttgcagcccaaggttgtagatggtactccatgtagcccagattccacctctgtctgtgtgcaaggacagtgtgtaaaagctggttgtgatcgcatcatagactccaaaaagaagtttgataaatgtggtgtttgcgggggaaatggatctacttgtaaaaaaatatcaggatcagttactagtgcaaaacctggatatcatgatatcatcacaattccaactggagccaccaacatcgaagtgaaacagcggaaccagaggggatccaggaacaatggcagctttcttgccatcaaagctgctgatggcacatatattcttaatggtgactacactttgtccaccttagagcaagacattatgtacaaaggtgttgtcttgaggtacagcggctcctctgcggcattggaaagaattcgcagctttagccctctcaaagagcccttgaccatccaggttcttactgtgggcaatgcccttcgacctaaaattaaatacacctacttcgtaaagaagaagaaggaatctttcaatgctatccccactttttcagcatgggtcattgaagagtggggcgaatgttctaagtcatgtgaattgggttggcagagaagactggtagaatgccgagacattaatggacagcctgcttccgagtgtgcaaaggaagtgaagccagccagcaccagaccttgtgcagaccatccctgcccccagtggcagctgggggagtggtcatcatgttctaagacctgtgggaagggttacaaaaaaagaagcttgaagtgtctgtcccatgatggaggggtgttatctcatgagagctgtgatcctttaaagaaacctaaacatttcatagacttttgcacaatggcagaatgcagttaagtggtttaagtggtgttagctttgagggcaaggcaaagtgaggaagggctggtgcagggaaagcaagaaggctggagggatccagcgtatcttgccagtaaccagtgaggtgtatcagtaaggtgggattatgggggtagatagaaaaggagttgaatcatcagagtaaactgccagttgcaaatttgataggatagttagtgaggattattaacctctgagcagtgatatagcataataaagccccgggcattattattattatttcttttgttacatctattacaagtttagaaaaaacaaagcaattgtcaaaaaaagttagaactattacaacccctgtttcctggtacttatcaaatacttagtatcatgggggttgggaaatgaaaagtaggagaaaagtgagattttactaagacctgttttactttacctcactaacaatggggggagaaaggagtacaaataggatctttgaccagcactgtttatggctgctatggtttcagagaatgtttatacattatttctaccgagaattaaaacttcagattgttcaacatgagagaaaggctcagcaacgtgaaataacgcaaatggcttcctctttccttttttggaccatctcagtctttatttgtgtaattcattttgaggaaaaaacaactccatgtatttattcaagtgcattaaagtctacaatggaaaaaaagcagtgaagcattagatgctggtaaaagctagaggagacacaatgagcttagtacctccaacttcctttctttcctaccatgtaaccctgctttgggaatatggatgtaaagaagtaacttgtgtctcatgaaaatcagtacaatcacacaaggaggatgaaacgccggaacaaaaatgaggtgtgtagaacagggtcccacaggtttggggacattgagatcacttgtcttgtggtggggaggctgctgaggggtagcaggtccatctccagcagctggtccaacagtcgtatcctggtgaatgtctgttcagctcttctgtgagaatatgattttttccatatgtatatagtaaaatatgttactataaattacatgtactttataagtattggtttgggtgttccttccaagaaggactatagttagtaataaatgcctataataacatatttatttttatacatttatttctaatgaaaaaaacttttaaattatatcgcttttgtggaagtgcatataaaatagagtatttatacaatatatgttactagaaataaaagaacacttttggaa

SEQ ID NO: 991 - DNA, 4230 bp, Homo sapiens
  source 1..4230: mol_type = unassigned DNA
gctcagtgctgaagaccagcccggctcctcctctttgacccctccctgcccaggctccaaagaagaagaaaccaaggcccagagagggaggcccaggtgcagggagcaggcgagggaaggatccgtacaggggcccaacactactccaccaaccgaagcccccaaaaggagcccggtgatgctgcgaaggctgtgaacaggggaggcggcactgtgggggctgccggcagccggggctggggagagacatgtggacacgtggcctctatggctcccgcctgccagatcctccgctgggccctcgccctggggctgggcctcatgttcgaggtcacgcacgccttccggtctcaagatgagttcctgtccagtctggagagctatgagatcgccttccccacccgcgtggaccacaacggggcactgctggccttctcgccacctcctccccggaggcagcgccgcggcacgggggccacagccgagtcccgcctcttctacaaagtggcctcgcccagcacccacttcctgctgaacctgacccgcagctcccgtctactggcagggcacgtctccgtggagtactggacacgggagggcctggcctggcagagggcggcccggccccactgcctctacgctggtcacctgcagggccaggccagcacctcccatgtggccatcagcacctgtggaggcctgcacggcctgatcgtggcagacgaggaagagtacctgattgagcccctgcacggtgggcccaagggttctcggagcccggaggaaagtggaccacatgtggtgtacaagcgttcctctctgcgtcacccccacctggacacagcctgtggagtgagagatgagaaaccgtggaaagggcggccatggtggctgcggaccttgaagccaccgcctgccaggcccctggggaatgaaacagagcgtggccagccaggcctgaagcgatcggtcagccgagagcgctacgtggagaccctggtggtggctgacaagatgatggtggcctatcacgggcgccgggatgtggagcagtatgtcctggccatcatgaacattgttgccaaacttttccaggactcgagtctgggaagcaccgttaacatcctcgtaactcgcctcatcctgctcacggaggaccagcccactctggagatcacccaccatgccgggaagtccctggacagcttctgtaagtggcagaaatccatcgtgaaccacagcggccatggcaatgccattccagagaacggtgtggctaaccatgacacagcagtgctcatcacacgctatgacatctgcatctacaagaacaaaccctgcggcacactaggcctggccccggtgggcggaatgtgtgagcgcgagagaagctgcagcgtcaatgaggacattggcctggccacagcgttcaccattgcccacgagatcgggcacacattcggcatgaaccatgacggcgtgggaaacagctgtggggcccgtggtcaggacccagccaagctcatggctgcccacattaccatgaagaccaacccattcgtgtggtcatcctgcagccgtgactacatcaccagctttctagactcgggcctggggctctgcctgaacaaccggccccccagacaggactttgtgtacccgacagtggcaccgggccaagcctacgatgcagatgagcaatgccgctttcagcatggagtcaaatcgcgtcagtgtaaatacggggaggtctgcagcgagctgtggtgtctgagcaagagcaaccggtgcatcaccaacagcatcccggccgccgagggcacgctgtgccagacgcacaccatcgacaaggggtggtgctacaaacgggtctgtgtcccctttgggtcgcgcccagagggtgtggacggagcctgggggccgtggactccatggggcgactgcagccggacctgtggcggcggcgtgtcctcttctagccgtcactgcgacagccccaggccaaccatcgggggcaagtactgtctgggtgagagaaggcggcaccgctcctgcaacacggatgactgtccccctggctcccaggacttcagagaagtgcagtgttctgaatttgacagcatccctttccgtgggaaattctacaagtggaaaacgtaccggggagggggcgtgaaggcctgctcgctcacgtgcctagcggaaggcttcaacttctacacggagagggcggcagccgtggtggacgggacaccctgccgtccagacacggtggacatttgcgtcagtggcgaatgcaagcacgtgggctgcgaccgagtcctgggctccgacctgcgggaggacaagtgccgagtgtgtggcggtgacggcagtgcctgcgagaccatcgagggcgtcttcagcccagcctcacctggggccgggtacgaggatgtcgtctggattcccaaaggctccgtccacatcttcatccaggatctgaacctctctctcagtcacttggccctgaagggagaccaggagtccctgctgctggaggggctgcctgggaccccccagccccaccgtctgcctctagctgggaccacctttcaactgcgacaggggccagaccaggtccagagcctcgaagccctgggaccgattaatgcatctctcatcgtcatggtgctggcccggaccgagctgcctgccctccgctaccgcttcaatgcccccatcgcccgtgactcgctgcccccctactcctggcactatgcgccctggaccaagtgctcggcccagtgtgcaggcggtagccaggtgcaggcggtggagtgccgcaaccagctggacagctccgcggtcgccccccactactgcagtgcccacagcaagctgcccaaaaggcagcgcgcctgcaacacggagccttgccctccagactgggttgtagggaactggtcgctctgcagccgcagctgcgatgcaggcgtgcgcagccgctcggtcgtgtgccagcgccgcgtctctgccgcggaggagaaggcgctggacgacagcgcatgcccgcagccgcgcccacctgtactggaggcctgccacggccccacttgccctccggagtgggcggccctcgactggtctgagtgcacccccagctgcgggccgggcctccgccaccgcgtggtcctttgcaagagcgcagaccaccgcgccacgctgcccccggcgcactgctcacccgccgccaagccaccggccaccatgcgctgcaacttgcgccgctgccccccggcccgctgggtggctggcgagtggggtgagtgctctgcacagtgcggcgtcgggcagcggcagcgctcggtgcgctgcaccagccacacgggccaggcgtcgcacgagtgcacggaggccctgcggccgcccaccacgcagcagtgtgaggccaagtgcgacagcccaacccccggggacggccctgaagagtgcaaggatgtgaacaaggtcgcctactgccccctggtgctcaaatttcagttctgcagccgagcctacttccgccagatgtgctgcaaaacctgccatggccactagggggcgcgcggcacccggagccacagctggcggggtctccgccgccagccctgcagcgggccggccagagggggccccgggggggcgggaactgggagggaagggtgagacggagccggaagttatttattgggaacccctgcagggccctggctggggggatggagaggggctggctatccccccagagcccctcttcagcatccgccccttccagttcacatagtgagaccccccctccagggtgggtctggggaggggacagctgttcaccccagcaccctttgaacccacccttagggagtccccaacactccccccctcctttgatcggaatatgtactgtgaagagtaggggtggggaggtggtctgccggtgccctgccccccagcactgccctacccctccactccgagctgggggggaatctgtgtctgctatgggaggggggggggtagcaccacctccctgacaccctcccctgacctgactagggggaggatccaccccaacctctgccctgcccgccccaggggcaccccgacatccaggccaccccctcatggtgctacagaccctgccctggggcccacacactcctgccaggaagccctacatcaataaagttctgtcttgtgtagatttctacg

SEQ ID NO: 992 - DNA, 4346 bp, Homo sapiens
  source 1..4346: mol_type = unassigned DNA
gacccctccctgcccaggctccaaagaagaagaaaccaaggcccagagagggaggcccaggtgcagggagcaggcgagggaaggatccgtacaggggcccaacactactccaccaaccgaagcccccaaaaggagcccggtgatgctgcgaaggctgtgaacaggggaggcggcactgtgggggctgccggcagccggggctggggagagacatgtggacacgtggcctctatggctcccgcctgccagatcctccgctgggccctcgccctggggctgggcctcatgttcgaggtcacgcacgccttccggtctcaagatgagttcctgtccagtctggagagctatgagatcgccttccccacccgcgtggaccacaacggggcactgctggccttctcgccacctcctccccggaggcagcgccgcggcacgggggccacagccgagtcccgcctcttctacaaagtggcctcgcccagcacccacttcctgctgaacctgacccgcagctcccgtctactggcagggcacgtctccgtggagtactggacacgggagggcctggcctggcagagggcggcccggccccactgcctctacgctggtcacctgcagggccaggccagcacctcccatgtggccatcagcacctgtggaggcctgcacggcctgatcgtggcagacgaggaagagtacctgattgagcccctgcacggtgggcccaagggttctcggagcccggaggaaagtggaccacatgtggtgtacaagcgttcctctctgcgtcacccccacctggacacagcctgtggagtgagagatgagaaaccgtggaaagggcggccatggtggctgcggaccttgaagccaccgcctgccaggcccctggggaatgaaacagagcgtggccagccaggcctgaagcgatcggtcagccgagagcgctacgtggagaccctggtggtggctgacaagatgatggtggcctatcacgggcgccgggatgtggagcagtatgtcctggccatcatgaacattgtcaggttgccaaacttttccaggactcgagtctgggaagcaccgttaacatcctcgtaactcgcctcatcctgctcacggaggaccagcccactctggagatcacccaccatgccgggaagtccctggacagcttctgtaagtggcagaaatccatcgtgaaccacagcggccatggcaatgccattccagagaacggtgtggctaaccatgacacagcagtgctcatcacacgctatgacatctgcatctacaagaacaaaccctgcggcacactaggcctggccccggtgggcggaatgtgtgagcgcgagagaagctgcagcgtcaatgaggacattggcctggccacagcgttcaccattgcccacgagatcgggcacacattcggcatgaaccatgacggcgtgggaaacagctgtggggcccgtggtcaggacccagccaagctcatggctgcccacattaccatgaagaccaacccattcgtgtggtcatcctgcagccgtgactacatcaccagctttctagactcgggcctggggctctgcctgaacaaccggccccccagacaggactttgtgtacccgacagtggcaccgggccaagcctacgatgcagatgagcaatgccgctttcagcatggagtcaaatcgcgtcagtgtaaatacggggaggtctgcagcgagctgtggtgtctgagcaagagcaaccggtgcatcaccaacagcatcccggccgccgagggcacgctgtgccagacgcacaccatcgacaaggggtggtgctacaaacgggtctgtgtcccctttgggtcgcgcccagagggtgtggacggagcctgggggccgtggactccatggggcgactgcagccggacctgtggcggcggcgtgtcctcttctagccgtcactgcgacagccccaggccaaccatcgggggcaagtactgtctgggtgagagaaggcggcaccgctcctgcaacacggatgactgtccccctggctcccaggacttcagagaagtgcagtgttctgaatttgacagcatccctttccgtgggaaattctacaagtggaaaacgtaccggggagggggcgtgaaggcctgctcgctcacgtgcctagcggaaggcttcaacttctacacggagagggcggcagccgtggtggacgggacaccctgccgtccagacacggtggacatttgcgtcagtggcgaatgcaagcacgtgggctgcgaccgagtcctgggctccgacctgcgggaggacaagtgccgagtgtgtggcggtgacggcagtgcctgcgagaccatcgagggcgtcttcagcccagcctcacctggggccgggtacgaggatgtcgtctggattcccaaaggctccgtccacatcttcatccaggatctgaacctctctctcagtcacttggccctgaagggagaccaggagtccctgctgctggaggggctgcctgggaccccccagccccaccgtctgcctctagctgggaccacctttcaactgcgacaggggccagaccaggtccagagcctcgaagccctgggaccgattaatgcatctctcatcgtcatggtgctggcccggaccgagctgcctgccctccgctaccgcttcaatgcccccatcgcccgtgactcgctgcccccctactcctggcactatgcgccctggaccaagtgctcggcccagtgtgcaggcggtagccaggtgcaggcggtggagtgccgcaaccagctggacagctccgcggtcgccccccactactgcagtgcccacagcaagctgcccaaaaggcagcgcgcctgcaacacggagccttgccctccagactgggttgtagggaactggtcgctctgcagccgcagctgcgatgcaggcgtgcgcagccgctcggtcgtgtgccagcgccgcgtctctgccgcggaggagaaggcgctggacgacagcgcatgcccgcagccgcgcccacctgtactggaggcctgccacggccccacttgccctccggagtgggcggccctcgactggtctgaggtcagccgcccccttccttcgcgcccactgggatgcccaggtggggtgtccacggagacgcctctgcgcggtctccaggttagctgtcccctcctcacttcgcactggggcagcaccctgagcacgaaacgccccttccaactgcagtgcacccccagctgcgggccgggcctccgccaccgcgtggtcctttgcaagagcgcagaccaccgcgccacgctgcccccggcgcactgctcacccgccgccaagccaccggccaccatgcgctgcaacttgcgccgctgccccccggcccgctgggtggctggcgagtggggtgagtgctctgcacagtgcggcgtcgggcagcggcagcgctcggtgcgctgcaccagccacacgggccaggcgtcgcacgagtgcacggaggccctgcggccgcccaccacgcagcagtgtgaggccaagtgcgacagcccaacccccggggacggccctgaagagtgcaaggatgtgaacaaggtcgcctactgccccctggtgctcaaatttcagttctgcagccgagcctacttccgccagatgtgctgcaaaacctgccatggccactagggggcgcgcggcacccggagccacagctggcggggtctccgccgccagccctgcagcgggccggccagagggggccccgggggggcgggaactgggagggaagggtgagacggagccggaagttatttattgggaacccctgcagggccctggctggggggatggagaggggctggctatccccccagagcccctcttcagcatccgccccttccagttcacatagtgagaccccccctccagggtgggtctggggaggggacagctgttcaccccagcaccctttgaacccacccttagggagtccccaacactccccccctcctttgatcggaatatgtactgtgaagagtaggggtggggaggtggtctgccggtgccctgccccccagcactgccctacccctccactccgagctgggggggaatctgtgtctgctatgggaggggggggggtagcaccacctccctgacaccctcccctgacctgactagggggaggatccaccccaacctctgccctgcccgccccaggggcaccccgacatccaggccaccccctcatggtgctacagaccctgccctggggcccacacactcctgccaggaagccctacatcaataaagttctgtcttgtgtagatttctacg

SEQ ID NO: 993 - DNA, 4622 bp, Homo sapiens
  source 1..4622: mol_type = unassigned DNA
tcctgctgggccacaggcgagcgctttatttctggagctgagggctaaaacttttttgacttttcttctcctcaacatctgaatcatgccatgtgcccagaggagctggcttgcaaacctttccgtggtggctcagctccttaactttggggcgctttgctatgggagacagcctcagccaggcccggttcgcttcccggacaggaggcaagagcattttatcaagggcctgccagaataccacgtggtgggtccagtccgagtagatgccagtgggcattttttgtcatatggcttgcactatcccatcacgagcagcaggaggaagagagatttggatggctcagaggactgggtgtactacagaatttctcacgaggagaaggacctgttttttaacttgacggtcaatcaaggatttctttccaatagctacatcatggagaagagatatgggaacctctcccatgttaagatgatggcttcctctgcccccctctgccatctcagtggcacggttctacagcagggcaccagagttgggacggcagccctcagtgcctgccatggactgactggatttttccaactaccacatggagactttttcattgaacccgtgaagaagcatccactggttgagggagggtaccacccgcacatcgtttacaggaggcagaaagttccagaaaccaaggagccaacctgtggattaaaggacagtgttaacatctcccagaagcaagagctatggcgggagaagtgggagaggcacaacttgccaagcagaagcctctctcggcgttccatcagcaaggagagatgggtggagacactggtggtggccgacacaaagatgattgaataccatgggagtgagaatgtggagtcctacatcctcaccatcatgaacatggtcactgggttgttccataacccaagcattggcaatgcaattcacattgttgtggttcggctcattctactcgaagaagaagagcaaggactgaaaatagttcaccatgcagaaaagacactgtctagcttctgcaagtggcagaagagtatcaatcccaagagtgacctcaatcctgttcatcacgacgtggctgtccttctcaccagaaaggacatctgtgctggtttcaatcgcccctgcgagaccctgggcctgtctcacctttcaggaatgtgtcagcctcaccgcagttgtaacatcaatgaagattcgggactccctctggctttcacaattgcccatgagctaggacacagcttcggcatccagcatgatgggaaagaaaatgactgtgagcctgtgggcagacatccgtacatcatgtcccgccagctccagtacgatcccactccgctgacatggtccaagtgcagcgaggagtacatcacccgcttcttggaccgaggctgggggttctgtcttgatgacatacctaaaaagaaaggcttgaagtccaaggtcattgcccccggagtgatctatgatgttcaccaccagtgccagctacaatatggacccaatgctaccttctgccaggaagtagaaaacgtctgccagacactgtggtgctccgtgaagggcttttgtcgctctaagctggacgctgctgcagatggaactcaatgtggtgagaagaagtggtgtatggcaggcaagtgcatcacagtggggaagaaaccagagagcattcctggaggctggggccgctggtcaccctggtcccactgttccaggacctgtggggctggagtccagagcgcagagaggctctgcaacaaccccgagccaaagtttggagggaaatattgcactggagaaagaaaacgctatcgcttgtgcaacgtccacccctgtcgctcagaggcaccaacatttcggcagatgcagtgcagtgaatttgacactgttccctacaagaatgaactctaccactggtttcccatttttaacccaggttatgttgacattgggctcattccaaaaggagcaagggacataagagtgatggaaattgagggagctggaaacttcctggccatcaggagtgaagatcctgaaaaatattacctgaatggagggtttattatccagtggaacgggaactataagctggcagggactgtctttcagtatgacaggaaaggagacctggaaaagctgatggccacaggtcccaccaatgagtctgtgtggatccagcttctattccaggtgactaaccctggcatcaagtatgagtacacaatccagaaagatggccttgacaatgatgttgagcagcagatgtacttctggcagtacggccactggacagagtgcagtgtgacctgcgggacaggtatccgccgccaaactgcccattgcataaagaagggccgcgggatggtgaaagctacattctgtgacccagaaacacagcccaatgggagacagaagaagtgccatgaaaaggcttgtccacccaggtggtgggcaggggagtgggaagcatgctcggcgacatgcgggccccacggggagaagaagcgaaccgtgctgtgcatccagaccatggtctctgacgagcaggctctcccgcccacagactgccagcacctgctgaagcccaagaccctcctttcctgcaacagagacatcctgtgcccctcggactggacagtgggcaactggagtgagtgttctgtttcctgtggtggtggagtgcggattcgcagtgtcacatgtgccaagaaccatgatgaaccttgcgatgtgacaaggaaacccaacagccgagctctgtgtggcctccagcaatgcccttctagccggagagttctgaaaccaaacaaaggcactatttccaatggaaaaaacccaccaacactaaagcccgtccctccacctacatccaggcccagaatgctgaccacacccacagggcctgagtctatgagcacaagcactccagcaatcagcagccctagtcctaccacagcctccaaagaaggagacctgggtgggaaacagtggcaagatagctcaacccaacctgagctgagctctcgctatctcatttccactggaagcacttcccagcccatcctcacttcccaatccttgagcattcagccaagtgaggaaaatgtttccagttcagatactggtcctacctcggagggaggccttgtagctacaacaacaagtggttctggcttgtcatcttcccgcaaccctatcacttggcctgtgactccattttacaataccttgaccaaaggtccagaaatggagattcacagtggctcaggggaagaaagagaacagcctgaggacaaagatgaaagcaatcctgtaatatggaccaagatcagagtacctggaaatgacgctccagtggaaagtacagaaatgccacttgcacctccactaacaccagatctcagcagggagtcctggtggccacccttcagcacagtaatggaaggactgctccccagccaaaggcccactacttccgaaactgggacacccagagttgaggggatggttactgaaaagccagccaacactctgctccctctgggaggagaccaccagccagaaccctcaggaaagacggcaaaccgtaaccacctgaaacttccaaacaacatgaaccaaacaaaaagttctgaaccagtcctgactgaggaggatgcaacaagtctgattactgagggctttttgctaaatgcctccaattacaagcagctcacaaacggccacggctctgcacactggatcgtcggaaactggagcgagtgctccaccacatgtggcctgggggcctactggagaagggtggagtgcagcacccagatggattctgactgtgcggccatccagagacctgaccctgcaaaaagatgccacctccgtccctgtgctggctggaaagtgggaaactggagcaagtgctccagaaactgcagtgggggcttcaagatacgcgagattcagtgcgtggacagccgggaccaccggaacctgaggccatttcactgccagttcctggccggcattcctcccccattgagcatgagctgtaacccggagccctgtgaggcgtggcaggtggagccttggagccagtgctccaggtcctgtggaggtggagttcaggagagaggagtgttctgtccaggaggcctctgtgattggacaaaaagacccacatccaccatgtcttgcaatgagcacctgtgctgtcactgggccactgggaactgggacctgtgttccacttcctgtggaggtggctttcagaagaggactgtccaatgtgtgccctcagagggcaataaaactgaagaccaagaccaatgtctatgtgatcacaaacccagacctccagaattcaaaaaatgcaaccagcaggcctgcaagaaaagtgccgatttactttgcactaaggacaaactgtcagccagtttctgccagacactgaaagccatgaagaaatgttctgtgcccaccgtgagggctgagtgctgcttctcgtgtccccagacacacatcacacacacccaaaggcaaagaaggcaacggttgctccaaaagtcaaaagaactctaagcccaaa

SEQ ID NO: 994 - DNA, 8774 bp, Homo sapiens
  source 1..8774: mol_type = unassigned DNA
gagcgggcgggctgcgaggccgcggggcatgcgggaggcggaggggtggggaccggggtgggctgcgccctcccgctctggcccattccacaccccgccgaaagcggacactgtcagctgaatcactccccttttaggaggagggaggggaaaaaggtgtctagctcctttctgcttaaaaaagcacagggagatcgcgggcagctttgcagtcgctgccttctcgcgcctgaccatgcacccctgcatcttcctgctgggccacaggcgagcgctttatttctggagctgagggctaaaacttttttgacttttcttctcctcaacatctgaatcatgccatgtgcccagaggagctggcttgcaaacctttccgtggtggctcagctccttaactttggggcgctttgctatgggagacagcctcagccaggcccggttcgcttcccggacaggaggcaagagcattttatcaagggcctgccagaataccacgtggtgggtccagtccgagtagatgccagtgggcattttttgtcatatggcttgcactatcccatcacgagcagcaggaggaagagagatttggatggctcagaggactgggtgtactacagaatttctcacgaggagaaggacctgttttttaacttgacggtcaatcaaggatttctttccaatagctacatcatggagaagagatatgggaacctctcccatgttaagatgatggcttcctctgcccccctctgccatctcagtggcacggttctacagcagggcaccagagttgggacggcagccctcagtgcctgccatggactgactggatttttccaactaccacatggagactttttcattgaacccgtgaagaagcatccactggttgagggagggtaccacccgcacatcgtttacaggaggcagaaagttccagaaaccaaggagccaacctgtggattaaaggacagtgttaacatctcccagaagcaagagctatggcgggagaagtgggagaggcacaacttgccaagcagaagcctctctcggcgttccatcagcaaggagagatgggtggagacactggtggtggccgacacaaagatgattgaataccatgggagtgagaatgtggagtcctacatcctcaccatcatgaacatggtcactgggttgttccataacccaagcattggcaatgcaattcacattgttgtggttcggctcattctactcgaagaagaagagcaaggactgaaaatagttcaccatgcagaaaagacactgtctagcttctgcaagtggcagaagagtatcaatcccaagagtgacctcaatcctgttcatcacgacgtggctgtccttctcaccagaaaggacatctgtgctggtttcaatcgcccctgcgagaccctgggcctgtctcacctttcaggaatgtgtcagcctcaccgcagttgtaacatcaatgaagattcgggactccctctggctttcacaattgcccatgagctaggacacagcttcggcatccagcatgatgggaaagaaaatgactgtgagcctgtgggcagacatccgtacatcatgtcccgccagctccagtacgatcccactccgctgacatggtccaagtgcagcgaggagtacatcacccgcttcttggaccgaggctgggggttctgtcttgatgacatacctaaaaagaaaggcttgaagtccaaggtcattgcccccggagtgatctatgatgttcaccaccagtgccagctacaatatggacccaatgctaccttctgccaggaagtagaaaacgtctgccagacactgtggtgctccgtgaagggcttttgtcgctctaagctggacgctgctgcagatggaactcaatgtggtgagaagaagtggtgtatggcaggcaagtgcatcacagtggggaagaaaccagagagcattcctggaggctggggccgctggtcaccctggtcccactgttccaggacctgtggggctggagtccagagcgcagagaggctctgcaacaaccccgagccaaagtttggagggaaatattgcactggagaaagaaaacgctatcgcttgtgcaacgtccacccctgtcgctcagaggcaccaacatttcggcagatgcagtgcagtgaatttgacactgttccctacaagaatgaactctaccactggtttcccatttttaacccagcacatccttgtgagctctactgccgacccatagatggccagttttctgagaaaatgctggatgctgtcattgatggtaccccttgctttgaaggcggcaacagcagaaatgtctgtattaatggcatatgtaagatggttggctgtgactatgagatcgattccaatgccaccgaggatcgctgcggtgtgtgcctgggagatggctcttcctgccagactgtgagaaagatgtttaagcagaaggaaggatctggttatgttgacattgggctcattccaaaaggagcaagggacataagagtgatggaaattgagggagctggaaacttcctggccatcaggagtgaagatcctgaaaaatattacctgaatggagggtttattatccagtggaacgggaactataagctggcagggactgtctttcagtatgacaggaaaggagacctggaaaagctgatggccacaggtcccaccaatgagtctgtgtggatccagcttctattccaggtgactaaccctggcatcaagtatgagtacacaatccagaaagatggccttgacaatgatgttgagcagcagatgtacttctggcagtacggccactggacagagtgcagtgtgacctgcgggacaggtatccgccgccaaactgcccattgcataaagaagggccgcgggatggtgaaagctacattctgtgacccagaaacacagcccaatgggagacagaagaagtgccatgaaaaggcttgtccacccaggtggtgggcaggggagtgggaagcatgctcggcgacatgcgggccccacggggagaagaagcgaaccgtgctgtgcatccagaccatggtctctgacgagcaggctctcccgcccacagactgccagcacctgctgaagcccaagaccctcctttcctgcaacagagacatcctgtgcccctcggactggacagtgggcaactggagtgagtgttctgtttcctgtggtggtggagtgcggattcgcagtgtcacatgtgccaagaaccatgatgaaccttgcgatgtgacaaggaaacccaacagccgagctctgtgtggcctccagcaatgcccttctagccggagagttctgaaaccaaacaaaggcactatttccaatggaaaaaacccaccaacactaaagcccgtccctccacctacatccaggcccagaatgctgaccacacccacagggcctgagtctatgagcacaagcactccagcaatcagcagccctagtcctaccacagcctccaaagaaggagacctgggtgggaaacagtggcaagatagctcaacccaacctgagctgagctctcgctatctcatttccactggaagcacttcccagcccatcctcacttcccaatccttgagcattcagccaagtgaggaaaatgtttccagttcagatactggtcctacctcggagggaggccttgtagctacaacaacaagtggttctggcttgtcatcttcccgcaaccctatcacttggcctgtgactccattttacaataccttgaccaaaggtccagaaatggagattcacagtggctcaggggaagaaagagaacagcctgaggacaaagatgaaagcaatcctgtaatatggaccaagatcagagtacctggaaatgacgctccagtggaaagtacagaaatgccacttgcacctccactaacaccagatctcagcagggagtcctggtggccacccttcagcacagtaatggaaggactgctccccagccaaaggcccactacttccgaaactgggacacccagagttgaggggatggttactgaaaagccagccaacactctgctccctctgggaggagaccaccagccagaaccctcaggaaagacggcaaaccgtaaccacctgaaacttccaaacaacatgaaccaaacaaaaagttctgaaccagtcctgactgaggaggatgcaacaagtctgattactgagggctttttgctaaatgcctccaattacaagcagctcacaaacggccacggctctgcacactggatcgtcggaaactggagcgagtgctccaccacatgtggcctgggggcctactggagaagggtggagtgcagcacccagatggattctgactgtgcggccatccagagacctgaccctgcaaaaagatgccacctccgtccctgtgctggctggaaagtgggaaactggagcaagtgctccagaaactgcagtgggggcttcaagatacgcgagattcagtgcgtggacagccgggaccaccggaacctgaggccatttcactgccagttcctggccggcattcctcccccattgagcatgagctgtaacccggagccctgtgaggcgtggcaggtggagccttggagccagtgctccaggtcctgtggaggtggagttcaggagagaggagtgttctgtccaggaggcctctgtgattggacaaaaagacccacatccaccatgtcttgcaatgagcacctgtgctgtcactgggccactgggaactgggacctgtgttccacttcctgtggaggtggctttcagaagaggactgtccaatgtgtgccctcagagggcaataaaactgaagaccaagaccaatgtctatgtgatcacaaacccagacctccagaattcaaaaaatgcaaccagcaggcctgcaagaaaagtgccgatttactttgcactaaggacaaactgtcagccagtttctgccagacactgaaagccatgaagaaatgttctgtgcccaccgtgagggctgagtgctgcttctcgtgtccccagacacacatcacacacacccaaaggcaaagaaggcaacggttgctccaaaagtcaaaagaactctaagcccaaaaggaagccagcttccaccagactgcagcagcctgctgaccatgacatgctttagccctgggagctgcttcgttgaggttttgcttcatatatttcagattcagctttgggtcatgatgaaacaaaatccattgtgttcctctagccaccgaatgtccctcacaggaggcctaggctgccgtacttgctgctccctgataggaaggtgaaatagctaggagaatcaggcagcacctggtatcggctcctgggaaaggtgccaggttagacagatttgtgaaatactgtatttttgttctcccttaaagataaaaacaaagagaccagctatttccctgactacctcaagagtatcaggcaacacttacccaggggacaaataatcttcttaatttatcttgatgaatacctttcttttttttttcttgcctccctgcctggggcagctgctatttaaaatgtcacagcggagctttaggaacattcctttaattcatccaggcagaggactgctttcttcaccccatgttcaactagggcaggaagtgctggttacatccctcagtctcttcctccatccctgtagggctccatatctgggctgcttagagtctcctgccaaccttgggacactagactaagaggaaacaggcataagaaacacagcctaaggggtttaggtcacttacacagaaaacacttctggtttgaagagcatttctatgaaaactcgtaaaatgcaaatgagcagaaatcaatttcttaatattacagaaaaggaactgtgggcctttattcttcccactttcctggcaaatacacactcctttgcagaagggaaaatgtgtcttcctggctgacttcctcccatcctccagtccccacaggaggcctgagctcaggtcccaccatcgtcttgctgcaggggctgtatatgcaaagaccactatgaccagctctagggctgccacctgtcctcacctcttctcaggttggaaaatggaggttccatattaaaatatttcaaagaaccaggtaaattgtactaagtacaagaacatagtgcaaacttctaatctagagaaaaaacatttctaaaaagtaaggtaaaggggatctactcctcagtgtacccaatatgtagttagtcttaaagatcttttactttggggagaacaggtgaatcagggagtccaaagaaactgaaatgaaagttagaatgcttgttctggatgttcctacctcccaccagaagtcaaagtaggcttggtctcaaattcagagcaaatttctagacaaagtgatttctaagggaaggtacttacatgaactgaacccagagaaagagggtaagtgggtgggtggaggggcataagcttcaaatgaaagaagatatcagaaccaattcttgacagggagaaaggcaaggatgtggccttcatgtgatgggcagcatattttctgactcatgcacagatacacttaatactcctcatggaacacaatatcccacgtctccctttacctatccgttcagcagaatggtgctattaaaaaaatggtgctaatatctagatggtggcagaattaatgtaaacatagataggcatacaaatgggtaagtgtatgtgaaactctccatatacatcttctgttaaacatgtaacggtgttgctgaccaatgccagttttattgcttgggtaccttgaatttaagatttaatattatgtgctttttatttttttccaagccattaacgtgtattactctcatgaattcctgtgaaaaataaaacagtgggattgggatgaaattcaagatagaccagaaacaggaggaaagtacaaatgtttacctaaagccagagaatttatttctagatgataattacattattgtattctctgcctttaaacataaacattgctggccgatagcaatctctggtgaataatggttttcgaggagaggagacacttaaattgttagtgacatgagtggaggagaatctgatatttactaatgaggcagtttgcaaagactgtccctgaagtgtagtgtagtctttcagggggattcatttagtaagctagattgatttaacctggtactgtactagcatagggtcaaatacgtgtcatcagagacctgggtatgaccaggcttacaaaactcaggaacaaactcagattcctactgacctcaaccaactaaactaggccaaatttctccgtgtacaaaatggaccacgttatttacaatccacgtggtggagaagatggtagacatgtggagagagtttggccaggtgctccattctaggtctttttccagtttctcaaaggcagaacattggctcctaattatttgccatggatatttgcttcctgttctggagctatgttgtaagacagctgtgtgatgtccatcattcttgactccagaatgaagacagggcttgctgttttctgtcctgttggtatcatctgttgccttggcgatcactcagtgatgagtcgtcagtattttgacatgtcccagtgcttgctgtacaagaggggactcagatcaacaggaagactctgaagacaggaacctgcatggtatcttacatctttgatacttgggtgctgatatgaagcagagttgttgatttactttatctaggcccttctttcttctcacctggatcaagcaactgagaagtgtatcaggagacactggatacatatctctatgaaatagagagggccatcgcagggcctggtacttaactacattaacgttctaaaacccagtttggtttacgttgtctttcacagtagtatatttagctcttctctggaaagttgtgggttaatataattcttaaacatgaaaatgtaattaaacacaccacgagagaacaatattccaggagacttaatagtgattactttcttcaatcaggaaatcgtttcagtgcctcctttgtaggaatgctttgttttgtgatgggttttcttaaagaagagcacacctccgtccaatctcctgagacagccacgtctccgctgacatcccactgtgatgctttcagatagtcagtgaatgtttctgataaccttcatccagtatctgaaacacaatgtgagagattatattgttttagataataacatcccatttagttgactaaaatcttccaaactctgaaagctgcacactgctactccagagagtgcaggtcttagctcttctcctttctgacttcaagatgaatctttgggacgatgtttctggtgcttggtccacagtgattcacttttgaaggagaggccacatgacatgaactgcctggtgttacaacctagctaacatatttgatgctactcctgttgtctgtactgcttattcaagtagtattctaagttatgttactaaaaaacatggtgggtaaagcacaatcctacccatcattgtcctccaaaataattgtatgacatacacggcccagcccattgccctccctgcatctctgtgctgctttgccatttccccttctacccagcctcctcaaggggtaccttggtggatatttcagtacttaaaaccagactgtaatcataacctccctctgtgtggcatcaataaatagccaaactca

SEQ ID NO: 995 - DNA, 1003 bp, Homo sapiens
  source 1..1003: mol_type = unassigned DNA
gcttaaaaaagcacagggagatcgcgggcagctttgcagtcgctgccttctcgcgcctgaccatgcacccctgcatcttcctgctgggccacaggcgagcgctttatttctggagctgagggctaaaacttttttgacttttcttctcctcaacatctgaatcatgccatgtgcccagaggagctggcttgcaaacctttccgtggtggctcagctccttaactttggggcgctttgctatgggagacagcctcagccaggcccggttcgcttcccggacaggaggcaagagcattttatcaagggcctgccagaataccacgtggtgggtccagtccgagtagatgccagtgggcattttttgtcatatggcttgcactatcccatcacgagcagcaggaggaagagagatttggatggctcagaggactgggtgtactacagaatttctcacgaggagaaggacctgttttttaacttgacggtcaatcaaggatttctttccaatagctacatcatggagaagagatatgggaacctctcccatgttaagatgatggcttcctctgcccccctctgccatctcagtggcacggttctacagcagggcaccagagttgggacggcagccctcagtgcctgccatggactgactggatttttccaactaccacatggagactttttcattgaacccgtgaagaagcatccactggttgagggagggtaccacccgcacatcgtttacaggaggcagaaagttccagaaaccaaggagccaacctgtggattaaagggtattgtgactcacatgtcctcctgggttgaagaatctgttttgttcttttggttgttttattaaaacatgacctattcttactcaagtctcttatctcctctgtattcttttttttttaatatcttcatgacattcaaatctcttctgtattctcttgccagaaagtgtacattctttttgcttgtataaaccctttcacttgtc

SEQ ID NO: 996 - DNA, 4979 bp, Homo sapiens
  source 1..4979: mol_type = unassigned DNA
agtaataaccccggcgcggcggcggagtcgctgtggggaatcctcccgcgctctgcctgggtcgggtcctccctgcccgctcgcacgctgccggccggggaccctccggtggcccctagcccctcggagcgctcctggatgaagccccgcgcgcgcggatggcggggcttggcggcgctgtggatgctgttggcgcaggtggccgagcaggcacctgcgtgcgccatgggacccgcagcggcagcgcctgggagcccgagcgtcccgcgtcctcctccacccgcggagcggccgggctggatggaaaagggcgaatatgacctggtctctgcctacgaggttgaccacaggggcgattacgtgtcccatgaaatcatgcaccatcagcggcggagaagagcagtgcccgtgtccgaggttgagtctcttcaccttcggctgaaaggctccaggcacgacttccacatggatctgaggacttccagcagcctagtggctcctggctttattgtgcagacgttgggaaagacaggcactaagtctgtgcagactttaccgccagaggacttctgtttctatcaaggctctttgcgatcacacagaaactcctcagtggccctttcaacctgccaaggcttgtcaggcatgatacgaacagaagaggcagattacttcctaaggccacttccttcacacctctcatggaaactcggcagagctgcccaaggcagctcgccatcccacgtactgtacaagagatccacagagccccatgctcctggggccagtgaggtcctggtgacctcaaggacatgggagctggcacatcaacccctgcacagcagcgaccttcgcctgggactgccacaaaagcagcatttctgtggaagacgcaagaaatacatgccccagcctcccaaggaagacctcttcatcttgccagatgagtataagtcttgcttacggcataagcgctctcttctgaggtcccatagaaatgaagaactgaacgtggagaccttggtggtggtcgacaaaaagatgatgcaaaaccatggccatgaaaatatcaccacctacgtgctcacgatactcaacatggtatctgctttattcaaagatggaacaataggaggaaacatcaacattgcaattgtaggtctgattcttctagaagatgaacagccaggactggtgataagtcaccacgcagaccacaccttaagtagcttctgccagtggcagtctggattgatggggaaagatgggactcgtcatgaccacgccatcttactgactggtctggatatatgttcctggaagaatgagccctgtgacactttgggatttgcacccataagtggaatgtgtagtaaatatcgcagctgcacgattaatgaagatacaggtcttggactggccttcaccattgcccatgagtctggacacaactttggcatgattcatgatggagaagggaacatgtgcaaaaagtccgagggcaacatcatgtcccctacattggcaggacgcaatggagtcttctcctggtcaccctgcagccgccagtatctacacaaatttctaagcaccgctcaagctatctgccttgctgatcagccaaagcctgtgaaggaatacaagtatcctgagaaattgccaggagaattatatgatgcaaacacacagtgcaagtggcagttcggagagaaagccaagctctgcatgctggactttaaaaaggacatctgtaaagccctgtggtgccatcgtattggaaggaaatgtgagactaaatttatgccagcagcagaaggcacaatttgtgggcatgacatgtggtgccggggaggacagtgtgtgaaatatggtgatgaaggccccaagcccacccatggccactggtcggactggtcttcttggtccccatgctccaggacctgcggagggggagtatctcataggagtcgcctctgcaccaaccccaagccatcgcatggagggaagttctgtgagggctccactcgcactctgaagctctgcaacagtcagaaatgtccccgggacagtgttgacttccgtgctgctcagtgtgccgagcacaacagcagacgattcagagggcggcactacaagtggaagccttacactcaagtagaagatcaggacttatgcaaactctactgtatcgcagaaggatttgatttcttcttttctttgtcaaataaagtcaaagatgggactccatgctcggaggatagccgtaatgtttgtatagatgggatatgtgagagagttggatgtgacaatgtccttggatctgatgctgttgaagacgtctgtggggtgtgtaacgggaataactcagcctgcacgattcacaggggtctctacaccaagcaccaccacaccaaccagtattatcacatggtcaccattccttctggagcccggagtatccgcatctatgaaatgaacgtctctacctcctacatttctgtgcgcaatgccctcagaaggtactacctgaatgggcactggaccgtggactggcccggccggtacaaattttcgggcactactttcgactacagacggtcctataatgagcccgagaacttaatcgctactggaccaaccaacgagacactgattgtggagctgctgtttcagggaaggaacccgggtgttgcctgggaatactccatgcctcgcttggggaccgagaagcagccccctgcccagcccagctacacttgggccatcgtgcgctctgagtgctccgtgtcctgcggagggggacagatgaccgtgagagagggctgctacagagacctgaagtttcaagtaaatatgtccttctgcaatcccaagacacgacctgtcacggggctggtgccttgcaaagtatctgcctgtcctcccagctggtccgtggggaactggagtgcctgcagtcggacgtgtggcgggggtgcccagagccgccccgtgcagtgcacacggcgggtgcactatgactcggagccagtcccggccagcctgtgccctcagcctgctccctccagcaggcaggcctgcaactctcagagctgcccacctgcatggagcgccgggccctgggcagagtgctcacacacctgtgggaaggggtggaggaagcgggcagtggcctgtaagagcaccaacccctcggccagagcgcagctgctgcccgacgctgtctgcacctccgagcccaagcccaggatgcatgaagcctgtctgcttcagcgctgccacaagcccaagaagctgcagtggctggtgtccgcctggtcccagtgctctgtgacatgtgaaagaggaacacagaaaagattcttaaaatgtgctgaaaagtatgtttctggaaagtatcgagagctggcctcaaagaagtgctcacatttgccgaagcccagcctggagctggaacgtgcctgcgccccgcttccatgccccaggcaccccccatttgctgctgcgggaccctcgaggggcagctggtttgcctcaccctggtctcagtgcacggccagctgtgggggaggcgttcagacgaggtccgtgcagtgcctggctgggggccggccggcctcaggctgcctcctgcaccagaagccttcggcctccctggcctgcaacactcacttctgccccattgcagagaagaaagatgccttctgcaaagactacttccactggtgctacctggtaccccagcacgggatgtgcagccacaagttctacggcaagcagtgctgcaagacttgctctaagtccaacttgtgagttgggaccgctctccgtagcagagaaagtgcctgcgtggcacagaaatttcccacaaatgagctgtgcaatctacgtcggaatacatccaaggaagagcaaagccaaaagaagaaaaccgtgttaggctctttgaccaggagtgtatgtatgtgtttcactgtgagcctgggtgcagacctgtgtccccatgcacacagtgtctcctgtcaggctgaaatgtggcaccctggcagacagagctgtggctcgtgaggcagaaggcaggcaccacaacgggagaggcagcactcacccctgcctgttgcagctaaatcaagtcaaaaagacaggcgaggctgaacttgctaaatgtctggtgccttagaaaaagaaggaaaggccatgaaataaggaaaacatacaaaatatgtaccccctagttcaccagcctcccctcccactaggagggcccctcgagccatcaggagtgaccaacttcctgggtggaggtcaggggagctccaggaggctgcccaggctcctcctcctcctccccagcggccgagcatctcttaccaggaacctggagccaccgccggagccagcgtcatctctagggtcactggccaggggactgcattctggtttgggactttgcctatggaaatgggaaaaatgaaattcctgctaaggtgcttctatctctttcagattcatgcattgaaggagagattttttatactttatgttttatctttctcagttatttgcaagtgagtgtccttttaaaaacacacttcttcatgcttttctttgtaaatgacagatcgaagtataggttacatcaaaaccctaccatcctgagaagagttatggttctattatagcagacgtcagccacacagcctatgtgacaataaccttagagtcctgtgttttgtttttgtgtgttgtgagattttaatcttttttttttcggtgagtctggccatttctataatgccaggtgggaagccaggctgcgggtgttagggtgggaatctgcccggcgtctctggcaccctccctgccatcctcagtgcggctgctgttctcctgtccggtgctgtggctccattccaaaggggcacctggatatttatatttgctgaagttttataataaagtttatatggtacagtgtg

SEQ ID NO: 997 - DNA, 3286 bp, Homo sapiens
  source 1..3286: mol_type = unassigned DNA
agtaataaccccggcgcggcggcggagtcgctgtggggaatcctcccgcgctctgcctgggtcgggtcctccctgcccgctcgcacgctgccggccggggaccctccggtggcccctagcccctcggagcgctcctggatgaagccccgcgcgcgcggatggcggggcttggcggcgctgtggatgctgttggcgcaggtggccgagcaggcacctgcgtgcgccatgggacccgcagcggcagcgcctgggagcccgagcgtcccgcgtcctcctccacccgcggagcggccgggctggatggaaaagggcgaatatgacctggtctctgcctacgaggttgaccacaggggcgattacgtgtcccatgaaatcatgcaccatcagcggcggagaagagcagtgcccgtgtccgaggttgagtctcttcaccttcggctgaaaggctccaggcacgacttccacatggatctgaggacttccagcagcctagtggctcctggctttattgtgcagacgttgggaaagacaggcactaagtctgtgcagactttaccgccagaggacttctgtttctatcaaggctctttgcgatcacacagaaactcctcagtggccctttcaacctgccaaggcttgtcaggcatgatacgaacagaagaggcagattacttcctaaggccacttccttcacacctctcatggaaactcggcagagctgcccaaggcagctcgccatcccacgtactgtacaagagatccacagagccccatgctcctggggccagtgaggtcctggtgacctcaaggacatgggagctggcacatcaacccctgcacagcagcgaccttcgcctgggactgccacaaaagcagcatttctgtggaagacgcaagaaatacatgccccagcctcccaaggaagacctcttcatcttgccagatgagtataagtcttgcttacggcataagcgctctcttctgaggtcccatagaaatgaagaactgaacgtggagaccttggtggtggtcgacaaaaagatgatgcaaaaccatggccatgaaaatatcaccacctacgtgctcacgatactcaacatggtatctgctttattcaaagatggaacaataggaggaaacatcaacattgcaattgtaggtctgattcttctagaagatgaacagccaggactggtgataagtcaccacgcagaccacaccttaagtagcttctgccagtggcagtctggattgatggggaaagatgggactcgtcatgaccacgccatcttactgactggtctggatatatgttcctggaagaatgagccctgtgacactttgggatttgcacccataagtggaatgtgtagtaaatatcgcagctgcacgattaatgaagatacaggtcttggactggccttcaccattgcccatgagtctggacacaactttggcatgattcatgatggagaagggaacatgtgcaaaaagtccgagggcaacatcatgtcccctacattggcaggacgcaatggagtcttctcctggtcaccctgcagccgccagtatctacacaaatttctaagcaccgctcaagctatctgccttgctgatcagccaaagcctgtgaaggaatacaagtatcctgagaaattgccaggagaattatatgatgcaaacacacagtgcaagtggcagttcggagagaaagccaagctctgcatgctggactttaaaaaggacatctgtaaagccctgtggtgccatcgtattggaaggaaatgtgagactaaatttatgccagcagcagaaggcacaatttgtgggcatgacatgtggtgccggggaggacagtgtgtgaaatatggtgatgaaggccccaagcccacccatggccactggtcggactggtcttcttggtccccatgctccaggacctgcggagggggagtatctcataggagtcgcctctgcaccaaccccaagccatcgcatggagggaagttctgtgagggctccactcgcactctgaagctctgcaacagtcagaaatgtccccgggacagtgttgacttccgtgctgctcagtgtgccgagcacaacagcagacgattcagagggcggcactacaagtggaagccttacactcaagtagaagatcaggacttatgcaaactctactgtatcgcagaaggatttgatttcttcttttctttgtcaaataaagtcaaagatgggactccatgctcggaggatagccgtaatgtttgtatagatgggatatgtgagagagttggatgtgacaatgtccttggatctgatgctgttgaagacgtctgtggggtgtgtaacgggaataactcagcctgcacgattcacaggggtctctacaccaagcaccaccacaccaaccagtattatcacatggtcaccattccttctggagcccggagtatccgcatctatgaaatgaacgtctctacctcctacatttctgtgcgcaatgccctcagaaggtactacctgaatgggcactggaccgtggactggcccggccggtacaaattttcgggcactactttcgactacagacggtcctataatgagcccgagaacttaatcgctactggaccaaccaacgagacactgattgtggagctgctgtttcagggaaggaacccgggtgttgcctgggaatactccatgcctcgcttggggaccgagaagcagccccctgcccagcccagctacacttgggccatcgtgcgctctgagtgctccgtgtcctgcggagggggacagatgaccgtgagagagggctgctacagagattttttatactttatgttttatctttctcagttatttgcaagtgagtgtccttttaaaaacacacttcttcatgcttttctttgtaaatgacagatcgaagtataggttacatcaaaaccctaccatcctgagaagagttatggttctattatagcagacgtcagccacacagcctatgtgacaataaccttagagtcctgtgttttgtttttgtgtgttgtgagattttaatcttttttttttcggtgagtctggccatttctataatgccaggtgggaagccaggctgcgggtgttagggtgggaatctgcccggcgtctctggcaccctccctgccatcctcagtgcggctgctgttctcctgtccggtgctgtggctccattccaaaggggcacctggatatttatatttgctgaagttttataataaagtttatatggtacagtgtg

SEQ ID NO: 998 - DNA, 6207 bp, Homo sapiens
  source 1..6207: mol_type = unassigned DNA
aattactttttccaaaggctggagggcttcactccggctggcgccgccgcctagcgcgctcctgcttcgccgccacggtccgggggggctgccggtcccgggtaccatgtgtgacggcgccctgctgcctccgctcgtcctgcccgtgctgctgctgctggtttggggactggacccgggcacagctgtcggcgacgcggcggccgacgtggaggtggtgctcccgtggcgggtgcgccccgacgacgtgcacctgccgccgctgcccgcagcccccgggccccgacggcggcgacgcccccgcacgcccccagccgccccgcgcgcccggcccggagagcgcgccctgctgctgcacctgccggccttcgggcgcgacctgtaccttcagctgcgccgcgacctgcgcttcctgtcccgaggcttcgaggtggaggaggcgggcgcggcccggcgccgcggccgccccgccgagctgtgcttctactcgggccgtgtgctcggccaccccggctccctcgtctcgctcagcgcctgcggcgccgccggcggcctggttggcctcattcagcttgggcaggagcaggtgctaatccagcccctcaacaactcccagggcccattcagtggacgagaacatctgatcaggcgcaaatggtccttgacccccagcccttctgctgaggcccagagacctgagcagctctgcaaggttctaacagaaaagaagaagccgacgtggggcaggccttcgcgggactggcgggagcggaggaacgctatccggctcaccagcgagcacacggtggagaccctggtggtggccgacgccgacatggtgcagtaccacggggccgaggccgcccagaggttcatcctgaccgtcatgaacatggtatacaatatgtttcagcaccagagcctggggattaaaattaacattcaagtgaccaagcttgtcctgctacgacaacgtcccgctaagttgtccattgggcaccatggtgagcggtccctggagagcttctgtcactggcagaacgaggagtatggaggagcgcgatacctcggcaataaccaggttcccggcgggaaggacgacccgcccctggtggatgctgccgtgtttgtgaccaggacagatttctgtgtacacaaggatgaaccgtgtgacactgttggaattgcttacttaggaggtgtgtgcagtgctaagaggaagtgtgtgcttgccgaagacaatggtctcaatttggcctttaccatcgcccatgagctgggccacaacttgggcatgaaccacgacgatgaccactcatcttgcgctggcaggtcccacatcatgtcaggagagtgggtgaaaggccggaacccaagtgacctctcttggtcctcctgcagccgagatgaccttgaaaacttcctcaagtcaaaagtcagcacctgcttgctagtcacggaccccagaagccagcacacagtacgcctcccgcacaagctgccgggcatgcactacagtgccaacgagcagtgccagatcctgtttggcatgaatgccaccttctgcagaaacatggagcatctaatgtgtgctggactgtggtgcctggtagaaggagacacatcctgcaagaccaagctggaccctcccctggatggcaccgagtgtggggcagacaagtggtgccgcgcgggggagtgcgtgagcaagacgcccatcccggagcatgtggacggagactggagcccgtggggcgcctggagcatgtgcagccgaacatgtgggacgggagcccgcttcaggcagaggaaatgtgacaaccccccccctgggcctggaggcacacactgcccgggtgccagtgtagaacatgcggtctgcgagaacctgccctgccccaagggtctgcccagcttccgggaccagcagtgccaggcacacgaccggctgagccccaagaagaaaggcctgctgacagccgtggtggttgacgataagccatgtgaactctactgctcgcccctcgggaaggagtccccactgctggtggccgacagggtcctggacggtacaccctgcgggccctacgagactgatctctgcgtgcacggcaagtgccagaaaatcggctgtgacggcatcatcgggtctgcagccaaagaggacagatgcggggtctgcagcggggacggcaagacctgccacttggtgaagggcgacttcagccacgcccgggggacagctctcaaagactcgggtaaggggtccatcaacagtgactggaagatagagctccccggagagttccagattgcaggcacaactgttcgctatgtgagaagggggctgtgggagaagatctctgccaagggaccaaccaaactaccgctgcacttgatggtgttgttatttcacgaccaagattatggaattcattatgaatacactgttcctgtaaaccgcactgcggaaaatcaaagcgaaccagaaaaaccgcaggactctttgttcatctggacccacagcggctgggaagggtgcagtgtgcagtgcggcggaggggagcgcagaaccatcgtctcgtgtacacggattgtcaacaagaccacaactctggtgaacgacagtgactgccctcaagcaagccgcccagagccccaggtccgaaggtgcaacttgcacccctgccagtcacggtgggtggcaggcccgtggagcccctgctcggcgacctgtgagaaaggcttccagcaccgggaggtgacctgcgtgtaccagctgcagaacggcacacacgtcgctacgcggcccctctactgcccgggcccccggccggcggcagtgcagagctgtgaaggccaggactgcctgtccatctgggaggcgtctgagtggtcacagtgctctgccagctgtggtaaaggggtgtggaaacggaccgtggcgtgcaccaactcacaagggaaatgcgacgcatccacgaggccgagagccgaggaggcctgcgaggactactcaggctgctacgagtggaaaactggggactggtctacgtgctcgtcgacctgcgggaagggcctgcagtcccgggtggtgcagtgcatgcacaaggtcacagggcgccacggcagcgagtgccccgccctctcgaagcctgccccctacagacagtgctaccaggaggtctgcaacgacaggatcaacgccaacaccatcacctccccccgccttgctgctctgacctacaaatgcacacgagaccagtggacggtatattgccgggtcatccgagaaaagaacctctgccaggacatgcggtggtaccagcgctgctgccagacctgcagggacttctatgcaaacaagatgcgccagccaccgccgaactcgtgacacgcagtcccaagggtcgctcaaagctcagactcaggtctgaaacccacccacccgcaagcctaccagccttgtggccacgcccccacccggctgccacaagaatccaactacatagaacatgagcgtggacttggcgtttgccattagtgcttccgtacttaatatattgttaacagccactggctggctttctacagtgaggagaaagtaggcatgagtcacaaagtaacttcaatttctaggatttcaggtacctcgaagggaagcacctctggcagacaaccgtcaagagagagacatcatttagtgttcttgtcttgactcgcttttgacatttgaatttccagtgcttggtatatcatggaggaaacatccccaaaacgagacatgctagaaaaggctttattctgaaagccggcgacaccatggagggaggggcaggtgttggtgagcctctgcccgtggcttctctggggagggccgggctgcttagcacacgtttctctccatctaccttcttgaccacatgagaaccaggacgttgcctccatgcccgtctctgagaacatagtctctaaatcctaggtgttgccttggaagtctcgtgcgtggagtgtaaatctatatatgccagcgaggacagcagtgccacgcagttcataccacccgcatgggaagaatgttccaagagagtctgggtttggggaagcatctaattttcagagctctgctgtccaccgtgtagggaaacagaagggcctctcttcaaggtgctgtgacataagaaacggtaattgcggtgatggggttgcttcctaaggcaaaggtaagcttgggccagcttcactggggcggatgggcacctgccccgccttccgggaacatccactctggcctgcacttcctaaagctttgtaccttagagatgctgtaccacatcccagtggctttctaccgaccgtggccatttatctgaaggtaagacgacatttgggacctctgaggacacaagcccaggcctaggatctgtagagcaaggcctgactgctctatcctggcacggagcagcctgatgtgccaggaccaggggaggaacgccatctggctggcactgctgcacacccgccgagccttcctgtagccccagactttgtggtacccattatcatcacgcctgtcatcattgacccatcttcttggtggggcaaggatgatgcatgatgaaggaaggtccttcccccctgcagcccccttacgcctggcagcagacaagcagagtggcctctttgagagcacagaggatggtagcaccctacctgcaaggaggccgggcagggaccctagatgccaggaggcctgttttgctcaccaacttggtgggcatttcatgggtgcttatgttctaggactttaccgtaaataacacctcctccctgatttcagacggaaggtctcacttggacttccatgggatcatctccctgtgcttcttgatttattggtgctgtgtttctgtgttttgttttgttacatgtcacaaccgtagagttagcttaaatcagaaagaagcctctctgccttctccaccctgtcttacgagctgtgtttttgtttttactaccctagaggcagagaagcggtagggatgtcagggaatttactcacttccacttgaatcaacgagaagtgttgagaaacttccgtgggtgctctgtggaaagaaccgagggtgtcaggatggagcggcccaccctcgccccgcggcctgcgcagactgctgtcctccccttcaggcctggccaccagcagactcccatgaattcccattttcacaaagccctcaaaattttgggggcgctgaggttcaattttcttcatccccaaatgaactgttaattcactgaaagacatttagacttttgcagccaaggagcagagccgggcaagctcactaaggaagccttagcttggtctcctgcatgggccccggggcctccagatatgcccactgtcaccctggcaagggccccacaccctcagaatgaaaaggattgattgggttattgtcagatacccccattagttcccctaaagtctgcatctgcagagctcttttagctcatctttttgttgtcggtgttgttttttgagacagagtctccctctgttgcccaggctggagtgcagtggcgcgatctcagctcattgaaagctccgcctcccgggttcaggccattcttctgcctcaccctccccagtagctgggactacaggcgcccaccaccacgcccacctacttttttgtatttttactagagacggggtttcaccatgttagccaggatggtctcgatctcctgacctcatgatccacccgcctcagccttccaaagtgctgggattacaggagtgagccaccgcgcccggccttttagcttatcttgaaatccaccagcctaccttctgttcatggcacgagcagtgatttcagtgaaaccatcataaacattcttgttccactagatgctgatcacagcagtgatgtttctgtgttaataccctgtactgtccctcgagtactgtacctttgtgcttgcacacgtgtcactaacgcacgtgttaccagagtctcacgaccctacggtgctatttttattggtgcaaaattaaaccctctcagctgaccgttgctggataggatcagaatgcaggaaaagagcctctatggcaatacgattgtccttttttcgtttcagagtcaaatgtatctattttccattcgttaacttgcattacatactgtacccatg

SEQ ID NO: 999 - DNA, 5913 bp, Homo sapiens
  source 1..5913: mol_type = unassigned DNA
aatcaccgcgcggtggagaggcgggcgctcggctccggcgcgctgggggagccagctggcgctgtcttccccatcgcctcagacgctcacaccgacacagacagacgcacagacgggcgggcagacaccgacagtctcccaaccgtttgcgctccagtcccggcccagggagccccccgtaccctctggggtgccgcaaactgcagctcggcaggcccgcgccgggagaagggagggcgcgcaggcggccggaggaggggaggtcccagcgcgcccccgctgcgatgtgaacggcggcggctctcacctggagccgcacctggggcgccgagctccggggccgcggaaagaatgcgcgccgcccgtgcgctccgcctgccgcgtctggccacccgcagccgccgcgtccgcacctgaccatggagtgcgccctcctgctcgcgtgtgccttcccggctgcgggttcgggcccgccgaggggcctggcgggactggggcgcgtggccaaggcgctccagctgtgctgcctctgctgtgcgtcggtcgccgcggccttagccagtgacagcagcagcggcgccagcggattaaatgatgattacgtctttgtcacgccagtagaagtagactcagccgggtcatatatttcacacgacattttgcacaacggcaggaaaaagcgatcggcgcagaatgccagaagctccctgcactaccgattttcagcatttggacaggaactgcacttagaacttaagccctcggcgattttgagcagtcactttattgtccaggtacttggaaaagatggtgcttcagagactcagaaacccgaggtgcagcaatgcttctatcagggatttatcagaaatgacagctcctcctctgtcgctgtgtctacgtgtgctggcttgtcaggtttaataaggacacgaaaaaatgaattcctcatctcgccattacctcagcttctggcccaggaacacaactacagctcccctgcgggtcaccatcctcacgtactgtacaaaaggacagcagaggagaagatccagcggtaccgtggctaccccggctctggccggaattatcctggttactccccaagtcacattccccatgcatctcagagtcgagagacagagtatcaccatcgaaggttgcaaaagcagcatttttgtggacgacgcaagaaatatgctcccaagcctcccacagaggacacctatctaaggtttgatgaatatgggagctctgggcgacccagaagatcagctggaaaatcacaaaagggcctcaatgtggaaaccctcgtggtggcagacaagaaaatggtggaaaagcatggcaagggaaatgtcaccacatacattctcacagtaatgaacatggtttctggcctatttaaagatgggactattggaagtgacataaacgtggttgtggtgagcctaattcttctggaacaagaacctggaggattattgatcaaccatcatgcagaccagtctctgaatagtttttgtcaatggcagtctgccctcattggaaagaatggcaagagacatgatcatgccatcttactaacaggatttgatatttgttcttggaagaatgaaccatgtgacactctagggtttgcccccatcagtggaatgtgctctaagtaccgaagttgtaccatcaatgaggacacaggacttggccttgccttcaccatcgctcatgagtcagggcacaactttggtatgattcacgatggagaagggaatccctgcagaaaggctgaaggcaatatcatgtctcccacactgaccggaaacaatggagtgttttcatggtcttcctgcagccgccagtatctcaagaaattcctcagcacacctcaggcggggtgtctagtggatgagcccaagcaagcaggacagtataaatatccggacaaactaccaggacagatttatgatgctgacacacagtgtaaatggcaatttggagcaaaagccaagttatgcagccttggttttgtgaaggatatttgcaaatcactttggtgccaccgagtaggccacaggtgtgagaccaagtttatgcccgcagcagaagggaccgtttgtggcttgagtatgtggtgtcggcaaggccagtgcgtaaagtttggggagctcgggccccggcccatccacggccagtggtccgcctggtcgaagtggtcagaatgttcccggacatgtggtggaggagtcaagttccaggagagacactgcaataaccccaagcctcagtatggtggcttattctgtccaggttctagccgtatttatcagctgtgcaatattaacccttgcaatgaaaatagcttggattttcgggctcaacagtgtgcagaatataacagcaaacctttccgtggatggttctaccagtggaaaccctatacaaaagtggaagaggaagatcgatgcaaactgtactgcaaggctgagaactttgaatttttttttgcaatgtccggcaaagtgaaagatggaactccctgctccccaaacaaaaatgatgtttgtattgacggggtttgtgaactagtgggatgtgatcatgaactaggctctaaagcagtttcagatgcttgtggcgtttgcaaaggtgataattcaacttgcaagttttataaaggcctgtacctcaaccagcataaagcaaatgaatattatccggtggtcctcattccagctggcgcccgaagcatcgaaatccaggagctgcaggtttcctccagttacctcgcagttcgaagcctcagtcaaaagtattacctcaccgggggctggagcatcgactggcctggggagttccccttcgctgggaccacgtttgaataccagcgctctttcaaccgcccggaacgtctgtacgcgccagggcccacaaatgagacgctggtctttgaaattctgatgcaaggcaaaaatccagggatagcttggaagtatgcacttcccaaggtcatgaatggaactccaccagccacaaaaagacctgcctatacctggagtatcgtgcagtcagagtgctccgtctcctgtggtggaggttacataaatgtaaaggccatttgcttgcgagatcaaaatactcaagtcaattcctcattctgcagtgcaaaaaccaagccagtaactgagcccaaaatctgcaacgctttctcctgcccggcttactggatgccaggtgaatggagtacatgcagcaaggcctgtgctggaggccagcagagccgaaagatccagtgtgtgcaaaagaagcccttccaaaaggaggaagcagtgttgcattctctctgtccagtgagcacacccactcaggtccaagcctgcaacagccatgcctgccctccacaatggagccttggaccctggtctcagtgttccaagacctgtggacgaggggtgaggaagcgtgaactcctctgcaagggctctgccgcagaaaccctccccgagagccagtgtaccagtctccccagacctgagctgcaggagggctgtgtgcttggacgatgccccaagaacagccggctacagtgggtcgcttcttcgtggagcgagtgttctgcaacctgtggtttgggtgtgaggaagagggagatgaagtgcagcgagaagggcttccagggaaagctgataactttcccagagcgaagatgccgtaatattaagaaaccaaatctggacttggaagagacctgcaaccgacgggcttgcccagcccatccagtgtacaacatggtagctggatggtattcattgccgtggcagcagtgcacagtcacctgtgggggaggggtccagacccggtcagtccactgtgttcagcaaggccggccttcctcaagttgtctgctccatcagaaacctccggtgctacgagcctgtaatacaaacttctgtccagctcctgaaaagagagaggatccatcctgcgtagatttcttcaactggtgtcacctagttcctcagcatggtgtctgcaaccacaagttttacggaaaacaatgctgcaagtcatgcacaaggaagatctgatcttggtgtcctccccagcaccttagggccaggggcttacctttcaacctctagagagaccagctgcctttgagaccaggagctgagcaccgagaaccatctgtgagctgccgctgtgatgaaggagcctgctctgaggaacagacaggttgccagtaggcttctagctcaattccctgaagcacgtggtactctgaagcacttgaaaatgggaagcgatgacaaatctgactttaaaaaaaatctttgatttgcactgttatatgcaagaagtggtgaatcacactgagatacgtcgatttggggagagacccccttttgaacttcaaagggttcaagggcaaagacatctgttttaaaaaggtcctttatgacttcaggtcaaagactgagactcagaactttcaaatctggatggaataccttgcctaactgttgcgtggagttcacagttcgactaaccctgtgaacacccaagccaggagttctatgagaagccaaatggtgctcgcaattgtgcttgctgctggactggcaagcttcatgttatgtttatttggtgtgcgtgtgtctttattattttgtgtaaactatattctgcttatagagagtctctgagactaaaattgacaacttgaaaagtattccaaggaatattatgaaaatagggcaacatggactgtttaagatctccatgtaattgaaattcatgcaaggaaacaactcatagaaaagataaatatggatgcccttcacatgttatcaacctcgtaacttttggtgcttgctgaatcagtccatgaaaagctacagcccgctctttgggaatgctacatacccatttctggtatttaaaaaatatctaggaggagctaaatgacaaaacacagcagtgttttgagggagaaaggaccatcatttataatgctctgtacatactaccagagctgcttggaaaattaaaggccacttgtggctttttcctaccaactgatacgtttaaatttgccctaggattgagctaacagcaaaaaaaaaaaaaaaaaaaagagagaaagaaaggagtaaacagtggtaataaaaaaatccatctgtcttcttgctatgttaatattaataaatcataatatgacaagaccctcactgaataagagtattttcagtcatcagaagccagctgttggtaggcattaatgagtttaaaattgttctcaattgaaaaaacatcacactattttgccaaaaccaaagtaattataatactgtgtcctcctgtaattttttgagaagtggttataaagggcatatttacataaattctactttattcctcaacttctttgatgaatgtaacccaattttacttctttaaaaagtctcaattcaagctggattagccagctcagcataatcaactagacagtggtttgttaaatttagcagcatacttcgttcccattctaattaaagtcatgagttcttgaatcccagagaaataatgcttaggaacttctctcaatctgcttggcttggcctagagaagtggccattttatcaacaggaaaaaaaaaaattttctctactacaaccccgttgccttctgaaaaacagcaagttatttctttatataattatcattttattattttatggaaaattaatttattaattaatagcctattatgtgttctcacttgcttctctaagtaatattttgagataaaatgttgaataaaaccatggattatagagaaaagtcaaaatatatgtgtaatatttaattattttataagttttataataaagtattccatttctttatctttga

SEQ ID NO: 1000 - DNA, 1632 bp, Homo sapiens
  source 1..1632: mol_type = unassigned DNA
agacgctcacaccgacacagacagacgcacagacgggcgggcagacaccgacagtctcccaaccgtttgcgctccagtcccggcccagggagccccccgtaccctctggggtgccgcaaactgcagctcggcaggcccgcgccgggagaagggagggcgcgcaggcggccggaggaggggaggtcccagcgcgcccccgctgcgatgtgaacggcggcggctctcacctggagccgcacctggggcgccgagctccggggccgcggaaagaatgcgcgccgcccgtgcgctccgcctgccgcgtctggccacccgcagccgccgcgtccgcacctgaccatggagtgcgccctcctgctcgcgtgtgccttcccggctgcgggttcgggcccgccgaggggcctggcgggactggggcgcgtggccaaggcgctccagctgtgctgcctctgctgtgcgtcggtcgccgcggccttagccagtgacagcagcagcggcgccagcggattaaatgatgattacgtctttgtcacgccagtagaagtagactcagccgggtcatatatttcacacgacattttgcacaacggcaggaaaaagcgatcggcgcagaatgccagaagctccctgcactaccgattttcagcatttggacaggaactgcacttagaacttaagccctcggcgattttgagcagtcactttattgtccaggtacttggaaaagatggtgcttcagagactcagaaacccgaggtgcagcaatgcttctatcagggatttatcagaaatgacagctcctcctctgtcgctgtgtctacgtgtgctggcttgtcaggtttaataaggacacgaaaaaatgaattcctcatctcgccattacctcagcttctggcccaggaacacaactacagctcccctgcgggtcaccatcctcacgtactgtacaaaaggacagcagaggagaagatccagcggtaccgtggctaccccggctctggccggaattatcctggttactccccaagtcacattccccatgcatctcagagtcgagagacagagtatcaccatcgaaggttgcaaaagcagcatttttgtggacgacgcaagaaatgtatatgctcccaagcctcccacagaggacacctatctaaggtttgatgaatatgggagctctgggcgacccagaagatcagctggaaaatcacaaaagggcctcaatgtggaaaccctcgtggtggcagacaagaaaatggtggaaaagcatggcaagggaaatgtcaccacatacattctcacagtaatgaacatggtttctggcctatttaaagatgggactattggaagtgacataaacgtggttgtggtgagcctaattcttctggaacaagaacctggtttgcccccatcagtggaatgtgctctaagtaccgaagttgtaccatcaatgaggacacaggacttggccttgccttcaccatcgctcatgagtcagggcacaactttggtatgattcacgatggagaagggaatccctgcagaaaggctgaaggcaatatcatgtctcccacactgaccggaaacaatggagtgttttcatggtcttcctgcagccgccagtatctcaag

SEQ ID NO: 1001 - DNA, 6754 bp, Homo sapiens
  source 1..6754: mol_type = unassigned DNA
agctgcgggcggctccagctgcccccagatgtgggctgggcggctcgcggggaactttcgcgccggctgcgagtgcggggccccggctgcagtccggctgccatggatccgccggcgggagccgctcgccgcctgctctgccccgcgctgctgctgctgctgctgctgctgccgccgccgctcctgccgccgccgccgccgcccgcgaacgccaggctcgccgccgccgccgaccccccaggcgggcccctggggcacggagcggagcgcatcctggcggtgcccgtgcgcactgacgcccagggccgcttggtgtcccacgtggtgtcggcagctacgtccagagcaggggtacgagcccgcagggccgccccggtccggaccccgagcttccccggaggcaacgaggaggagcctggcagtcacctcttctacaatgtcacggtctttggccgagacctgcacctgcggctgcggcccaacgcccgcctcgtggcgcccggggccactatggagtggcagggcgagaagggcaccacccgcgtggagcccctgctcgggagctgtctctacgtcggagacgtggccggcctagccgaagcctcctctgtggcgctcagcaactgcgatgggctggctggtctgatccggatggaggaggaggagttcttcatcgaacccttggagaaggggctggcggcgcaggaggctgagcaaggccgtgtgcatgtggtgtatcgccggccacccacgtcccctcctctcggggggccacaggccctggacacaggggcctccctggacagcctggacagcctcagccgcgccctgggcgtcctagaggagcacgccaacagctcgaggcggagggcacgcaggcatgctgcggacgatgactacaacatcgaggtcctgctgggcgtggatgactctgtggtgcagttccacgggaaggagcacgtacagaagtacctgctgacactcatgaacattgtcaatgaaatctaccatgacgagtccttgggtgcccacatcaacgtggtcctggtgcggatcatcctcctgagctatggaaagtccatgagcctcatcgagatcgggaacccctctcagagcctggagaatgtctgccgctgggcctacctccagcagaagccagacacgggccacgatgaataccacgatcacgccatcttcctcacacggcaggactttgggccttccggcatgcaaggctatgctcctgtcaccggcatgtgccatccggtccgcagctgcaccctgaaccatgaggacggcttctcctcagcgtttgtggtggcccatgagactggccacgtgctgggcatggagcacgacgggcagggcaaccgctgtggcgacgaggtgcggctgggcagcatcatggcgcccctggtgcaggccgccttccaccgcttccactggtcccgctgcagccagcaggagctgagccgctacctgcactcctatgactgcctgctggatgaccccttcgcccacgactggccggcgctgccccagctcccgggactgcactactccatgaacgagcaatgccgctttgacttcggcctgggctacatgatgtgcacggcgttccggacctttgacccctgcaagcagctgtggtgcagccatcctgacaacccctacttttgcaagaccaagaaggggccccccttggacgggactatgtgtgcacctggcaagcattgttttaaaggacactgcatctggctgacacctgacatcctcaaacgggacggcagctggggcgcttggagtccgtttggctcctgctcacgtacctgtggcacgggcgtgaagttcaggacccgccagtgtgacaacccacacccggccaacgggggccgcacctgctcgggccttgcctacgacttccagctctgcagccgccaggactgccccgactccctggctgacttccgcgaggagcagtgccgccagtgggacctgtacttcgagcacggcgacgcccagcaccactggctgccccacgagcaccgggatgccaaggagagatgccacctgtactgcgagtccagggagaccggggaggtggtgtccatgaagcgcatggtgcatgacgggacgcgctgctcctacaaggacgccttcagcctctgtgtgcgcggggactgcaggaaggtgggctgtgacggtgtgatcggctccagcaagcaggaagacaagtgtggcgtgtgcggaggggacaacagccactgcaaagtggtcaagggcacgttcacacggtcacccaagaagcatggttacatcaagatgtttgagatccctgcaggagccagacacctgctcattcaggaggtagacgccaccagccaccatctggccgtcaagaacctggagacaggcaagttcatcttaaatgaagagaatgacgtggatgccagttccaaaaccttcattgccatgggcgtggagtgggagtacagagacgaggacggccgggagacgctgcagaccatgggccccctccacggcaccatcaccgttctggtcatcccggtgggagacacccgggtctcactgacgtacaaatacatgatccatgaggactcactgaatgtcgacgacaacaacgtcctggaagaggactctgtggtctacgagtgggccctgaagaagtggtctccgtgctccaagccctgtggcggagggtcccagttcaccaagtatggctgccgccggaggctggaccacaagatggtacaccgtggcttctgtgccgccctctcgaagcccaaagccatccgcagagcgtgcaacccacaggaatgctcccagccagtgtgggtcacaggcgaatgggagccatgtagccagacctgtgggcggacaggcatgcaggtgcgctccgtgcgctgcattcagccgctacacgacaacaccacccgctccgtgcacgccaagcactgcaatgacgcccggcccgagagccgccgggcctgcagccgcgagctctgccctggtcgttggcgagccgggccctggtcccagtgctcagtaacctgtggcaacggcacccaggagcggccagtgctctgccgcaccgcggacgacagcttcggcatctgccaggaggagcgtcctgagacagcgaggacctgcaggcttggcccctgtccccgaaacatctcagatccctccaagaagagctacgtagttcagtggctgtcccgcccggaccccgactcgcccatccggaagatctcgtcaaagggccactgccaaggcgacaagtcaatattctgtaggatggaagtcttgtcccgctattgctccatcccaggctacaacaagctgtgctgcaagtcctgtaacctgtacaacaacctcaccaacgtggagggcaggatagagccaccgcctgggaagcacaacgacattgacgtgttcatgcctaccctcccagtgcccactgtagccatggaggtgcggccatcaccaagcacccccctggaggtccctctcaatgcctccagcaccaatgccacagaggatcacccagaaaccaatgccgtagatgaaccctacaaaatccatggcctggaagatgaagtccagccacccaacctaatccctcgacgaccgagcccctatgaaaagaccagaaaccaaagaatccaagagctcattgatgagatgcggaagaaagagatgctcggaaagttctaataaaatggaaagatagcatccctagcatttttttcttgcttatagagatattccatgggatagcaaatcctgtgtcatggagatgaagtcaaaattcctgattccaaaaggttttgagaaaacaaagagggggaatgacgtaagaaagataggcatgagcatgtggtaactaggttagcacgtgtgcttcccagcccaggagcgaccaaatactgtggtggcgtcaggtgtgcagtggagaggaatatagaggctgtatggcctccctcagtgagggcagggcaagagggatcactctgagagaacaaaaataggccccaagttgctaagcagtgattgggaaccttcctttccttggcggagatgcatgacattccctaccgatccccagacacagcctgtgggactcttaggagaaatggtgatttactgaataactgacccgttgccgagatgagtacaatgaagtggaggtgatgaactcaaatcgtcttccagggccaggcggctgaccggggtgagcgtagtggcccgctggggaccatggccgccctgacagccacacccacctggagctgacttggttctggctgttgctgccactgtgaaatctgtatctctctccatctctgctctactatccccggccttgccagacagtgttctttttcggaagaagtctagatttttgcatgaaaaaaactcaatctttaaaggtcgactcagaacattttaaggaggcctccacttggtctgatgcagtcttgctaattaagaactaaaggccttctgaccttcttggtgctcatgctgtacggcatctgaatgtctcgaccgagtctgagccgtgcagctgtcctccacctgcgaaagtaatgagaatcctatcacgggacataaggataggtctaaacagggtccatgccaagaaaacagtggggtgctctcccaggcctctcccctgtccactaaccctggccttgccggctgccttccaggctctgggggaagagctcctgcattcttccctggccaccttggctccagggctccccagagagcctcttccctccccaagtacctgagaaagatgagagaggcacgtgctctgctgggaaggtccagtgagcggttcaagggcctggaatctccctacggccaagtctaagggttctgggattctgggctttgtgggctttgcttgcttgctgggaatgggctttccctgtcccgccctgccccacctcgcctctgtctctcagaagctccagaacccagcagtgacctgcaaaatgtggcctctgatgggggcttagggtgggagatggggagagcctacattgtcttttgctccttgaaaactttaatagctcctattttccagagaatggtgctttgtgagcaacatgcgagtaagagagaaataggaggaagggggagtaggggcggatgggagaagagtggctcatttttacctctcactgccttgacattttgtgaacgtgaagcttaaactttctgggcttacaagacccaggggcacgtcagctccttagatgggctcagcctgacacataattcttaaacctttcctgtttaagaaacttctagaggctgtgtactctcaccaatcctcttcgagaatttgttcatgtgtatttccccattatatggatgaggctcaggataacagcatagtggctaccttctactgagttttgaggtgctaataagtatgtttgtctgaggctgcacatgtgggtggctctgtgtgtatgatccaagggacaaaatgacgatgtaggaaccagcaagaacggaatctgggctgatgcttcagtctccacctgggtgatggctagcctcccgccctccaccaccgcatcccacacgtgctgcgcactgtccccgtgtctcctggagaaccaaactggagaaaacctttctgagtatctctcatagtaccccttccttaagaagatgtggtttagagcatgtgtgcaatcctgcctctgtaattaggaaacggagcccgaggctttccattgttggttgaacccaggacagctggtgctattcacaggctgaagaactgggcagttcttacttgggtctgtcctaggatgtggaggaagttcaggactaacgctaggcagagagtatgactcggtttacccagcctaggggcctctggatgggaacactccattccaagatctcagcagagcagggcttcctggcttgaggctggaagcctttgggaagaggcccagctgggacattccctgggcacctgtcttccgctgaagggagcaaggtgccctctgggactgacagccatgaccctctgtgccatcctcaatccttgagccatatatcaagagtcctctagagccggatggtcctcaaaagtctgtccaaggaatgccaacgttcaccgggctctgagaaacgacgcaaatctctgagctggggaccacttggagaaccggcttagtaacagtcctgatcttcgcaagccagcttcttctgcatctgaggggctcctggcgcccagaggaggcagacagatgtcttctagctgagtttctaaccgcatgatgagactcagaccttccgctgcactagaaaatctgcaacagtgtccctgagtcacttctccttagtgggcagactcgtgttagatttgtggaacccagctctctgatttactccttttggaaaacccatggaatttcatgtataaggctttcatttgtattttaaggtttttctgtttgttttgagtatatacatggtgctcaatagcaacatcttagcagatgaagcagtttatgattccactccctcctgtatgacaggtagccactatactgaatcaaggtgctgaactcaaatcacaaaattctggcttaccgatacaacaaccaatacatctttgttctgtaatgtaaaatttgactccttacttttataacttattaaagttaaaatgtctgtgtttttgcaaatcatg

SEQ ID NO: 1002 - DNA, 2044 bp, Homo sapiens
  source 1..2044: mol_type = unassigned DNA
agctgcgggcggctccagctgcccccagatgtgggctgggcggctcgcggggaactttcgcgccggctgcgagtgcggggccccggctgcagtccggctgccatggatccgccggcgggagccgctcgccgcctgctctgccccgcgctgctgctgctgctgctgctgctgccgccgccgctcctgccgccgccgccgccgcccgcgaacgccaggctcgccgccgccgccgaccccccaggcgggcccctggggcacggagcggagcgcatcctggcggtgcccgtgcgcactgacgcccagggccgcttggtgtcccacgtggtgtcggcagctacgtccagagcaggggtacgagcccgcagggccgccccggtccggaccccgagcttccccggaggcaacgaggaggagcctggcagtcacctcttctacaatgtcacggtctttggccgagacctgcacctgcggctgcggcccaacgcccgcctcgtggcgcccggggccactatggagtggcagggcgagaagggcaccacccgcgtggagcccctgctcgggagctgtctctacgtcggagacgtggccggcctagccgaagcctcctctgtggcgctcagcaactgcgatgggctggctggtctgatccggatggaggaggaggagttcttcatcgaacccttggagaaggggctggcggcgcaggaggctgagcaaggccgtgtgcatgtggtgtatcgccggccacccacgtcccctcctctcggggggccacaggccctggacacaggggcctccctggacagcctggacagcctcagccgcgccctgggcgtcctagaggagcacgccaacagctcgaggcggagggcacgcaggcatgctgcggacgatgactacaacatcgaggtcctgctgggcgtggatgactctgtggtgcagttccacgggaaggagcacgtacagaagtacctgctgacactcatgaacattgtcaatgaaatctaccatgacgagtccttgggtgcccacatcaacgtggtcctggtgcggatcatcctcctgagctatggaaagtccatgagcctcatcgagatcgggaacccctctcagagcctggagaatgtctgccgctgggcctacctccagcagaagccagacacgggccacgatgaataccacgatcacgccatcttcctcacacggcaggactttgggccttccggcatgcaaggctatgctcctgtcaccggcatgtgccatccggtccgcagctgcaccctgaaccatgaggacggcttctcctcagcgtttgtggtggcccatgagactggccacgtgctgggcatggagcacgacgggcagggcaaccgctgtggcgacgaggtgcggctgggcagcatcatggcgcccctggtgcaggccgccttccaccgcttccactggtcccgctgcagccagcaggagctgagccgctacctgcactcctatgactgcctgctggatgaccccttcgcccacgactggccggcgctgccccagctcccgggactgcactactccatgaacgagcaatgccgctttgacttcggcctgggctacatgatgtgcacggcgttccggacctttgacccctgcaagcagctgtggtgcagccatcctgacaacccctacttttgcaagaccaagaaggggccccccttggacgggactatgtgtgcacctggcaagttcaggccgggcgcggtggctcatgcctgttatcccagcactttgggaggccaaggtaggtggatcgcctgaggtcagaagttcaagacaagtctggttaacatggcaaaatcccgtctctactaaaaatacaaaaattagctgggcgcggtggtgggtgcctgtaatcccagctactccggaggctgaggcatgaaaatcgtttgagcccaggaggcggaggttgcggtgagccaagatcgcgtcgctgctctccagtctggatcacacagcaagaccctgtctcaaaaaataaaaataaaagtgaagtgca

SEQ ID NO: 1003 - DNA, 4515 bp, Homo sapiens
  source 1..4515: mol_type = unassigned DNA
atgtgggtggccaagtggctgactgggctgctctaccatctctcgctcttcatcaccaggtcttgggaagttgacttccaccccaggcaagaagccctggtgaggacactgacctcctacgaagtagtgatccccgagcgggtcaatgagtttggagaagtgttccctcagagccaccacttcagccggcagaaacgcagctccgaggcgctggaacccatgccgttccgaacccactatcgcttcactgcctacgggcagctcttccagctgaacctgaccgccgatgcatcctttctggccgccggctacaccgaggtgcacttgggaaccccggagcgcggggcctgggagagcgacgcagggccctcggacctgcgccactgcttctaccgcggccaggtcaactcacaggaggattacaaggccgtcgtcagcttatgcggaggcctgacgggaacatttaaaggacagaacggtgaatatttcttagaacctataatgaaggcagatgggaatgaatatgaagatggtcacaacaagccacatcttatatacagacaagacttaaataactcttttctgcagactctgaagtattgcagtgtgtcagaaagtcaaataaaggaaaccagtttaccctttcatacctacagcaacatgaatgaagatcttaatgtaatgaaagaaagagttttaggacacacatcaaaaaatgtaccattgaaagatgaaagaagacattccaggaaaaaacgtcttatatcatatccaagatacattgaaattatggttacagctgatgctaaagtggtttctgctcatggatcgaatttgcaaaactatatactgactctaatgtcaattgttgcaacaatctacaaagatccaagtattggaaatttgatacacatagtagtggtaaaattagttatgattcaccgtgaggaggaaggaccagtcattaattttgatggtgctaccacattaaagaacttttgttcatggcaacaaactcagaatgaccttgatgatgttcacccttcccaccatgacactgctgttcttatcactagggaagacatttgttcatctaaagagaaatgtaacatgttaggtttatcatatttaggtaccatatgtgatcctttacaaagctgctttattaatgaagaaaaaggactcatttctgcttttactatagcccatgagcttgggcacacacttggtgttcaacatgatgataatcctagatgtaaagaaatgaaagttacaaagtatcatgtaatggcccctgctttaagttttcacatgagtccttggagctggtcaaactgtagtcggaaatatgttactgaattcctagatactggttacggggaatgtcttcttgacaaaccagatgaagaaatatataatctgccttcagaacttcctggatcacgatatgatggaaacaagcagtgtgagcttgcgtttggtcctgggtcacaaatgtgtccccatataaatatatgcatgcatctgtggtgcacaagcacagaaaagcttcacaaaggctgtttcactcaacacgtgccaccagcagatggaacagactgcggtcctggaatgcattgccgtcatgggctatgtgtaaacaaagaaacggaaacacgtcctgtaaatggtgaatggggaccatgggaaccttacagttcttgttcaagaacatgtggaggcggaatcgaaagtgcaaccaggcgctgtaatcgtcctgagccaagaaacggaggaaattactgtgtgggccgcaggatgaaatttcgatcatgtaatactgattcatgtccaaaaggcacacaagactttcgagagaagcagtgctctgattttaatggtaaacatttggacatcagtggcattccctctaatgtgaggtggcttccaagatacagtggcattggcacaaaggatcgttgtaaactctattgtcaggttgctggaaccaattatttctacctattgaaggatatggttgaagatggtactccttgtggaactgaatcttataatattgattgtaattgtgtcttgaaggcagctggttgtgatcacgtgttaaactccagtgccaagatagacaaatgtggagtgtgtggtggggacaactcttcatgcaagacaataacaggtgtcttcaacagttctcattatggttataatgttgttgtaaagattcccgcaggagcaacaaacgttgacattcgtcagtacagctattctggacaaccagatgacagttaccttgcattatctgacgctgaagggaattttcttttcaatggaaattttcttctaagtacgtcaaaaaaagaaatcaatgtgcaaggaacaagaactgttattgaatacagtggatcaaataacgcagttgaaagaattaatagtactaatcgacaagagaaagaaattcttattgaggtgttgtgtgtgggtaatttatacaaccctgatgtacattattccttcaatatccctttggaagagaggagtgacatgttcacatgggacccctatggaccatgggaaggctgtaccaaaatgtgtcaaggtcttcagcgaagaaacataacttgcatacataagagtgatcatagtgttgtgtctgataaagaatgtgaccacttgccacttccatcatttgttactcaaagttgcaatacagactgtgaactaaggtggcatgttattggcaaaagtgaatgttcatcccaatgtggtcaaggatatagaaccttggacatccattgcatgaagtattccattcatgaaggacagactgttcaagttgatgaccactactgtggtgaccagcttaaacctcctacccaagaactatgccatggtaactgtgtcttcacaagatggcattattcagaatggtctcagtgttccaggagttgtggaggaggggaaaggtctcgagaatcttattgtatgaataactttggccatcgtcttgctgacaatgaatgccaagaactgtcccgagtgacgagagagaattgcaatgaattttcctgtcccagttgggctgctagtgaatggagcgagtgccttgttacatgtggtaaaggaacaaagcagcggcaggtatggtgtcagctgaatgtagatcacttgagtgatggcttctgtaattcaagtaccaaacctgaatctctgagtccatgtgaacttcatacatgtgcttcctggcaagtaggaccatggggtccttgcacaaccacatgtggacatgggtatcagatgcgagatgttaaatgtgtcaatgagctagctagtgcagtgttagaggacacagaatgccatgaagctagtcgccccagtgacagacagagctgtgtacttacaccttgctcatttatttctaaacttgagaccgctttattaccaactgttctcataaaaaagatggcacaatggcgacatggttcttggaccccatgctccgtatcttgtggaagaggtactcaagcccgctatgtaagctgtcgtgatgctcttgatagaatagcagatgaatcatattgtgcccacttaccccgacctgctgaaatatgggactgttttaccccttgtggagagtggcaagcaggggattggtcaccctgttcagcttcctgtggccatggaaaaacaactcgacaagttttatgcatgaactaccatcagccaattgatgagaattactgtgatcctgaagttcgccctttgatggaacaggaatgtagcctggcagcctgccctcctgcacacagccactttcctagttcccctgtgcagccaagctattatctaagcacgaatttgccattaactcaaaaacttgaagataatgaaaatcaggtggtccatccatcagtcagaggaaaccagtggagaaccggaccatggggatcatgctccagcagttgttctggaggtcttcagcatagggctgtggtctgccaggatgaaaatggacaaagtgctagttactgcgatgcagcctccaagcctccagagttacagcaatgtggtccagggccttgtccacagtggaactacggaaattggggagaatgttcacaaacatgtggaggaggaataaaatcaagacttgtaatatgtcaatttcccaatggccaaatattagaagatcacaactgtgaaattgtaaacaagccacctagcgtaatacagtgtcatatgcatgcttgccctgctgatgtgtcatggcatcaggaaccatggacatcggaggatcttaaagtgaaattgctgcctcaaaggaccatcatcttgtgggaactaatgaaaaacatattttgccatggaaagcactcacatatgtatttaataaatgtcgttactgaccatctactatatcctaggcactgtgatccagagacaattgaaacatatttcttatccctatggagtttacagtttacttggggagatttgaaatactataagaactcactataa

SEQ ID NO: 1004 - DNA, 6076 bp, Homo sapiens
  source 1..6076: mol_type = unassigned DNA
atgtgggtggccaagtggctgactgggctgctctaccatctctcgctcttcatcaccaggtcttgggaagttgacttccaccccaggcaagaagccctggtgaggacactgacctcctacgaagtagtgatccccgagcgggtcaatgagtttggagaagtgttccctcagagccaccacttcagccggcagaaacgcagctccgaggcgctggaacccatgccgttccgaacccactatcgcttcactgcctacgggcagctcttccagctgaacctgaccgccgatgcatcctttctggccgccggctacaccgaggtgcacttgggaaccccggagcgcggggcctgggagagcgacgcagggccctcggacctgcgccactgcttctaccgcggccaggtcaactcacaggaggattacaaggccgtcgtcagcttatgcggaggcctgacgggaacatttaaaggacagaacggtgaatatttcttagaacctataatgaaggcagatgggaatgaatatgaagatggtcacaacaagccacatcttatatacagacaagacttaaataactcttttctgcagactctgaagtattgcagtgtgtcagaaagtcaaataaaggaaaccagtttaccctttcatacctacagcaacatgaatgaagatcttaatgtaatgaaagaaagagttttaggacacacatcaaaaaatgtaccattgaaagatgaaagaagacattccaggaaaaaacgtcttatatcatatccaagatacattgaaattatggttacagctgatgctaaagtggtttctgctcatggatcgaatttgcaaaactatatactgactctaatgtcaattgttgcaacaatctacaaagatccaagtattggaaatttgatacacatagtagtggtaaaattagttatgattcaccgtgaggaggaaggaccagtcattaattttgatggtgctaccacattaaagaacttttgttcatggcaacaaactcagaatgaccttgatgatgttcacccttcccaccatgacactgctgttcttatcactagggaagacatttgttcatctaaagagaaatgtaacatgttaggtttatcatatttaggtaccatatgtgatcctttacaaagctgctttattaatgaagaaaaaggactcatttctgcttttactatagcccatgagcttgggcacacacttggtgttcaacatgatgataatcctagatgtaaagaaatgaaagttacaaagtatcatgtaatggcccctgctttaagttttcacatgagtccttggagctggtcaaactgtagtcggaaatatgttactgaattcctagatactggttacggggaatgtcttcttgacaaaccagatgaagaaatatataatctgccttcagaacttcctggatcacgatatgatggaaacaagcagtgtgagcttgcgtttggtcctgggtcacaaatgtgtccccatataaatatatgcatgcatctgtggtgcacaagcacagaaaagcttcacaaaggctgtttcactcaacacgtgccaccagcagatggaacagactgcggtcctggaatgcattgccgtcatgggctatgtgtaaacaaagaaacggaaacacgtcctgtaaatggtgaatggggaccatgggaaccttacagttcttgttcaagaacatgtggaggcggaatcgaaagtgcaaccaggcgctgtaatcgtcctgagccaagaaacggaggaaattactgtgtgggccgcaggatgaaatttcgatcatgtaatactgattcatgtccaaaaggcacacaagactttcgagagaagcagtgctctgattttaatggtaaacatttggacatcagtggcattccctctaatgtgaggtggcttccaagatacagtggcattggcacaaaggatcgttgtaaactctattgtcaggttgctggaaccaattatttctacctattgaaggatatggttgaagatggtactccttgtggaactgaaactcatgacatctgtgttcaaggccagtgtatggcagctggttgtgatcacgtgttaaactccagtgccaagatagacaaatgtggagtgtgtggtggggacaactcttcatgcaagacaataacaggtgtcttcaacagttctcattatggttataatgttgttgtaaagattcccgcaggagcaacaaacgttgacattcgtcagtacagctattctggacaaccagatgacagttaccttgcattatctgacgctgaagggaattttcttttcaatggaaattttcttctaagtacgtcaaaaaaagaaatcaatgtgcaaggaacaagaactgttattgaatacagtggatcaaataacgcagttgaaagaattaatagtactaatcgacaagagaaagaacttattttgcaggtgttgtgtgtgggtaatttatacaaccctgatgtacattattccttcaatatccctttggaagagaggagtgacatgttcacatgggacccctatggaccatgggaaggctgtaccaaaatgtgtcaaggtcttcagcgaagaaacataacttgcatacataagagtgatcatagtgttgtgtctgataaagaatgtgaccacttgccacttccatcatttgttactcaaagttgcaatacagactgtgaactaaggtggcatgttattggcaaaagtgaatgttcatcccaatgtggtcaaggatatagaaccttggacatccattgcatgaagtattccattcatgaaggacagactgttcaagttgatgaccactactgtggtgaccagcttaaacctcctacccaagaactatgccatggtaactgtgtcttcacaagatggcattattcagaatggtctcagtgttccaggagttgtggaggaggggaaaggtctcgagaatcttattgtatgaataactttggccatcgtcttgctgacaatgaatgccaagaactgtcccgagtgacgagagagaattgcaatgaattttcctgtcccagttgggctgctagtgaatggagcgagtgccttgttacatgtggtaaaggaacaaagcagcggcaggtatggtgtcagctgaatgtagatcacttgagtgatggcttctgtaattcaagtaccaaacctgaatctctgagtccatgtgaacttcatacatgtgcttcctggcaagtaggaccatggggtccttgcacaaccacatgtggacatgggtatcagatgcgagatgttaaatgtgtcaatgagctagctagtgcagtgttagaggacacagaatgccatgaagctagtcgccccagtgacagacagagctgtgtacttacaccttgctcatttatttctaaacttgagaccgctttattaccaactgttctcataaaaaagatggcacaatggcgacatggttcttggaccccatgctccgtatcttgtggaagaggtactcaagcccgctatgtaagctgtcgtgatgctcttgatagaatagcagatgaatcatattgtgcccacttaccccgacctgctgaaatatgggactgttttaccccttgtggagagtggcaagcaggggattggtcaccctgttcagcttcctgtggccatggaaaaacaactcgacaagttttatgcatgaactaccatcagccaattgatgagaattactgtgatcctgaagttcgccctttgatggaacaggaatgtagcctggcagcctgccctcctgcacacagccactttcctagttcccctgtgcagccaagctattatctaagcacgaatttgccattaactcaaaaacttgaagataatgaaaatcaggtggtccatccatcagtcagaggaaaccagtggagaaccggaccatggggatcatgctccagcagttgttctggaggtcttcagcatagggctgtggtctgccaggatgaaaatggacaaagtgctagttactgcgatgcagcctccaagcctccagagttacagcaatgtggtccagggccttgtccacagtggaactacggaaattggggagaatgttcacaaacatgtggaggaggaataaaatcaagacttgtaatatgtcaatttcccaatggccaaatattagaagatcacaactgtgaaattgtaaacaagccacctagcgtaatacagtgtcatatgcatgcttgccctgctgatgtgtcatggcatcaggaaccatggacatcgtgctcagcttcttgtggtaaaggtagaaagtaccgtgaagtgttttgcattgaccaattccaaaggaaattagaagacacaaattgcagtcaagtacagaaacctccaactcacaaagcctgtagatctgtcagatgcccttcatggaaagccaatagctggaatgagtgctctgtgacctgtggctctggagttcagcagagggatgtatactgcagactgaaaggtgttggtcaggtggttgaagaaatgtgtgatcagtccacccgaccttgttctcagaggcgatgttggagtcaggactgtgtgcagcacaaggggatggaaagagggaggctgaattgttcaacatcatgtgagagaaaagattcacatcaacgaatggagtgcacagataaccaaatcagacaagtgaatgaaatagtctataattcttcaaccatatctcttacatccaagaattgcaggaaccctccttgcaattacattgtggtaacagcagactcatcacagtgtgcaaacaactgtggatttagttacagacaaaggattacatattgcaccgagatcccatctactaagaaacataagctccatcgacttcggcctatagtttatcaagaatgccctgtggtgccttcctctcaggtttaccaatgcattaacagctgtttgcatttggccacttggaaagttggaaaatggagcaagtgctcagtgacttgtggaattgggataatgaagagacaagtgaaatgcattaccaaacatggtttgtccagtgacttatgtttaaaccatttaaaaccaggtgctcaaaagaaatgttatgccaatgactgtaaatcatttaccacctgcaaagaaattcaagtgaaaaaccacattagaaaggatggtgactattaccttaacattaagggaagaataataaagatttattgtgcagacatgtacttggagaaccctaaggaatatttaacactggtccaaggtgaagaaaacttttctgaagtgtatggctttagactaaaaaatccatatcaatgtccttttaatgggagtagaagggaagactgtgaatgtgacaatggacacttagctgctggatacactgttttcagcaaaataagaattgatctcacttccatgcaaattaaaactacggaccttcttttttccaaaacaatatttggaaatgcagttccatttgccacagctggagattgctacagtgctttcagatgcccacagggacagtttagcattaatttgtcaggaactgggatgaagatatccagcacagcaaagtggctcactcaggggagttatacctctgtcagcatacgaagatcagaggatggaactagatttttcggcaaatgtggagggtactgtggaaagtgtcttcctcacatgactactggtctcccaattcaagtcatatgaacatttagaagggggaagtatgccctaaagaggggatattctctggaatattcaaataactggtgctcatttctttatatctcccttcccgagatttccatgtccaatatgtctctgcctttttttcagggtgctcatcagggattcaaatcactgcttaataaggtctataaaagaaatttaagagctatcttaatttattttatatctaatcaggatattttttaaagaacataataatttataatagagaataccaggattgaatgaattataccaagacagtgttgctcttaacatcttggcctggaccacacttattttatacctataaacacacatg

SEQ ID NO: 1005 - DNA, 2780 bp, Homo sapiens
  source 1..2780: mol_type = unassigned DNA
tattccttcaatatccctttggaagagaggagtgacatgttcacatgggacccctatggaccatgggaaggctgtaccaaaatgtgtcaaggtcttcagcgaagaaacataacttgcatacataagagtgatcatagtgttgtgtctgataaagaatgtgaccacttgccacttccatcatttgttactcaaagttgcaatacagactgtgaactaaggtggcatgttattggcaaaagtgaatgttcatcccaatgtggtcaaggatatagaaccttggacatccattgcatgaagtattccattcatgaaggacagactgttcaagttgatgaccactactgtggtgaccagcttaaacctcctacccaagaactatgccatggtaactgtgtcttcacaagatggcattattcagaatggtctcagtgttccaggagttgtggaggaggggaaaggtctcgagaatcttattgtatgaataactttggccatcgtcttgctgacaatgaatgccaagaactgtcccgagtgacgagagagaattgcaatgaattttcctgtcccagttgggctgctagtgaatggagcgagtgccttgttacatgtggtaaaggaacaaagcagcggcaggtatggtgtcagctgaatgtagatcacttgagtgatggcttctgtaattcaagtaccaaacctgaatctctgagtccatgtgaacttcatacatgtgcttcctggcaagtaggaccatggggtccttgcacaaccacatgtggacatgggtatcagatgcgagatgttaaatgtgtcaatgagctagctagtgcagtgttagaggacacagaatgccatgaagctagtcgccccagtgacagacagtgctccgtatcttgtggaagaggtactcaagcccgctatgtaagctgtcgtgatgctcttgatagaatagcagatgaatcatattgtgcccacttaccccgacctgctgaaatatgggactgttttaccccttgtggagagtggcaagcaggggattggtcaccctgttcagcttcctgtggccatggaaaaacaactcgacaagttttatgcatgaactaccatcagccaattgatgagaattactgtgatcctgaagttcgccctttgatggaacaggaatgtagcctggcagcctgccctcctgcacacagccactttcctagttcccctgtgcagccaagctattatctaagcacgaatttgccattaactcaaaaacttgaagataatgaaaatcaggtggtccatccatcagtcagaggaaaccagtggagaaccggaccatggggatcatgctccagcagttgttctggaggtcttcagcatagggctgtggtctgccaggatgaaaatggacaaagtgctagttactgcgatgcagcctccaagcctccagagttacagcaatgtggtccagggccttgtccacagtggaactacggaaattggggagaatgttcacaaacatgtggaggaggaataaaatcaagacttgtaatatgtcaatttcccaatggccaaatattagaagatcacaactgtgaaattgtaaacaagccacctagcgtaatacagtgtcatatgcatgcttgccctgctgatgtgtcatggcatcaggaaccatggacatcggaggatcttaaagtgaaattgctgcctcaaaggaccatcatcttgtgggaactaatgaaaaacatattttgccatggaaagcactcacatatgtatttaataaatgtcgttactgaccatctactatatcctaggcactgtgatccagagacaattgaaacatatttcttatccctatggagtttacagtttacttggggagatttgaaatactataagaactcactataaaaagatatttttattagctatcttagattggaaatccactttctgcttactgtgtctctgttccatcttctttcattttattggttttagtttgcaagcctagttcttaagaagactgtggattactttcttggaattttttcccaattaggagagcagaatcctaactgctaatgagattgaattgtaatggcatttgtttctgagcatagacgttttattttccctacccattcatgacttcaattcaccaagcattaaacatttacttaggtctcatgctttatattagatattgaagcaattaaaattaagtgtttgtgagtcagattctctgttttagaggtcagcaaactatggtccaggtaccaaatctggcctgttgcctatttttaaaataagttctattggaacacagtcatgctcatttgtttacgtgttatctatggctggttttgcactacagcagtagcattgattagttgcaatagaaactctgtaactcacaaagcctgaaatatttactatctaactttttctgggaaaagtttgctgacccctgttctatttaataaacattataatgcttttaagtttaacataaaaaggtacttagatttatagaatattaaaattacaaataattcattccaggtcagttttagatgtttttgatcctttgatattttacattttaaggtttatcaaccttctctacatatccactgtgatattcatgcaatgtttatgtaaatgtatctatactatattccaatatatttttgttatgctattttttgtatgtaaattatatcacaagtgaaaaatctgaatgctcattaaagtcctctgtatagatgacttttcaacctcac

SEQ ID NO: 1006 - DNA, 4633 bp, Homo sapiens
  source 1..4633: mol_type = unassigned DNA
atgtgggtggccaagtggctgactgggctgctctaccatctctcgctcttcatcaccaggtcttgggaagttgacttccaccccaggcaagaagccctggtgaggacactgacctcctacgaagtagtgatccccgagcgggtcaatgagtttggagaagtgttccctcagagccaccacttcagccggcagaaacgcagctccgaggcgctggaacccatgccgttccgaacccactatcgcttcactgcctacgggcagctcttccagctgaacctgaccgccgatgcatcctttctggccgccggctacaccgaggtgcacttgggaaccccggagcgcggggcctgggagagcgacgcagggccctcggacctgcgccactgcttctaccgcggccaggtcaactcacaggaggattacaaggccgtcgtcagcttatgcggaggcctgacgggaacatttaaaggacagaacggtgaatatttcttagaacctataatgaaggcagatgggaatgaatatgaagatggtcacaacaagccacatcttatatacagacaagacttaaataactcttttctgcagactctgaagtattgcagtgtgtcagaaagtcaaataaaggaaaccagtttaccctttcatacctacagcaacatgaatgaagatcttaatgtaatgaaagaaagagttttaggacacacatcaaaaaatgtaccattgaaagatgaaagaagacattccaggaaaaaacgtcttatatcatatccaagatacattgaaattatggttacagctgatgctaaagtggtttctgctcatggatcgaatttgcaaaactatatactgactctaatgtcaattgttgcaacaatctacaaagatccaagtattggaaatttgatacacatagtagtggtaaaattagttatgattcaccgtgaggaggaaggaccagtcattaattttgatggtgctaccacattaaagaacttttgttcatggcaacaaactcagaatgaccttgatgatgttcacccttcccaccatgacactgctgttcttatcactagggaagacatttgttcatctaaagagaaatgtaacatgttaggtttatcatatttaggtaccatatgtgatcctttacaaagctgctttattaatgaagaaaaaggactcatttctgcttttactatagcccatgagcttgggcacacacttggtgttcaacatgatgataatcctagatgtaaagaaatgaaagttacaaagtatcatgtaatggcccctgctttaagttttcacatgagtccttggagctggtcaaactgtagtcggaaatatgttactgaattcctagatactggttacggggaatgtcttcttgacaaaccagatgaagaaatatataatctgccttcagaacttcctggatcacgatatgatggaaacaagcagtgtgagcttgcgtttggtcctgggtcacaaatgtgtccccatataaatatatgcatgcatctgtggtgcacaagcacagaaaagcttcacaaaggctgtttcactcaacacgtgccaccagcagatggaacagactgcggtcctggaatgcattgccgtcatgggctatgtgtaaacaaagaaacggaaacacgtcctgtaaatggtgaatggggaccatgggaaccttacagttcttgttcaagaacatgtggaggcggaatcgaaagtgcaaccaggcgctgtaatcgtcctgagccaagaaacggaggaaattactgtgtgggccgcaggatgaaatttcgatcatgtaatactgattcatgtccaaaaggcacacaagactttcgagagaagcagtgctctgattttaatggtaaacatttggacatcagtggcattccctctaatgtgaggtggcttccaagatacagtggcattggcacaaaggatcgttgtaaactctattgtcaggttgctggaaccaattatttctacctattgaaggatatggttgaagatggtactccttgtggaactgaaactcatgacatctgtgttcaaggccagtgtatggcagctggttgtgatcacgtgttaaactccagtgccaagatagacaaatgtggagtgtgtggtggggacaactcttcatgcaagacaataacaggtgtcttcaacagttctcattatggttataatgttgttgtaaagattcccgcaggagcaacaaacgttgacattcgtcagtacagctattctggacaaccagatgacagttaccttgcattatctgacgctgaagggaattttcttttcaatggaaattttcttctaagtacgtcaaaaaaagaaatcaatgtgcaaggaacaagaactgttattgaatacagtggatcaaataacgcagttgaaagaattaatagtactaatcgacaagagaaagaacttattttgcaggtgttgtgtgtgggtaatttatacaaccctgatgtacattattccttcaatatccctttggaagagaggagtgacatgttcacatgggacccctatggaccatgggaaggctgtaccaaaatgtgtcaaggtcttcagcgaagaaacataacttgcatacataagagtgatcatagtgttgtgtctgataaagaatgtgaccacttgccacttccatcatttgttactcaaagttgcaatacagactgtgaactaaggtggcatgttattggcaaaagtgaatgttcatcccaatgtggtcaaggatatagaaccttggacatccattgcatgaagtattccattcatgaaggacagactgttcaagttgatgaccactactgtggtgaccagcttaaacctcctacccaagaactatgccatggtaactgtgtcttcacaagatggcattattcagaatggtctcagtgttccaggagttgtggaggaggggaaaggtctcgagaatcttattgtatgaataactttggccatcgtcttgctgacaatgaatgccaagaactgtcccgagtgacgagagagaattgcaatgaattttcctgtcccagttgggctgctagtgaatggagcgagtgccttgttacatgtggtaaaggaacaaagcagcggcaggtatggtgtcagctgaatgtagatcacttgagtgatggcttctgtaattcaagtaccaaacctgaatctctgagtccatgtgaacttcatacatgtgcttcctggcaagtaggaccatggggtccttgcacaaccacatgtggacatgggtatcagatgcgagatgttaaatgtgtcaatgagctagctagtgcagtgttagaggacacagaatgccatgaagctagtcgccccagtgacagacagagctgtgtacttacaccttgctcatttatttctaaacttgagaccgctttattaccaactgttctcataaaaaagatggcacaatggcgacatggttcttggaccccatgctccgtatcttgtggaagaggtactcaagcccgctatgtaagctgtcgtgatgctcttgatagaatagcagatgaatcatattgtgcccacttaccccgacctgctgaaatatgggactgttttaccccttgtggagagtggcaagcaggggattggtcaccctgttcagcttcctgtggccatggaaaaacaactcgacaagttttatgcatgaactaccatcagccaattgatgagaattactgtgatcctgaagttcgccctttgatggaacaggaatgtagcctggcagcctgccctcctgcacacagccactttcctagttcccctgtgcagccaagctattatctaagcacgaatttgccattaactcaaaaacttgaagataatgaaaatcaggtggtccatccatcagtcagaggaaaccagtggagaaccggaccatggggatcatgctccagcagttgttctggaggtcttcagcatagggctgtggtctgccaggatgaaaatggacaaagtgctagttactgcgatgcagcctccaagcctccagagttacagcaatgtggtccagggccttgtccacagtggaactacggaaattggggagaatgttcacaaacatgtggaggaggaataaaatcaagacttgtaatatgtcaatttcccaatggccaaatattagaagatcacaactgtgaaattgtaaacaagccacctagcgtaatacagtgtcatatgcatgcttgccctgctgatgtgtcatggcatcaggaaccatggacatcggaggatcttaaagtgaaattgctgcctcaaaggaccatcatcttgtgggaactaatgaaaaacatattttgccatggaaagcactcacatatgtatttaataaatgtcgttactgaccatctactatatcctaggcactgtgatccagagacaattgaaacatatttcttatccctatggagtttacagtttacttggggagatttgaaatactataagaactcactataaaaagatatttttattagctatcttagattggaaatccactttctgcttactgtgtctctgttccatcttctttcattttattggttttagtttgcaagcctagttcttaagaagactg

SEQ ID NO: 1007 - DNA, 5822 bp, Homo sapiens
  source 1..5822: mol_type = unassigned DNA
gctttgcccagtagttggaaagtgaactcgactcgtgatggttctcctgtcactttggttgatagcagccgctctggtagaggttaggacttcagctgatggacaagctggtaatgaagaaatggtgcaaatagatttaccaataaagagatatagagagtatgagctggtgactccagtcagcacaaatctagaaggacgctatctctcccatactctttctgcgagtcacaaaaagaggtcagcgagggacgtgtcttccaaccctgagcagttgttctttaacatcacggcatttggaaaagattttcatctgcgactaaagcccaacactcaactagtagctcctggggctgttgtggagtggcatgagacatctctggtgcctgggaatataaccgatcccattaacaaccatcaaccaggaagtgctacgtatagaatccggagaacagagcctttgcagactaactgtgcttatgttggtgacatcgtggacattccaggaacctctgttgccatcagcaactgtgatggtctggctggaatgataaaaagtgataatgaagagtatttcattgaacccttggaaagaggtaaacagatggaggaagaaaaaggaaggattcatgttgtctacaagagatcagctgtagaacaggctcccatagacatgtccaaagacttccactacagagagtcggacctggaaggccttgatgatctaggtactgtttatggcaacatccaccagcagctgaatgaaacaatgagacgccgcagacacgcgggagaaaacgattacaatatcgaggtactgctgggagtggatgactctgtggtccgtttccatggcaaagagcacgtccaaaactacctcctgaccctaatgaacattgtgaatgaaatttaccatgatgagtccctcggagtgcatataaatgtggtcctggtgcgcatgataatgctgggatatgcaaagtccatcagcctcatagaaaggggaaacccatccagaagcttggagaatgtgtgtcgctgggcgtcccaacagcaaagatctgatctcaaccactctgaacaccatgaccatgcaatttttttaaccaggcaagactttggacctgctggaatgcaaggatatgctccagtcaccggcatgtgtcatccagtgagaagttgtaccctgaatcatgaggatggtttttcatctgcttttgtagtagcccatgaaacgggccatgtgttgggaatggagcatgatggacaaggcaacaggtgtggtgatgagactgctatgggaagtgtcatggctcccttggtacaagcagcattccatcgttaccactggtcccgatgcagtggtcaagaactgaaaagatatatccattcctatgactgtctccttgatgacccttttgatcatgattggcctaaactcccagaacttcctggaatcaattattctatggatgagcaatgtcgttttgattttggtgttggctataaaatgtgcaccgcgttccgaacctttgacccatgtaaacagctgtggtgtagccatcctgataatccctacttttgtaagactaaaaagggacctccacttgatgggactgaatgtgctgctggaaaatggtgctataagggtcattgcatgtggaagaatgctaatcagcaaaaacaagatggcaattgggggtcatggactaaatttggctcctgttctcggacatgtggaactggtgttcgtttcagaacacgccagtgcaataatcccatgcccatcaatggtggtcaggattgtcctggtgttaattttgagtaccagctttgtaacacagaagaatgccaaaaacactttgaggacttcagagcacagcagtgtcagcagcgaaactcccactttgaataccagaataccaaacaccactggttgccatatgaacatcctgaccccaagaaaagatgccacctttactgtcagtccaaggagactggagatgttgcttacatgaaacaactggtgcatgatggaacgcactgttcttacaaagatccatatagcatatgtgtgcgaggagagtgtgtgaaagtgggctgtgataaagaaattggttctaataaggttgaggataagtgtggtgtctgtggaggagataattcccactgccgaaccgtgaaggggacatttaccagaactcccaggaagcttgggtaccttaagatgtttgatataccccctggggctagacatgtgttaatccaagaagacgaggcttctcctcatattcttgctattaagaaccaggctacaggccattatattttaaatggcaaaggggaggaagccaagtcgcggaccttcatagatcttggtgtggagtgggattataacattgaagatgacattgaaagtcttcacaccgatggacctttacatgatcctgttattgttttgattatacctcaagaaaatgatacccgctctagcctgacatataagtacatcatccatgaagactctgtacctacaatcaacagcaacaatgtcatccaggaagaattagatacttttgagtgggctttgaagagctggtctcagtgttccaaaccctgtggtggaggtttccagtacactaaatatggatgccgtaggaaaagtgataataaaatggtccatcgcagcttctgtgaggccaacaaaaagccgaaacctattagacgaatgtgcaatattcaagagtgtacacatccactctgggtagcagaagaatgggaacactgcaccaaaacctgtggaagttctggctatcagcttcgcactgtacgctgccttcagccactccttgatggcaccaaccgctctgtgcacagcaaatactgcatgggtgaccgtcccgagagccgccggccctgtaacagagtgccctgccctgcacagtggaaaacaggaccctggagtgagtgttcagtgacctgcggtgaaggaacggaggtgaggcaggtcctctgcagggctggggaccactgtgatggtgaaaagcctgagtcggtcagagcctgtcaactgcctccttgtaatgatgaaccatgtttgggagacaagtccatattctgtcaaatggaagtgttggcacgatactgctccataccaggttataacaagttatgttgtgagtcctgcagcaagcgcagtagcaccctgccaccaccataccttctagaagctgctgaaactcatgatgatgtcatctctaaccctagtgacctccctagatctctagtgatgcctacatctttggttccttatcattcagagacccctgcaaagaagatgtctttgagtagcatctcttcagtgggaggtccaaatgcatatgctgctttcaggccaaacagtaaacctgatggtgctaatttacgccagaggagtgctcagcaagcaggaagtaagactgtgagactggtcaccgtaccatcctccccacccaccaagagggtccacctcagttcagcttcacaaatggctgctgcttccttctttgcagccagtgattcaataggtgcttcttctcaggcaagaacctcaaagaaagatggaaagatcattgacaacagacgtccgacaagatcatccaccttagaaagatgagaaagtgaaccaaaaaggctagaaaccagaggaaaacctggacaacctctctcttcccatggtgcatatgcttgtttaaagtggaaatctctatagatcgtcagctcattttatctgtaattggaagaacagaaagtgctggctcactttctagttgctttcatcctccttttgttctgcattgactcatttaccagaattcattggaagaaatcaccaaagattattacaaaagaaaaatatgttgctaagattgtgttggtcgctctctgaagcagaaaagggactggaaccaattgtgcatatcagctgactttttgtttgttttagaaaagttacagtaaaaattaaaaagagataccaatggtttacactttaacaagaaattttggatatggaacaaagaattcttagacttgtattcctatttatctatattagaaatattgtatgagcaaatttgcagctgttgtgtaaatactgtatattgcaaaaatcagtattattttaagagatgtgttctcaaatgattgtttactatattacatttctggatgttctaggtgcctgtcgttgagtattgccttgtttgacattctataggttaattttcaaagcagagtattacaaaagagaagttagaattacagctactgacaatataaagggttttgttgaatcaacaatgtgatacgtaaattatagaaaaagaaaagaaacacaaaagctatagatatacagatatcagcttacctattgccttctatacttataatttaaaggattggtgtcttagtacacttgtggtcacagggatcaacgaatagtaaataatgaactcgtgcaagacaaaactgaaaccctctttccaggacctcagtaggcaccgttgaggtgtcctttgtttttgtgtgtgtgtgttcttttttaattttcgcattgttgacagatacaaacagttatactcaatgtactgtaataatcgcaaaggaaaaagttttgggataacttatttgtatgttggtagctgagaaaaatatcatcagtctagaattgatatttgagtatagtagagctttggggctttgaaggcaggttcaagaaagcatatgtcgatggttgagatatttattttccatatggttcatgttcaaatgttcacaaccacaatgcatctgactgcaataatgtgctaataatttatgtcagtagtcaccttgctcacagcaaagccagaaatgctctctccagggagtagatgtaaagtacttgtacatagaattcagaactgaagatatttattaaaagttgattttttttcttgatagtatttttatgtactaaatatttacactaatatcaattacatattttggtaaactagagagacataattagagatgcatgctttgttctgtgcatagagacctttaagcaaactactacagccaactcaaaagctaaaactgaacaaatttgatgttatgcaaacatcttgcatttttagtagttgatattaagttgatgacttgtttcccttcaaggaaacattaaattgtatggactcagctagctgttcaatgaaattgtgaattagaaacatttttaaaagtttttgaaagagataagtgcatcatgaattacatgtacatgagaggagatagtgatatcagcataatgattttgaggtcagtacctgagctgtctaaaaatatattatacaaactaaaatgtagatgaattaacctctcaaagcacagaatgtgcaagaacttttgcattttaatcgttgtaaactaacagcttaaactattgactctatacctctaaagaattgctgctactttgtgcaagaactttgaaggtcaaattaggcaaattccagatagtaaaacaatccctaagccttaagtcttttttttttcctaaaaattcccatagaataaaattctctctagtttacttgtgtgtgcatacatctcatccacaggggaagataaagatggtcacacaaacagtttccataaagatgtacatattcattatacttctgacctttgggctttcttttctactaagctaaaaattcctttttatcaaagtgtacactactgatgctgtttgttgtactgagagcacgtaccaataaaaatgttaacaaaatata

SEQ ID NO: 1008 - DNA, 1961 bp, Homo sapiens
  source 1..1961: mol_type = unassigned DNA
ggagaacccacagggagacccacagacacatatgcacgagagagacagaggaggaaagagacagagacaaaggcacagcggaagaaggcagagacagggcaggcacagaagcggcccagacagagtcctacagagggagaggccagagaagctgcagaagacacaggcagggagagacaaagatccaggaaaggagggctcaggaggagagtttggagaagccagacccctgggcacctctcccaagcccaaggactaagttttctccatttcctttaacggtcctcagcccttctgaaaactttgcctctgaccttggcaggagtccaagcccccaggctacagagaggagctttccaaagctagggtgtggaggacttggtgccctagacggcctcagtccctcccagctgcagtaccagtgccatgtcccagacaggctcgcatcccgggaggggcttggcagggcgctggctgtggggagcccaaccctgcctcctgctccccattgtgccgctctcctggctggtgtggctgcttctgctactgctggcctctctcctgccctcagcccggctggccagccccctcccccgggaggaggagatcgtgtttccagagaagctcaacggcagcgtcctgcctggctcgggcgcccctgccaggctgttgtgccgcttgcaggcctttggggagacgctgctactagagctggagcaggactccggtgtgcaggtcgaggggctgacagtgcagtacctgggccaggcgcctgagctgctgggtggagcagagcctggcacctacctgactggcaccatcaatggagatccggagtcggtggcatctctgcactgggatgggggagccctgttaggcgtgttacaatatcggggggctgaactccacctccagcccctggagggaggcacccctaactctgctgggggacctggggctcacatcctacgccggaagagtcctgccagcggtcaaggtcccatgtgcaacgtcaaggctcctcttggaagccccagccccagaccccgaagagccaagcgctttgcttcactgagtagatttgtggagacactggtggtggcagatgacaagatggccgcattccacggtgcggggctaaagcgctacctgctaacagtgatggcagcagcagccaaggccttcaagcacccaagcatccgcaatcctgtcagcttggtggtgactcggctagtgatcctggggtcaggcgaggaggggccccaagtggggcccagtgctgcccagaccctgcgcagcttctgtgcctggcagcggggcctcaacacccctgaggactcggaccctgaccactttgacacagccattctgtttacccgtcaggtgaggccccagtcagcaccgcaggccatgcactgcacaattctaagaagcgccactacatagactatgatgcaaatgatgttcctggagttgtgtgacatggtgccttgccccagccacactgccatgtgtggctacctaggccctgacagtgctgggtcctcagtgcccaggtccccgggaatctggatctcaacccaatggacccaggtgtcttggctgtctatgcaccttctatgatccctctccacaggacctgtgtggagtctccacttgcgacacgctgggtatggctgatgtgggcaccgtctgtgacccggctcggagctgtgccattgtggaggatgatgggctccagtcagccttcactgctgctcatgaactgggtaaagtaggggtggatgagaaaggtattagggaggagaaggtgggggagggggtagcaagttcaccacagtgttaatgggggtcccaaggtattcttcccccaggcctaggtatagggctattactcctctctgctccaggtgtagacatacatttacatttttctattaaataaattagttggtcgaaac

SEQ ID NO: 1009 - DNA, 4333 bp, Homo sapiens
  source 1..4333: mol_type = unassigned DNA
tggggagaacccacagggagacccacagacacatatgcacgagagagacagaggaggaaagagacagagacaaaggcacagcggaagaaggcagagacagggcaggcacagaagcggcccagacagagtcctacagagggagaggccagagaagctgcagaagacacaggcagggagagacaaagatccaggaaaggagggctcaggaggagagtttggagaagccagacccctgggcacctctcccaagcccaaggactaagttttctccatttcctttaacggtcctcagcccttctgaaaactttgcctctgaccttggcaggagtccaagcccccaggctacagagaggagctttccaaagctagggtgtggaggacttggtgccctagacggcctcagtccctcccagctgcagtaccagtgccatgtcccagacaggctcgcatcccgggaggggcttggcagggcgctggctgtggggagcccaaccctgcctcctgctccccattgtgccgctctcctggctggtgtggctgcttctgctactgctggcctctctcctgccctcagcccggctggccagccccctcccccgggaggaggagatcgtgtttccagagaagctcaacggcagcgtcctgcctggctcgggcgcccctgccaggctgttgtgccgcttgcaggcctttggggagacgctgctactagagctggagcaggactccggtgtgcaggtcgaggggctgacagtgcagtacctgggccaggcgcctgagctgctgggtggagcagagcctggcacctacctgactggcaccatcaatggagatccggagtcggtggcatctctgcactgggatgggggagccctgttaggcgtgttacaatatcggggggctgaactccacctccagcccctggagggaggcacccctaactctgctgggggacctggggctcacatcctacgccggaagagtcctgccagcggtcaaggtcccatgtgcaacgtcaaggctcctcttggaagccccagccccagaccccgaagagccaagcgctttgcttcactgagtagatttgtggagacactggtggtggcagatgacaagatggccgcattccacggtgcggggctaaagcgctacctgctaacagtgatggcagcagcagccaaggccttcaagcacccaagcatccgcaatcctgtcagcttggtggtgactcggctagtgatcctggggtcaggcgaggaggggccccaagtggggcccagtgctgcccagaccctgcgcagcttctgtgcctggcagcggggcctcaacacccctgaggactcggaccctgaccactttgacacagccattctgtttacccgtcaggacctgtgtggagtctccacttgcgacacgctgggtatggctgatgtgggcaccgtctgtgacccggctcggagctgtgccattgtggaggatgatgggctccagtcagccttcactgctgctcatgaactgggtcatgtcttcaacatgctccatgacaactccaagccatgcatcagtttgaatgggcctttgagcacctctcgccatgtcatggcccctgtgatggctcatgtggatcctgaggagccctggtccccctgcagtgcccgcttcatcactgacttcctggacaatggctatgggcactgtctcttagacaaaccagaggctccattgcatctgcctgtgactttccctggcaaggactatgatgctgaccgccagtgccagctgaccttcgggcccgactcacgccattgtccacagctgccgccgccctgtgctgccctctggtgctctggccacctcaatggccatgccatgtgccagaccaaacactcgccctgggccgatggcacaccctgcgggcccgcacaggcctgcatgggtggtcgctgcctccacatggaccagctccaggacttcaatattccacaggctggtggctggggtccttggggaccatggggtgactgctctcggacctgtgggggtggtgtccagttctcctcccgagactgcacgaggcctgtcccccggaatggtggcaagtactgtgagggccgccgtacccgcttccgctcctgcaacactgaggactgcccaactggctcagccctgaccttccgcgaggagcagtgtgctgcctacaaccaccgcaccgacctcttcaagagcttcccagggcccatggactgggttcctcgctacacaggcgtggccccccaggaccagtgcaaactcacctgccaggcccaggcactgggctactactatgtgctggagccacgggtggtagatgggaccccctgttccccggacagctcctcggtctgtgtccagggccgatgcatccatgctggctgtgatcgcatcattggctccaagaagaagtttgacaagtgcatggtgtgcggaggggacggttctggttgcagcaagcagtcaggctccttcaggaaattcaggtacggatacaacaatgtggtcactatccccgcgggggccacccacattcttgtccggcagcagggaaaccctggccaccggagcatctacttggccctgaagctgccagatggctcctatgccctcaatggtgaatacacgctgatgccctcccccacagatgtggtactgcctggggcagtcagcttgcgctacagcggggccactgcagcctcagagacactgtcaggccatgggccactggcccagcctttgacactgcaagtcctagtggctggcaacccccaggacacacgcctccgatacagcttcttcgtgccccggccgaccccttcaacgccacgccccactccccaggactggctgcaccgaagagcacagattctggagatccttcggcggcgcccctgggcgggcaggaaataacctcactatcccggctgccctttctgggcaccggggcctcggacttagctgggagaaagagagagcttctgttgctgcctcatgctaagactcagtggggaggggctgtgggcgtgagacctgcccctcctctctgccctaatgcgcaggctggccctgccctggtttcctgccctgggaggcagtgatgggttagtggatggaaggggctgacagacagccctccatctaaactgccccctctgccctgcgggtcacaggagggagggggaaggcagggagggcctgggccccagttgtatttatttagtatttattcacttttatttagcaccagggaaggggacaaggactagggtcctggggaacctgacccctgacccctcatagccctcaccctggggctaggaaatccagggtggtggtgataggtataagtggtgtgtgtatgcgtgtgtgtgtgtgtgaaaatgtgtgtgtgcttatgtatgaggtacaacctgttctgctttcctcttcctgaattttattttttgggaaaagaaaagtcaagggtagggtgggccttcagggagtgagggattatctttttttttttttctttctttctttcttttttttttttgagacagaatctcgctctgtcgcccaggctggagtgcaatggcacaatctcggctcactgcatcctccgcctcccgggttcaagtgattctcatgcctcagcctcctgagtagctgggattacaggctcctgccaccacgcccggctaatttttgttttgttttgtttggagacagagtctcgctattgtcaccagggctggaatgatttcagctcactgcaaccttcgccacctgggttccagcaattctcctgcctcagcctcccgagtagctgagattataggcacctaccaccacgcccggctaatttttgtatttttagtagagacggggtttcaccatgttggccaggctggtctcgaactcctgaccttaggtgatccactcgccttcatctcccaaagtgctgggattacaggcgtgagccaccgtgcctggccacgcccaactaatttttgtatttttagtagagacagggtttcaccatgttggccaggctgctcttgaactcctgacctcaggtaatcgacctgcctcggcctcccaaagtgctgggattacaggtgtgagccaccacgcccggtacatattttttaaattgaattctactatttatgtgatccttttggagtcagacagatgtggttgcatcctaactccatgtctctgagcattagatttctcatttgccaataataatacctcccttagaagtttgttgtgaggattaaataatgtaaataaagaactagcataacactca

SEQ ID NO: 1010 - DNA, 9056 bp, Homo sapiens
  source 1..9056: mol_type = unassigned DNA
cttgactcaatcctgcaagcaagtgtgtgtgtgtccccatcccccgccccgttaacttcatagcaaataacaaatacccataaagtcccagtcgcgcagcccctccccgcgggcagcgcactatgctgctcgggtgggcgtccctgctgctgtgcgcgttccgcctgcccctggccgcggtcggccccgccgcgacacctgcccaggataaagccgggcagcctccgactgctgcagcagccgcccagccccgccggcggcagggggaggaggtgcaggagcgagccgagcctcccggccacccgcaccccctggcgcagcggcgcaggagcaaggggctggtgcagaacatcgaccaactctactccggcggcggcaaggtgggctacctcgtctacgcgggcggccggaggttcctcttggacctggagcgagatggttcggtgggcattgctggcttcgtgcccgcaggaggcgggacgagtgcgccctggcgccaccggagccactgcttctatcggggcacagtggacggtagtccccgctctctggctgtctttgacctctgtgggggtctcgacggcttcttcgcggtcaagcacgcgcgctacaccctaaagccactgctgcgcggaccctgggcggaggaagaaaaggggcgcgtgtacggggatgggtccgcacggatcctgcacgtctacacccgcgagggcttcagcttcgaggccctgccgccgcgcgccagctgcgaaacccccgcgtccacaccggaggcccacgagcatgctccggcgcacagcaacccgagcggacgcgcagcactggcctcgcagctcttggaccagtccgctctctcgcccgctgggggctcaggaccgcagacgtggtggcggcggcggcgccgctccatctcccgggcccgccaggtggagctgcttctggtggctgacgcgtccatggcgcggttgtatggccggggcctgcagcattacctgctgaccctggcctccatcgccaataggctgtacagccatgctagcatcgagaaccacatccgcctggccgtggtgaaggtggtggtgctaggcgacaaggacaagagcctggaagtgagcaagaacgctgccaccacactcaagaacttttgcaagtggcagcaccaacacaaccagctgggagatgaccatgaggagcactacgatgcagctatcctgtttactcgggaggatttatgtgggcatcattcatgtgacaccctgggaatggcagacgttgggaccatatgttctccagagcgcagctgtgctgtgattgaagacgatggcctccacgcagccttcactgtggctcacgaaatcggacatttacttggcctctcccatgacgattccaaattctgtgaagagacctttggttccacagaagataagcgcttaatgtcttccatccttaccagcattgatgcatctaagccctggtccaaatgcacttcagccaccatcacagaattcctggatgatggccatggtaactgtttgctggacctaccacgaaagcagatcctgggccccgaagaactcccaggacagacctacgatgccacccagcagtgcaacctgacattcgggcctgagtactccgtgtgtcccggcatggatgtctgtgctcgcctgtggtgtgctgtggtacgccagggccagatggtctgtctgaccaagaagctgcctgcggtggaagggacgccttgtggaaaggggagaatctgcctgcagggcaaatgtgtggacaaaaccaagaaaaaatattattcaacgtcaagccatggcaactggggatcttggggatcctggggccagtgttctcgctcatgtggaggaggagtgcagtttgcctatcgtcactgtaataaccctgctcccagaaacaacggacgctactgcacagggaagagggccatctaccgctcctgcagtctcatgccctgcccacccaatggtaaatcatttcgtcatgaacagtgtgaggccaaaaatggctatcagtctgatgcaaaaggagtcaaaacttttgtggaatgggttcccaaatatgcaggtgtcctgccagcggatgtgtgcaagctgacctgcagagccaagggcactggctactatgtggtattttctccaaaggtgaccgatggcactgaatgtaggctgtacagtaattccgtctgcgtccgggggaagtgtgtgagaactggctgtgacggcatcattggctcaaagctgcagtatgacaagtgcggagtatgtggaggagacaactccagctgtacaaagattgttggaacctttaataagaaaagtaagggttacactgacgtggtgaggattcctgaaggggcaacccacataaaagttcgacagttcaaagccaaagaccagactagattcactgcctatttagccctgaaaaagaaaaacggtgagtaccttatcaatggaaagtacatgatctccacttcagagactatcattgacatcaatggaacagtcatgaactatagcggttggagccacagggatgacttcctgcatggcatgggctactctgccacgaaggaaattctaatagtgcagattcttgcaacagaccccactaaaccattagatgtccgttatagcttttttgttcccaagaagtccactccaaaagtaaactctgtcactagtcatggcagcaataaagtgggatcacacacttcgcagccgcagtgggtcacgggcccatggctcgcctgctctaggacctgtgacacaggttggcacaccagaacggtgcagtgccaggatggaaaccggaagttagcaaaaggatgtcctctctcccaaaggccttctgcgtttaagcaatgcttgttgaagaaatgttagcctgtggttatgatcttatgcacaaagataactggaggattcagcactgatgcagtcgtggtgaacaggaggtctacctaacgcacagaaagtcatgcttcagtgacattgtcaacaggagtccaattatgggcagaatctgctctctgtgaccaaaagaggatgtgcactgcttcacgtgacagtggtgaccttgcaatatagaaaaacttgggagttattgaacatcccctgggcttacaagaaacactgatgaatgtaaaatcaggggacatttgaagatggcagaactgtctcccccttgtcacctacctctgatagaatgtctttaatggtatcataatcattttcacccataatacacagtagcttcttcttactgtttgtaaatacattctcccttggtatgtcactttatatcccctggttctattaaaatatccatatatatttctataaaaaaagtgtttgaccaaagtaggtctgcagctatttcaacttccttccgtttccagaaagagctgtggatattttactggaaattaagaacttgctgctgttttaataagatgtagtatattttctgactacaggagataaaatttcagtcaaaaaaccattttgacagcaagtatcttctgagaaattttgaaaagtaaatagatctcagtgtatctagtcacttaaatacatacacgggttcatttacttaaacctttgactgcctgtatttttttcaggtagctagccaaattaatgcataatttcagatgtagaagtagggtttgcgtgtgtgtgtgtgatcatactcaagagtctaaaaactagtttccttgtgttggaaatttaaaaggaaaaaaatcgtatttcactgtgttttcaatttatattttcacaactactttctctctccagagctttcatctgatatctcacaatgtatgatatacgtacaaaacacacagcaagttttctatcatgtccaacacattcaacactggtatacctcctaccagcaagcctttaaaatgcatttgtgtttgcttatttgttttgttcaagggttcagtaagacctacaatgttttgtatttcttgacttattttattagaaacattaaagatcacttggtagttagccacattgagaagtggttatcattgttaatgtggttaatgccaaaaagtggttaatattaataagactgtttccacaccataggcaataatttcttaatttaaaaaatctaagtatattcctattgtactaaatatttttcccaactggaaagcacttgattgtacccgtaagtgtttgagtgatgacatgtgatgattttcagaaagttgttgtttttgtttccatagcctgtttaagtaggttgtaagtttgaatagttagacatggaaattattttataagcacacacctaaagatatctttttagatgataaaatgtacacccccccatcaccaacctcacaacttagaaaatctaagttgtttgatttctttgggatttcttttgttgtgaaacactgcaaagccaatttttctttataaaaattcatagtaatcctgccaaatgtgcctattgttaaagatttgcatgtgaagatcttagggaaccactgtttgagttctacaagctcatgagagtttatttttattataagatgtttttaatataaaagaattatgtaactgatcactatattacatcatttcagtgggccaggaaaatagatgtcttgctgttttcagtattttcttaagaaattgcttttaaaacaaataattgttttacaaaaccaataattatcctttgaattttcatagactgactttgcttttgacgtagaaattttttttctcaataaattatcactttgagaaatgaggcctgtacaaggctgataacctatatgtgatggagatcacccaatgccaagggcagaaagcaaacctagttaaataggtgagaaaaaaaataataatcccagtgccatttgtctgtgcaaagagaattaggagagaggttaatgttacttttttccattttggaaataattttaatcaagtaactcaaatgtgacaaaatttatttttattttttgtggttatattcccaacaacattaaaaaatactcgaggcataaatgtagttgtctcctactctgcttctcttactatactcatacatttttaatatggtttatcaatgattcatgtttccctcaaatagtgatggtttacacctgtcatggaaacaatcctagagagctcagagcaattaaaccactattccatgcttttaagtagttttctccacctttttcttatgagtctcactagattgactgaggaatgtatgtctaaattcctggagaagatgatatggattggaaactgaaattcagagaaatggagtgttcaatagataccacgaattgtgaacaaagggaaaattctatacaactcaatctaagtcagtccactttgacttcgtactgtctttcacctttccattgttgcatcttgaattttttaaaatgtctagaattcaggatgctaggggctacttctttaaaaaaaaaaaaaaaaaagaattcgtctgaaaatgctcaggtttgtaagaatctaatctcacttacataactaagcactccataataagttttattaagtacaaagggagccagaaaaaatgacatttatttcttctagatcagaaaaatttaaattaagccctgccttgctgtttagaaatatgtgggcattgttataatttattcaataaatttatgttcctttgccttcctgtggaaacagttttatcccactaaactaggaattaggggataaatcacaaacaaaaaaaaagttgcagcactgaaaaaaagtaatttattgtttttgcaactggtatgtgaatttgtgtgataaaattatttattcttatttaacaaaaatatgttcaaatttttctatatttaaaatgttttgctgttgtcctactttttaatttatgcttcatgtttgtgtataaagtacacttttacactttgtgagtttacataatatacagcactggttgcttttgtatttttttacagaaagctttctgtgtgaagcaggtgtatatgtatatattcctcatgtattcttattctgatactatcatttttctttccaaggaaattttaatctgtcatgaccaatagtgttcattacttgtgcctatgataataggttttttacatcacattaacactattttttccaagtcacaaataagaaaaacacttattcaatgaaacaaggtgcaagttttaaatttgggtacacaaatagcctagaagcttcctacagacgctaagacacagccaataatcagatcctttcacttcatcgagaaacttggacaagtcgatattgatgtattagatgaaagttgtctacacacaacttctgagggatacaaacgataataaaaccaaatgttgtctgtttctcctttagaaacacctcctaaaattaatatcatttagtctctagtgtctgtaggattctacagatgagcacaaatagattgggtttgtataacaaatgctaatagtcataactgtttctacaaatatggggtgtccattaagagaatgtgatgttttcctactgctgttgaatcccatggggtgattataggacttgaaataggcagagtcacctctgatgacatcagcttgcctctgtgatttcacagtctgatcctggcaacaagacaaagcacccttggacacacagccaatctctggttgtgatatttccccattgattccttccttgttaacaaggtcattttaatggttcaggtgaggacagcagccagattcaaagtccagaatttgtgctgttacatagagttcacactgtcaaataacattgaatttaataatgatcaaatttttctagtagtctttggcagagtgtataatctcattggcatgattggtgaatattactaatctctttataatgaaagatgctttacaaataccttatatttgctaacatttcaaaactactaaataaatgaaatagccatgtgtacagaaatggtcatttaaagctttaatagaaccaaattcaagacaatgtatcatttagacacacagaaaaggaacttgtatgttttccctattatttttctcatttgccaacaatctatagttttaggttatcaaacagatagatcaacttaactggctagtacattgaaaaatcttcctaagaatcctttgttagcataatctatagagataatttctcaaattatatcatcatgatgcatataaactctataatgtataattgtgtttcatttatttaatgtatgagaacatattgaaatacaaaaccatgcattagccaaaaaattggaatacaggtagtgttcagatcagcaaaacattcagtctggtaaatgcctgcctggggctatgatatcattctcaatgcaggttttatggaaaaactaaaagaatatgttgttagatgatgttggttttgaaaaaaaaaagacattaacatacacattagttagcccagttaattgcattctactaatatagttgcacattagcaataattttgctgtctctggtctttattttgtggcttcaactaactggaccatgtggactgtaaaggtcaaatggaaaaaacgagcagtggcccctcatcctgtaaggtactgctacatcagagtgacctaaaagtctaacactgtgaggaaaactgtgatttgtaggaaaaaaaaaaaaaacaaataaaaaacagggcatgctttttaatttttttccactttcctttggcacacccaatgaacaattctaatttttattgaggtgctaacatctttcgtgaccgactgtcaaatgtggtatttttgagttactatttttctacatgattttacagtttgcaagaaagacctctaagctttgtgtcacggtagggcacaacttgatactcaaaatttgaaaaataagcacatccaatgattgttttgaccaacagtggtcagtgacgtaaactgcatgtgcatctgaggacatttaaggggtcattaaaatttgaggagcatcaggccggagtagcagacttttagatgagtcatatttcagcattcactaagtcctcagcattccattcaaactgtcgtgtatatttggcctgattttttttcaagctttgcaataatttatgttattggtaaacacttggtgactatatctcagccttttctttaacaactcacaatatattagaaacacgtctacctatactgagagtatatttacaatagaagaacatactgtatgtgactttgtaaagctagacttttgattaagaaatatataatctctggatgctatttttgcattatacactcaggcacaacgtaaaccttgatggctcatcttgctacaattacgagttgaaaaacactacttacgtatttgtatgacctattagtcagaggaaatcatacatatgctttgtaaatagactttgcagataactaaatagactgaagaaatatgttgcatttgatagaagcaattgcataaatatttggtttctatattagagtctgtgagtaaagtcaagtaataaacctaagtaggtataacagatttttaaaccttgaaacttgctttgatggtagagaaaatcattgaagatttacatactgtatataagatgtaaaatgtacgctgcttattaccctcaattttccagaagcaatggtatataatgcagttgaaaaaccaaaaatcttggaaaactaagacgggtcttgtttaaaatgtctctcagctttggcaaccttcaaatcttaatcaactatttaaagcattactgtgtcttgtagcctgcattccacaacagctctgttattcaggtaaaagacttgaactgagccgtttgggacctatactgtaatattttcattgaggaacaatatcctattttgtaaagcatttccctatgtgtgactttaaactgtaaaattaaacactgcttttgtgggttcagtgggcataataaatataaattgtaaactaggttaaagta

SEQ ID NO: 1011 - DNA, 3391 bp, Homo sapiens
  source 1..3391: mol_type = unassigned DNA
gctgcaattcaagttggctgggggccggtagtgagatctagggctacttcaacaaaactttgctgcccttcctgctcctcttgtcttcttttctcctgataccttttgatgctctgcacatgttatttgcatagcaaaggcactaagctttccaggaagagagggcaccacttccacccccaataagtcttttttcccgtcttttctttcttttcctttccttttttggggggtggggagggagagaaagggggtttgcaaaggcagcatctcagagtgatagcctagatgtattgaaggcatctcttattctgccaaatcggaaagtcagttctctaaagcccgggttagccagaccatagggttttattctggctgcagaataactggctggtgtggctttgcaaaggggggcaaaaaataaaaaaataaaaaaaattaaaaaaagttagagaggagagggagtacgtgagtcgtccagtgcaatctctattgtctgaaacttactttttatcagaatttgaagatgaaaacggttaaaaaatggccatactttagtaactaatcagcctaatgctttgcttatgaaaacttttaccatcattatttttttcattttggattgagaaaatgaatccagatatagaagaaagtgcaggatgttggataaaagtggctcttaaacagtggaacatccaataactaatttgcaagaagttttaaagaaataaaattgttatgcttcgattttggtatggtattgactctttagcacataggtagccctcaaaaaaatcatccagttttctaaattatggaaattttgtggaagacgttgacctggattttgagcctcatcatggcttcatcggaatttcatagtgaccacaggctttcatacagttctcaagaggaattcctgacttatcttgaacactaccagctaactattccaataagggttgatcaaaatggagcatttctcagctttactgtgaaaaatgataaacactcaaggagaagacggagtatggaccctattgatccacagcaggcagtatctaagttattttttaaactttcagcctatggcaagcactttcatctaaacttgactctcaacacagattttgtgtccaaacattttacagtagaatattgggggaaagatggaccccagtggaaacatgattttttagacaactgtcattacacaggatatttgcaagatcaacgtagtacaactaaagtggctttaagcaactgtgttgggttgcatggtgttattgctacagaagatgaagagtattttatcgaacctttaaagaataccacagaggattccaagcattttagttatgaaaatggccaccctcatgttatttacaaaaagtctgcccttcaacaacgacatctgtatgatcactctcattgtggggtttcggatttcacaagaagtggcaaaccttggtggctgaatgacacatccactgtttcttattcactaccaattaacaacacacatatccaccacagacagaagagatcagtgagcattgaacggtttgtggagacattggtagtggcagacaaaatgatggtgggctaccatggccgcaaagacattgaacattacattttgagtgtgatgaatattgttgccaaactttaccgtgattccagcctaggaaacgttgtgaatattatagtggcccgcttaattgttctcacagaagatcagccaaacttggagataaaccaccatgcagacaagtccctcgatagcttctgtaaatggcagaaatccattctctcccaccaaagtgatggaaacaccattccagaaaatgggattgcccaccacgataatgcagttcttattactagatatgatatctgcacttataaaaataagccctgtggaacactgggcttggcctctgtggctggaatgtgtgagcctgaaaggagctgcagcattaatgaagacattggcctgggttcagcttttaccattgcacatgagattggtcacaattttggtatgaaccatgatggaattggaaattcttgtcgaaaggtcatgaagcagcaatatggcagctcacattactgcgaataccaatcctttttcctggtctgcttgcagtcgagactacatcaccagctttctagagaagtgtgtagagagctctggtgtctcagcaaaagcaaccgctgtgtcaccaacagtattccagcagctgaggggacactgtgtcaaactgggaatattgaaaaagggtggtgttatcagggagattgtgttccttttggcacttggccccagagcatagatgggggctggggtccctggtcactatggggagagtgcagcaggacctgcgggggaggcgtctcctcatccctaagacactgtgacagtccagcaccttcaggaggtggaaaatattgccttggggaaaggaaacggtatcgctcctgtaacacagatccatgccctttgggttcccgagattttcgagagaaacagtgtgcagactttgacaatatgcctttccgaggaaagtattataactggaaaccctatactggaggtggggtaaaaccttgtgcattaaactgcttggctgaaggttataatttctacactgaacgtgctcctgcggtgatcgatgggacccagtgcaatgcggattcactggatatctgcatcaatggagaatgcaagcacgtaggctgtgataatattttgggatctgatgctagggaagatagatgtcgagtctgtggaggggacggaagcacatgtgatgccattgaagggttcttcaatgattcactgcccaggggaggctacatggaagtggtgcagataccaagaggctctgttcacattgaagttagagaagttgccatgtcaaagaactatattgctttaaaatctgaaggagatgattactatattaatggtgcctggactattgactggcctaggaaatttgatgttgctgggacagcttttcattacaagagaccaactgatgaaccagaatccttggaagctctaggtcctacctcagaaaatctcatcgtcatggttctgcttcaagaacagaatttgggaattaggtataagttcaatgttcccatcactcgaactggcagtggagataatgaagttggctttacatggaatcatcagccttggtcagaatgctcagctacttgtgctggaggtaagatgcccactaggcagcccacccagagggcaagatggagaacaaaacacattctgagctatgctttgtgtttgttaaaaaagctaattggaaacatttcttgcaggtttgcttcaagctgtaatttagcaaaagaaactttgctttaa

SEQ ID NO: 1012 - DNA, 7311 bp, Homo sapiens
  source 1..7311: mol_type = unassigned DNA
agtgtgctctgcctccgaggaaaagctgccaaaattttctcctgctgcaattcaagttggctgggggccggtagtgagatctagggctacttcaacaaaactttgctgcccttcctgctcctcttgtcttcttttctcctgataccttttgatgctctgcacatgttatttgcatagcaaaggcactaagctttccaggaagagagggcaccacttccacccccaataagtcttttttcccgtcttttctttcttttcctttccttttttggggggtggggagggagagaaagggggtttgcaaaggcagcatctcagagtgatagcctagatgtattgaaggcatctcttattctgccaaatcggaaagtcagttctctaaagcccgggttagccagaccatagggttttattctggctgcagaataactggctggtgtggctttgcaaaggggggcaaaaaataaaaaaataaaaaaaattaaaaaaagttagagaggagagggagtacgtgagtcgtccagtgcaatctctattgtctgaaacttactttttatcagaatttgaagatgaaaacggttaaaaaatggccatactttagtaactaatcagcctaatgctttgcttatgaaaacttttaccatcattatttttttcattttggattgagaaaatgaatccagatatagaagaaagtgcaggatgttggataaaagtggctcttaaacagtggaacatccaataactaatttgcaagaagttttaaagaaataaaattgttatgcttcgattttggtatggtattgactctttagcacataggtagccctcaaaaaaatcatccagttttctaaattatggaaattttgtggaagacgttgacctggattttgagcctcatcatggcttcatcggaatttcatagtgaccacaggctttcatacagttctcaagaggaattcctgacttatcttgaacactaccagctaactattccaataagggttgatcaaaatggagcatttctcagctttactgtgaaaaatgataaacactcaaggagaagacggagtatggaccctattgatccacagcaggcagtatctaagttattttttaaactttcagcctatggcaagcactttcatctaaacttgactctcaacacagattttgtgtccaaacattttacagtagaatattgggggaaagatggaccccagtggaaacatgattttttagacaactgtcattacacaggatatttgcaagatcaacgtagtacaactaaagtggctttaagcaactgtgttgggttgcatggtgttattgctacagaagatgaagagtattttatcgaacctttaaagaataccacagaggattccaagcattttagttatgaaaatggccaccctcatgttatttacaaaaagtctgcccttcaacaacgacatctgtatgatcactctcattgtggggtttcggatttcacaagaagtggcaaaccttggtggctgaatgacacatccactgtttcttattcactaccaattaacaacacacatatccaccacagacagaagagatcagtgagcattgaacggtttgtggagacattggtagtggcagacaaaatgatggtgggctaccatggccgcaaagacattgaacattacattttgagtgtgatgaatattgttgccaaactttaccgtgattccagcctaggaaacgttgtgaatattatagtggcccgcttaattgttctcacagaagatcagccaaacttggagataaaccaccatgcagacaagtccctcgatagcttctgtaaatggcagaaatccattctctcccaccaaagtgatggaaacaccattccagaaaatgggattgcccaccacgataatgcagttcttattactagatatgatatctgcacttataaaaataagccctgtggaacactgggcttggcctctgtggctggaatgtgtgagcctgaaaggagctgcagcattaatgaagacattggcctgggttcagcttttaccattgcacatgagattggtcacaattttggtatgaaccatgatggaattggaaattcttgtgggacgaaaggtcatgaagcagcaaaacttatggcagctcacattactgcgaataccaatcctttttcctggtctgcttgcagtcgagactacatcaccagctttctagattcaggccgtggtacttgccttgataatgagcctcccaagcgtgactttctttatccagctgtggccccaggtcaggtgtatgatgctgatgagcaatgtcgtttccagtatggagcaacctcccgccaatgtaaatatggggaagtgtgtagagagctctggtgtctcagcaaaagcaaccgctgtgtcaccaacagtattccagcagctgaggggacactgtgtcaaactgggaatattgaaaaagggtggtgttatcagggagattgtgttccttttggcacttggccccagagcatagatgggggctggggtccctggtcactatggggagagtgcagcaggacctgcgggggaggcgtctcctcatccctaagacactgtgacagtccagcaccttcaggaggtggaaaatattgccttggggaaaggaaacggtatcgctcctgtaacacagatccatgccctttgggttcccgagattttcgagagaaacagtgtgcagactttgacaatatgcctttccgaggaaagtattataactggaaaccctatactggaggtggggtaaaaccttgtgcattaaactgcttggctgaaggttataatttctacactgaacgtgctcctgcggtgatcgatgggacccagtgcaatgcggattcactggatatctgcatcaatggagaatgcaagcacgtaggctgtgataatattttgggatctgatgctagggaagatagatgtcgagtctgtggaggggacggaagcacatgtgatgccattgaagggttcttcaatgattcactgcccaggggaggctacatggaagtggtgcagataccaagaggctctgttcacattgaagttagagaagttgccatgtcaaagaactatattgctttaaaatctgaaggagatgattactatattaatggtgcctggactattgactggcctaggaaatttgatgttgctgggacagcttttcattacaagagaccaactgatgaaccagaatccttggaagctctaggtcctacctcagaaaatctcatcgtcatggttctgcttcaagaacagaatttgggaattaggtataagttcaatgttcccatcactcgaactggcagtggagataatgaagttggctttacatggaatcatcagccttggtcagaatgctcagctacttgtgctggaggtgtccaaagacaggaggtggtctgtaaaaggttggatgacaactccattgtccagaacaattactgtgatcctgacagtaagccacctgaaaatcaaagagcctgcaacactgagccctgcccacctgagtggttcattggggattggttggaatgcagcaagacttgtgatggtgggatgcgcacaagggcagtgctctgcatcaggaagatcggaccttctgaggaggagacgctggactacagtggttgtttaacacaccggcctgtcgaaaaagagccctgcaacaaccagtcatgtccaccacagtgggtggctttggactggtctgagtgtactccaaaatgtggtccaggattcaagcatcggattgttctgtgcaagagcagtgacctttctaagacattcccagctgcacaatgtccagaggaaagcaaacctcctgtccgcatccgctgcagtttgggccgctgccctcctcctcgctgggtcacaggagactggggccagtgttctgctcagtgtggccttggacagcagatgagaactgtgcagtgtctctcctacaccggacaggcatctagtgactgtctagaaactgttcggcctccatcaatgcagcagtgtgaaagcaaatgtgacagtacccccatttctaatactgaagagtgcaaagatgtgaataaagtggcttattgcccactggtgctgaagttcaagttctgcagtcgagcatacttcagacagatgtgttgtaagacctgccaaggacactgacccacagaaagccagagagagtgccttgtcatttcatcatggaaatgcatccatcaaagagagccacccagaggaagaggattgatgtccttgcaaatgcattaccctgtggaaaacgtaaccactggtcagccctagctgacaaaatttcaatattattttagcttctgtgaagtgggatttattgatccaaagtgctggacacggtattaggagggaatgccagattggagagatccaaacaacacagggagacttgcttactgtggagcgtttgtgttctttcgagtaaatccaatagcctgtttacctccttggaccattaagataatttttattatggacttagcaatgacactgaatccatttgtatttaaaactgtttaaaatgtagctgttatgacttggtcaactatggaagtgaagaaggttcagaattcttaagtcatagcttaaaaatatttactgtactttatctcactacaacagcaccacaatttaaattataaaacgggctttgaactataatttaaggagcaattataaatcaaaagtaatgaaagtttgtattatttttcttcattccacttaatttccttaggaataatcccctggttctgaacactgctgtgagccatatataaaactatattaaactgaacaataatgaggggcatagtttaaagcagtgcatcagttactgcagctgtgcaagtctataaactcagtgctgaaagactgtggccaacttgccattgtgcaagtaaagctgagatttccattaaaactttaagagaaaaacatttcaatttcatgcagaaaccagacctggggtatggtacagaccaaaggaccaggccctttgctgccaccacacaggatgccttagttcttatttgagtccctccaactcacttgtgtttacatcctccccagccacagcacggcttctgccctttggattgctgcacgtgtgttgagcttactgagatgataccatgcaaaagatagactggctcggtaaccaggcagacccttttgcagtttgttgacaattacgatgagttccagatgtcccttctttgatatggtagaagggcatttatttatatgagagcaaatgtgtgtgtgtgtttgcgggcgcttttaagtgtgtggatagatgagtgtgcttgcacataatgtgctatttctgtgagttttaaagtaggcaagggataataaccaaagaagaaaatttcatgaagactagacatcataaagcataattttaatagtcactcaaccaagtattttttattttttatggatactctgaatggcaattaaatgtgaaacccagtttcttgggcaagtcaaattctggaatcacatccacctaaattaaaatgactagctcgtattttccccatcttcaagtttcacatcctggtcatcaaaagactcgacagcaagacttagaatgaaaaagggtacttgtttatattaatattttttacttgaacacgtgtagcttgcagcaggttcttgatgaatgtgctttgtgtccaaaatgcctccccattgtacacaggtgtacaccatgcatgcaccaacacctaaaactcaaaactaaatggctattttgtaaggttaatactttcagttaaacagcatgtttgacttgattccatcatggtgctcttaaattacatgtcagtgcatcacatatatcatgatctaatgcagatgactaggctttttccaaaaggaagacagaccctcagacaccaaaagccaatctaaacaactcccaggtttgctgtggacaatcagcatggaatgttttctgcactctcagtcatgaccatctgtatcttgttacctgctttctctctcaacaccacagttctcaaccctgagccttccagagagagctattgatgatacaagaggaatcaccagggcccggatctaagatgcccttagaagaccagcccaagtgccgtcttagccattcagtgaagggcaaacagcccatgggtagtatggcccgagcactgaattcccttgcgccttttcaaagaacagttaacttggtgctaatgtgccctggtgaaataaataaaagatgggcagtttctgtggcattttaggcataggtttgcaatccagatctgattttctccaacataaatatcagctcatgttcttatttcaaaaagatttcttattaccgactaaaagctattttttacctcacctggaaactaccattgtgagggccatcccccaggcactgcacagcaccttggctgatgctggaagaggagggcagtcagtgtcacttctgggatgtgccccagcactgagaacaaaatgcaggcatcccccggggcagcatcagagtgcctttctagagggagccacgcacagaatgtaacaggatgaaacagtttcaagtaagccttgaattgaaacctgagtaggttaaaacaattctatttcatagcacatcacaatactgctgctactctgtagccacccccatggctacatgatgccctattcctaaataataacaatagcattgtcagtggaggctgggccaccatggcagaccttccaaaagtagtgagctacatagactacttagggaaccccagggaaactggtaccctacacctgggagcagtatctgccactgggataaagtcctactaaaaaaggaacggtaaatgtaccctaatgattaaaccccgtgagatacatatgatttccaaatagtccatttcattaggaacttttttgtttgaatgaatgtcacataggtatcctcagtaacacagaacgaaattacctttgtattattgtgattagttgttgcttattattttatactcagtaataatgtggtacactgttaatttttttgcttttgtaaattatattctaatttattgccatgtttcctaacacttgtcctacattcattctcctgcttgtaatgaaaatgaaaaaatcattgtaacacttgatggagtgaaattccacgccaggcacagaatttttttgacatagataatttagtaaaataaaaattcagcttataataatgata

SEQ ID NO: 1013 - DNA, 2221 bp, Homo sapiens
  source 1..2221: mol_type = unassigned DNA
gctgcaattcaagttggctgggggccggtagtgagatctagggctacttcaacaaaactttgctgcccttcctgctcctcttgtcttcttttctcctgataccttttgatgctctgcacatgttatttgcatagcaaaggcactaagctttccaggaagagagggcaccacttccacccccaataagtcttttttcccgtcttttctttcttttcctttccttttttggggggtggggagggagagaaagggggtttgcaaaggcagcatctcagagtgatagcctagatgtattgaaggcatctcttattctgccaaatcggaaagtcagttctctaaagcccgggttagccagaccatagggttttattctggctgcagaataactggctggtgtggctttgcaaaggggggcaaaaaataaaaaaataaaaaaaattaaaaaaagttagagaggagagggagtacgtgagtcgtccagtgcaatctctattgtctgaaacttactttttatcagaatttgaagatgaaaacggttaaaaaatggccatactttagtaactaatcagcctaatgctttgcttatgaaaacttttaccatcattatttttttcattttggattgagaaaatgaatccagatatagaagaaagtgcaggatgttggataaaagtggctcttaaacagtggaacatccaataactaatttgcaagaagttttaaagaaataaaattgttatgcttcgattttggtatggtattgactctttagcacataggtagccctcaaaaaaatcatccagttttctaaattatggaaattttgtggaagacgttgacctggattttgagcctcatcatggcttcatcggaatttcatagtgaccacaggctttcatacagttctcaagaggaattcctgacttatcttgaacactaccagctaactattccaataagggttgatcaaaatggagcatttctcagctttactgtgaaaaatgataaacactcaaggagaagacggagtatggaccctattgatccacagcaggcagtatctaagttattttttaaactttcagcctatggcaagcactttcatctaaacttgactctcaacacagattttgtgtccaaacattttacagtagaatattgggggaaagatggaccccagtggaaacatgattttttagacaactgtcattacacaggatatttgcaagatcaacgtagtacaactaaagtggctttaagcaactgtgttgggttgcatggtgttattgctacagaagatgaagagtattttatcgaacctttaaagaataccacagaggattccaagcattttagttatgaaaatggccaccctcatgttatttacaaaaagtctgcccttcaacaacgacatctgtatgatcactctcattgtggggtttcggatttcacaagaagtggcaaaccttggtggctgaatgacacatccactgtttcttattcactaccaattaacaacacacatatccaccacagacagaagagatcagtgagcattgaacggtttgtggagacattggtagtggcagacaaaatgatggtgggctaccatggccgcaaagacattgaacattacattttgagtgtgatgaatattgttgccaaactttaccgtgattccagcctaggaaacgttgtgaatattatagtggcccgcttaattgttctcacagaagatcagccaaacttggagataaaccaccatgcagacaagtccctcgatagcttctgtaaatggcagaaatccattctctcccaccaaagtgatggaaacaccattccagaaaatgggattgcccaccacgataatgcagttcttattactagatatgatatctgcacttataaaaataagccctgtggaacactgggcttggcctctgtggctggaatgtgtgagcctgaaaggagctgcagcattaatgaagacattggcctgggttcagcttttaccattgcacatgagattggtcacaattttggtatgaaccatgatggaattggaaattcttgtgggacgaaaggtcatgaagcagcaaaacttatggcagctcacattactgcgaataccaatcctttttcctggtctgcttgcagtcgagactacatcaccagctttctagaatttcttaaactcggtgattcaataagtggttcatga

SEQ ID NO: 1014 - DNA, 5489 bp, Homo sapiens
  source 1..5489: mol_type = unassigned DNA
cttttctttgcctctgcagcggccaagggggcgggccctgcagcctttgttgcccgcggaccgagcgcagccgaacggagtcggggccgggtcgccgggagctgcacgccggccgggcatgtcctgagccggacctgggaccaggcagcgaccggacgggacggacgagagcgtgcgcgcggggtcacccggcggccgcccggttcctgccatgcccggcggccccagtccccgcagccccgcgcctttgctgcgccccctcctcctgctcctctgcgctctggctcccggcgcccccggacccgcaccaggacgtgcaaccgagggccgggcggcactggacatcgtgcacccggttcgagtcgacgcggggggctccttcctgtcctacgagctgtggccccgcgcactgcgcaagcgggatgtatctgtgcgccgagacgcgcccgccttctacgagctacaataccgcgggcgcgagctgcgcttcaacctgaccgccaatcagcacctgctggcgcccggctttgtgagcgagacgcggcggcgcggcggcctgggccgcgcgcacatccgggcccacaccccggcctgccacctgcttggcgaggtgcaggaccctgagctcgagggtggcctggcggccatcagcgcctgcgacggcctgaaaggtgtgttccagctctccaacgaggactacttcattgagcccctggacagtgccccggcccggcctggccacgcccagccccatgtggtgtacaagcgtcaggccccggagaggctggcacagcggggtgattccagtgctccaagcacctgtggagtgcaagtgtacccagagctggagtctcgacgggagcgttgggagcagcggcagcagtggcggcggccacggctgaggcgtctacaccagcggtcggtcagcaaagagaagtgggtggagaccctggtagtagctgatgccaaaatggtggagtaccacggacagccgcaggttgagagctatgtgctgaccatcatgaacatggtggctggcctgtttcatgaccccagcattgggaaccccatccacatcaccattgtgcgcctggtcctgctggaagatgaggaggaggacctaaagatcacgcaccatgcagacaacaccctgaagagcttctgcaagtggcagaaaagcatcaacatgaagggggatgcccatcccctgcaccatgacactgccatcctgctcaccagaaaggacctgtgtgcagccatgaaccggccctgtgagaccctgggactgtcccatgtggcgggcatgtgccagccgcaccgcagctgcagcatcaacgaggacacgggcctgccgctggccttcactgtagcccacgagctcgggcacagttttggcattcagcatgacggaagcggcaatgactgtgagcccgttgggaaacgacctttcatcatgtctccacagctcctgtacgacgccgctcccctcacctggtcccgctgcagccgccagtatatcaccaggttccttgaccgtgggtggggcctgtgcctggacgaccctcctgccaaggacattatcgacttcccctcggtgccacctggcgtcctctatgatgtaagccaccagtgccgcctccagtacggggcctactctgccttctgcgaggacatggataatgtctgccacacactctggtgctctgtggggaccacctgtcactccaagctggatgcagctgtggacggcacccggtgtggggagaataagtggtgtctcagtggggagtgcgtacccgtgggcttccggcccgaggccgtggatggtggctggtctggctggagcgcctggtccatctgctcacggagctgtggcatgggcgtacagagcgccgagcggcagtgcacgcagcctacgcccaaatacaaaggcagatactgtgtgggtgagcgcaagcgcttccgcctctgcaacctgcaggcctgccctgctggccgcccctccttccgccacgtccagtgcagccactttgacgctatgctctacaagggccagctgcacacatgggtgcccgtggtcaatgacgtgaacccctgcgagctgcactgccggcccgcgaatgagtactttgccgagaagctgcgggacgccgtggtcgatggcaccccctgctaccaggtccgagccagccgggacctctgcatcaacggcatctgtaagaacgtgggctgtgacttcgagattgactccggtgctatggaggaccgctgtggtgtgtgccacggcaacggctccacctgccacaccgtgagcgggaccttcgaggaggccgagggcctggggtatgtggatgtggggctgatcccagcgggcgcacgcgagatccgcatccaagaggttgccgaggctgccaacttcctggcactgcggagcgaggacccggagaagtacttcctcaatggtggctggaccatccagtggaacggggactaccaggtggcagggaccaccttcacatacgcacgcaggggcaactgggagaacctcacgtccccgggtcccaccaaggagcctgtctggatccagctgctgttccaggagagcaaccctggggtgcactacgagtacaccatccacagggaggcaggtggccacgacgaggtcccgccgcccgtgttctcctggcattatgggccctggaccaagtgcacagtcacctgcggcagaggtgtgcagaggcagaatgtgtactgcttggagcggcaggcagggcccgtggacgaggagcactgtgaccccctgggccggcctgatgaccaacagaggaagtgcagcgagcagccctgccctgccaggtggtgggcaggtgagtggcagctgtgctccagctcctgcgggcctgggggcctctcccgccgggccgtgctctgcatccgcagcgtggggctggatgagcagagcgccctggagccacccgcctgtgaacaccttccccggccccctactgaaaccccttgcaaccgccatgtaccctgtccggccacctgggctgtggggaactggtctcagtgctcagtgacatgtggggagggcactcagcgccgaaatgtcctctgcaccaatgacaccggtgtcccctgtgacgaggcccagcagccagccagcgaagtcacctgctctctgccactctgtcggtggcccctgggcacactgggccctgaaggctcaggcagcggctcctccagccacgagctcttcaacgaggctgacttcatcccgcaccacctggccccacgcccttcacccgcctcatcacccaagccaggcaccatgggcaacgccattgaggaggaggctccagagctggacctgccggggcccgtgtttgtggacgacttctactacgactacaatttcatcaatttccacgaggatctgtcctacgggccctctgaggagcccgatctagacctggcggggacaggggaccggacacccccaccacacagccatcctgctgcgccctccacgggtagccccgtgcctgccacagagcctcctgcagccaaggaggagggggtactgggaccttggtccccgagcccttggcctagccaggccggccgctccccacccccaccctcagagcagacccctgggaaccctttgatcaatttcctgcctgaggaagacacccccataggggccccagatcttgggctccccagcctgtcctggcccagggtttccactgatggcctgcagacacctgccacccctgagagccaaaatgatttcccagttggcaaggacagccagagccagctgccccctccatggcgggacaggaccaatgaggttttcaaggatgatgaggaacccaagggccgaggagcaccccacctgcccccgagacccagctccacgctgccccctttgtcccctgttggcagcacccactcctctcctagtcctgacgtggcggagctgtggacaggaggcacagtggcctgggagccagctctggagggtggcctggggcctgtggacagtgaactgtggcccactgttggggtggcttctctccttcctcctcccatagcccctctgccagagatgaaggtcagggacagttccctggagccggggactccctccttcccaaccccaggaccaggctcatgggacctgcagactgtggcagtgtgggggaccttcctccccacaaccctgactggcctcgggcacatgcctgagcctgccctgaacccaggacccaagggtcagcctgagtccctcagccctgaggtgcccctgagctctaggctgctgtccacaccagcttgggacagccccgccaacagccacagagtccctgagacccagccgctggctcccagcctggctgaagcggggccccccgcggacccgttggttgtcaggaacgccggctggcaagcgggaaactggagcgagtgctctaccacctgtggcctgggtgcggtctggaggccggtgcgctgtagctccggccgggatgaggactgcgcccccgctggccggccccagcctgcccgccgctgccacctgcggccctgtgccacctggcactcaggcaactggagtaagtgctcccgcagctgcggcggaggttcctcagtgcgggacgtgcagtgtgtggacacacgggacctccggccactgcggcccttccattgtcagcccgggcctgccaagccgcctgcgcaccggccctgcggggcccagccctgcctcagctggtacacatcttcctggagggagtgctccgaggcctgtggcggtggtgagcagcagcgtctagtgacctgcccggagccaggcctctgcgaggaggcgctgagacccaacaccacccggccctgcaacacccacccctgcacgcagtgggtggtggggccctggggccagtgctcaggcccctgtggtggtggtgtccagcggcgcctggtcaagtgtgtcaacacccagacagggctgcccgaggaagacagtgaccagtgtggccacgaggcctggcctgagagctcccggccgtgtggcaccgaggattgtgagcccgtcgagcctccccgctgtgagcgggaccgcctgtccttcgggttctgcgagacgctgcgcctactgggccgctgccagctgcccaccatccgcacccagtgctgccgctcgtgctctccgcccagccacggcgccccctcccgaggccatcagcgggttgcccgccgctgactgcgccaggatgcacagaccgaccgacagacctcagtgcccaccacgggctgtggcggagctcccgccccctgcgccctaatggtgctaaccccctctcactacccagcagcaggctggggacctcctccccctcaaaaaaggtatttttttattctaacagtttgtgtaacatttattatgattttacataaatgagcatctaccattccaaagc

SEQ ID NO: 1015 - DNA, 1758 bp, Homo sapiens
  source 1..1758: mol_type = unassigned DNA
tttctttctttctctccttctagctctcttgtcttttctttgcctctgcagcggccaagggggcgggccctgcagcctttgttgcccgcggaccgagcgcagccgaccggacgggacggacgagagcgtgcgcgcggggtcacccggcggccgcccggttcctgccatgcccggcggccccagtccccgcagccccgcgcctttgctgcgccccctcctcctgctcctctgcgctctggctcccggcgcccccggacccgcaccaggacgtgcaaccgagggccgggcggcactggacatcgtgcacccggttcgagtcgacgcggggggctccttcctgtcctacgagctgtggccccgcgcactgcgcaagcgggatgtatctgtgcgccgagacgcgcccgccttctacgagctacaataccgcgggcgcgagctgcgcttcaacctgaccgccaatcagcacctgctggcgcccggctttgtgagcgagacgcggcggcgcggcggcctgggccgcgcgcacatccgggcccacaccccggcctgccacctgcttggcgaggtgcaggaccctgagctcgagggtggcctggcggccatcagcgcctgcgacggcctgaaaggtgtgttccagctctccaacgaggactacttcattgagcccctggacagtgccccggcccggcctggccacgcccagccccatgtggtgtacaagcgtcaggccccggagaggctggcacagcggggtgattccagtgctccaagcacctgtggagtgcaagtgtacccagagctggagtctcgacgggagcgttgggagcagcggcagcagtggcggcggccacggctgaggcgtctacaccagcggtcggtcagcaaagagaagtgggtggagaccctggtagtagctgatgccaaaatggtggagtaccacggacagccgcaggttgagagctatgtgctgaccatcatgaacatggtggctggcctgtttcatgaccccagcattgggaaccccatccacatcaccattgtgcgcctggtcctgctggaagatgaggaggaggacctaaagatcacgcaccatgcagacaacaccctgaagagcttctgcaagtggcagaaaagcatcaacatgaagggggatgcccatcccctgcaccatgacactgccatcctgctcaccagaaaggacctgtgtgcagccatgaaccggccctgtgagaccctgggactgtcccatgtggcgggcatgtgccagccgcaccgcagctgcagcatcaacgaggacacgggcctgccgctggccttcactgtagcccacgagctcgggcacagctcctgtacgacgccgctcccctcacctggtcccgctgcagccgccagtatatcaccaggttccttgagtgtgcagaggcagaatgtgtactgcttggagcggcaggcagggcccgtggacgaggagcactgtgaccccctgggccggcctgatgaccaacagaggaagtgcagcgagcagccctgccctgccagtgctcagtgacatgtggggagggcactcagcgccgaaatgtcctctgcaccaatgacaccggtgtcccctgtgacgaggcccagcagccagccagcgaagtcacctgctctctgccactctgtcggtggcccctgggcacactgggccctgaaggctcaggcagcggctcctccagccacgagctcttcaacgaggctgacttcatcccgcaccacctg

SEQ ID NO: 1016 - DNA, 4010 bp, Homo sapiens
  source 1..4010: mol_type = unassigned DNA
acagggtcgctgagaccagtgcacgagcctcttcggaagatgcatcctggactcttggccgcagaggagaaagcggttggggtctcccagggactctttctaaagggtcagtccagcatggtaggggttaacgtgggtccacgcgtagagggaaaggaaagaagttgtagttgacacttcaggggggcgggtggcggacgggtctcgctgcctgattggttttgcatttcatcccaatttttttttctccactctctctccctcttttcagtttctctctctgatcccaggggaggggaaacgggaatagtgagagatcaaaaataaacctcttatgtcaagccgggaaggaagtataaataagaagggctcggcagcccactcggtgcttcccggggtggggaggaggcaggaggcggctgcgcggggctggcgcgggcaggggcggaggacgggcgcacgcgggccggggccagctgctcgcgctcggctcgggggcggcggcgcgggaggagcgggctgcgccagccagaggggccgccgggggagcgctcccgccgccgggccccgcgggccgagtcggccttgcacccgattgattccgcttttcctggagagagcggccgggccgcgctcgggccgccagcacctgcccgcgcctggcgggcttcttccctctcctgcgcgcagccaccgccgcagcccccatgctccccgcccccgccgccccccggtggcctccgctcctgctgctgctgctgctgctgctgccgctggcccgcggcgccccggcccggcccgcagccggggggcaggcctcggagctggtggtgcccacgcggttgcccggcagcgcgggcgagctcgcgctccacctgtccgccttcggcaagggcttcgtgctgcgcctggcgcccgacgacagcttcctagcgcccgagttcaagatcgagcgcctcgggggctccggccgggcgaccgggggcgagcgggggctgcgcggctgcttcttctccggcaccgtgaatggggagcccgagtcgctggcggcggtcagcctgtgccgcgggctgagcggctccttcctgctggacggcgaggagttcaccatccagccgcagggcgcggggggctccctggctcagccgcaccgcctgcagcgctggggtcccgccggagcccgccccctcccgcgaggacccgagtgggaggtggagacgggagagggtcagaggcaggagagaggagaccaccaggaggacagcgaggaggagagccaagaagaggaggcagaaggcgctagcgagccgccaccgcccctgggggccacgagtaggaccaagcggtttgtgtctgaggcgcgcttcgtggagacgctgctggtggccgatgcgtccatggctgccttctacggggccgacctgcagaaccacatcctgacgttaatgtctgtggcagcccgaatctacaagcaccccagcatcaagaattccatcaacctgatggtggtaaaagtgctgatcgtagaagatgaaaaatggggcccagaggtgtccgacaatggggggcttacactgcgtaacttctgcaactggcagcggcgtttcaaccagcccagcgaccgccacccagagcactacgacacggccatcctgctcaccagacagaacttctgtgggcaggaggggctgtgtgacaccctgggtgtggcagacatcgggaccatttgtgaccccaacaaaagctgctccgtgatcgaggatgaggggctccaggcggcccacaccctggcccatgaactagggcacgtcctcagcatgccccacgacgactccaagccctgcacacggctcttcgggcccatgggcaagcaccacgtgatggcaccgctgttcgtccacctgaaccagacgctgccctggtccccctgcagcgccatgtatctcacagagcttctggacggcgggcacggagactgtctcctggatgcccctgctgcggccctgcccctccccacaggcctcccgggccgcatggccctgtaccagctggaccagcagtgcaggcagatctttgggccggatttccgccactgccccaacacctctgctcaggacgtctgcgcccagctttggtgccacactgatggggctgagcccctgtgccacacgaagaatggcagcctgccctgggctgacggcacgccgtgcgggcctgggcacctctgctcagaaggcagctgtctacctgaggaggaagtggagaggcccaagcccgtggcagatggaggctgggcaccgtggggaccctggggagaatgttctcggacctgtggaggaggagtacagttttcacaccgtgagtgcaaggaccccgagcctcagaatggaggaagatactgcctgggtcggagagccaagtaccagtcatgccacacggaggaatgcccccctgacgggaaaagcttcagggagcagcagtgtgagaagtataatgcctacaattacactgacatggacgggaatctcctgcagtgggtccccaagtatgctggggtgtccccccgggaccgctgcaagttgttctgccgagcccgggggaggagcgagttcaaagtgttcgaggccaaggtgattgatggcaccctgtgtgggccagaaacactggccatctgtgtccgtggccagtgtgtcaaggccggctgtgaccatgtggtggactcgcctcggaagctggacaaatgcggggtgtgtgggggcaaaggcaactcctgcaggaaggtctccgggtccctcacccccaccaattatggctacaatgacattgtcaccatcccagctggtgccactaatattgacgtgaagcagcggagccacccgggtgtgcagaacgatgggaactacctggcgctgaagacggctgatgggcagtacctgctcaacggcaacctggccatctctgccatagagcaggacatcttggtgaaggggaccatcctgaagtacagcggctccatcgccaccctggagcgcctgcagagcttccggcccttgccagagcctctgacagtgcagctcctgacagtccctggcgaggtcttccccccaaaagtcaaatacaccttctttgttcctaatgacgtggactttagcatgcagagcagcaaagagagagcaaccaccaacatcatccagccgctgctccacgcacagtgggtgctgggggactggtctgagtgctctagcacctgcggggccggctggcagaggcgaactgtagagtgcagggacccctccggccaggcctctgccacctgcaacaaggctctgaaacccgaggatgccaagccctgcgaaagccagctgtgccccctgtgattcaggggggcaggggccagtcttgtgctcctggacatgcggtactgaggtgcagacaagggtctccactgtggtgactgggtcccttggccatatcaaggcagcacggcccacccaggcctcccattgccgcaacccctccagtactgcacaaattcctaagggggaagaggagagggtatggggcggcagaccctatcatcaactgtccagtggactggaccttgctcgggttcaagtagagggcataggttaaaaggtaaaagtgcacttattgactcagacaggacactcagcgtcagtctgtttgcaaaggactagcaaacttaaatgaaaaaaaaaattctatctggtttccccgataaataatctacctcacaggggaaaaaattagtacaagagaggcgtggggcagggagtcaatggtgaatgtcaaagcaggctccaaagctggaccccaagctgtcttcaagaatgaccacgactgtcttcagtgttaaaatccatcacctaaagggccgcagcgtcgcagggtttggagagccacatgttctcaggctgccacctgcaggggtggatccatttcaagtatttatgcaaatgtgtctctgaactaaagtgtgatcttatgcc

SEQ ID NO: 1017 - DNA, 3390 bp, Homo sapiens
  source 1..3390: mol_type = unassigned DNA
gctgctcgcgctcggctcgggggcggcggcgcgggaggagcgggctgcgccagccagaggggccgccgggggagcgctcccgccgccgggccccgcgggccgagtcggccttgcacccgattgattccgcttttcctggagagagcggccgggccgcgctcgggccgccagcacctgcccgcgcctggcgggcttcttccctctcctgcgcgcagccaccgccgcagcccccatgctccccgcccccgccgccccccggtggcctccgctcctgctgctgctgctgctgctgctgccgctggcccgcggcgccccggcccggcccgcagccggggggcaggcctcggagctggtggtgcccacgcggttgcccggctgcgcggctgcttcttctccggcaccgtgaatggggagcccgagtcgctggcggcggtcagcctgtgccgcgggctgagcggctccttcctgctggacggcgaggagttcaccatccagccgcagggcgcggggggctccctggctcagccgcaccgcctgcagcgctggggtcccgccggagcccgccccctcccgcgaggacccgagtgggaggtggagacgggagagggtcagaggcaggagagaggagaccaccaggaggacagcgaggaggagagccaagaagaggaggcagaaggcgctagcgagccgccaccgcccctgggggccacgagtaggaccaagcggtttgtgtctgaggcgcgcttcgtggagacgctgctggtggccgatgcgtccatggctgccttctacggggccgacctgcagaaccacatcctgacgttaatgtctgtggcagcccgaatctacaagcaccccagcatcaagaattccatcaacctgatggtggtaaaagtgctgatcgtagaagatgaaaaatggggcccagaggtgtccgacaatggggggcttacactgcgtaacttctgcaactggcagcggcgtttcaaccagcccagcgaccgccacccagagcactacgacacggccatcctgctcaccagacagaacttctgtgggcaggaggggctgtgtgacaccctgggtgtggcagacatcgggaccatttgtgaccccaacaaaagctgctccgtgatcgaggatgaggggctccaggcggcccacaccctggcccatgaactagggcacgtcctcagcatgccccacgacgactccaagccctgcacacggctcttcgggcccatgggcaagcaccacgtgatggcaccgctgttcgtccacctgaaccagacgctgccctggtccccctgcagcgccatgtatctcacagagcttctggacggcgggcacggagactgtctcctggatgcccctgctgcggccctgcccctccccacaggcctcccgggccgcatggccctgtaccagctggaccagcagtgcaggcagatctttgggccggatttccgccactgccccaacacctctgctcaggacgtctgcgcccagctttggtgccacactgatggggctgagcccctgtgccacacgaagaatggcagcctgccctgggctgacggcacgccgtgcgggcctgggcacctctgctcagaaggcagctgtctacctgaggaggaagtggagaggcccaagcccgtggcagatggaggctgggcaccgtggggaccctggggagaatgttctcggacctgtggaggaggagtacagttttcacaccgtgagtgcaaggaccccgagcctcagaatggaggaagatactgcctgggtcggagagccaagtaccagtcatgccacacggaggaatgcccccctgacgggaaaagcttcagggagcagcagtgtgagaagtataatgcctacaattacactgacatggacgggaatctcctgcagtgggtccccaagtatgctggggtgtccccccgggaccgctgcaagttgttctgccgagcccgggggaggagcgagttcaaagtgttcgaggccaaggtgattgatggcaccctgtgtgggccagaaacactggccatctgtgtccgtggccagtgtgtcaaggccggctgtgaccatgtggtggactcgcctcggaagctggacaaatgcggggtgtgtgggggcaaaggcaactcctgcaggaaggtctccgggtccctcacccccaccaattatggctacaatgacattgtcaccatcccagctggtgccactaatattgacgtgaagcagcggagccacccgggtgtgcagaacgatgggaactacctggcgctgaagacggctgatgggcagtacctgctcaacggcaacctggccatctctgccatagagcaggacatcttggtgaaggggaccatcctgaagtacagcggctccatcgccaccctggagcgcctgcagagcttccggcccttgccagagcctctgacagtgcagctcctgacagtccctggcgaggtcttccccccaaaagtcaaatacaccttctttgttcctaatgacgtggactttagcatgcagagcagcaaagagagagcaaccaccaacatcatccagccgctgctccacgcacagtgggtgctgggggactggtctgagtgctctagcacctgcggggccggctggcagaggcgaactgtagagtgcagggacccctccggccaggcctctgccacctgcaacaaggctctgaaacccgaggatgccaagccctgcgaaagccagctgtgccccctgtgattcaggggggcaggggccagtcttgtgctcctggacatgcggtactgaggtgcagacaagggtctccactgtggtgactgggtcccttggccatatcaaggcagcacggcccacccaggcctcccattgccgcaacccctccagtactgcacaaattcctaagggggaagaggagagggtatggggcggcagaccctatcatcaactgtccagtggactggaccttgctcgggttcaagtagagggcataggttaaaaggtaaaagtgcacttattgactcagacaggacactcagcgtcagtctgtttgcaaaggactagcaaacttaaatgaaaaaaaaaattctatctggtttccccgataaataatctacctcacaggggaaaaaattagtacaagagaggcgtggggcagggagtcaatggtgaatgtcaaagcaggctccaaagctggaccccaagctgtcttcaagaatgaccacgactgtcttcagtgttaaaatccatcacctaaagggccgcagcgtcgcagggtttggagagccacatgttctcaggctgccacctgcaggggtggatccatttcaagtatttatgcaaatgtgtctctgaactaaagtgtgatcttatgcc

SEQ ID NO: 1018 - DNA, 7060 bp, Homo sapiens
  source 1..7060: mol_type = unassigned DNA
ggagggaggggtgggaagcaccatgcagtttgtatcctgggccacactgctaacgctcctggtgcgggacctggccgagatggggagcccagacgccgcggcggccgtgcgcaaggacaggctgcacccgaggcaagtgaaattattagagaccctgagcgaatacgaaatcgtgtctcccatccgagtgaacgctctcggagaaccctttcccacgaacgtccacttcaaaagaacgcgacggagcattaactctgccactgacccctggcctgccttcgcctcctcctcttcctcctctacctcctcccaggcgcattaccgcctctctgccttcggccagcagtttctatttaatctcaccgccaatgccggatttatcgctccactgttcactgtcaccctcctcgggacgcccggggtgaatcagaccaagttttattccgaagaggaagcggaactcaagcactgtttctacaaaggctatgtcaataccaactccgagcacacggccgtcatcagcctctgctcaggaatgctgggcacattccggtctcatgatggggattattttattgaaccactacagtctatggatgaacaagaagatgaagaggaacaaaacaaaccccacatcatttataggcgcagcgccccccagagagagccctcaacaggaaggcatgcatgtgacacctcagaacacaaaaataggcacagtaaagacaagaagaaaaccagagcaagaaaatggggagaaaggattaacctggctggtgacgtagcagcattaaacagcggcttagcaacagaggcattttctgcttatggtaataagacggacaacacaagagaaaagaggacccacagaaggacaaaacgttttttatcctatccacggtttgtagaagtcttggtggtggcagacaacagaatggtttcataccatggagaaaaccttcaacactatattttaactttaatgtcaattgatgggccttccatatcttttaatgctcagacaacattaaaaaacttttgccagtggcagcattcgaagaacagtccaggtggaatccatcatgatactgctgttctcttaacaagacaggatatctgcagagctcacgacaaatgtgataccttaggcctggctgaactgggaaccatttgtgatccctatagaagctgttctattagtgaagatagtggattgagtacagcttttacgatcgcccatgagctgggccatgtgtttaacatgcctcatgatgacaacaacaaatgtaaagaagaaggagttaagagtccccagcatgtcatggctccaacactgaacttctacaccaacccctggatgtggtcaaagtgtagtcgaaaatatatcactgagtttttagacactggttatggcgagtgtttgcttaacgaacctgaatccagaccctaccctttgcctgtccaactgccaggcatcctttacaacgtgaataaacaatgtgaattgatttttggaccaggttctcaggtgtgcccatatatgatgcagtgcagacggctctggtgcaataacgtcaatggagtacacaaaggctgccggactcagcacacaccctgggccgatgggacggagtgcgagcctggaaagcactgcaagtatggattttgtgttcccaaagaaatggatgtccccgtgacagatggatcctggggaagttggagtccctttggaacctgctccagaacatgtggagggggcatcaaaacagccattcgagagtgcaacagaccagaaccaaaaaatggtggaaaatactgtgtaggacgtagaatgaaatttaagtcctgcaacacggagccatgtctcaagcagaagcgagacttccgagatgaacagtgtgctcactttgacgggaagcattttaacatcaacggtctgcttcccaatgtgcgctgggtccctaaatacagtggaattctgatgaaggaccggtgcaagttgttctgcagagtggcagggaacacagcctactatcagcttcgagacagagtgatagatggaactccttgtggccaggacacaaatgatatctgtgtccagggcctttgccggcaagctggatgcgatcatgttttaaactcaaaagcccggagagataaatgtggggtttgtggtggcgataattcttcatgcaaaacagtggcaggaacatttaatacagtacattatggttacaatactgtggtccgaattccagctggtgctaccaatattgatgtgcggcagcacagtttctcaggggaaacagacgatgacaactacttagctttatcaagcagtaaaggtgaattcttgctaaatggaaactttgttgtcacaatggccaaaagggaaattcgcattgggaatgctgtggtagagtacagtgggtccgagactgccgtagaaagaattaactcaacagatcgcattgagcaagaacttttgcttcaggttttgtcggtgggaaagttgtacaaccccgatgtacgctattctttcaatattccaattgaagataaacctcagcagttttactggaacagtcatgggccatggcaagcatgcagtaaaccctgccaaggggaacggaaacgaaaacttgtttgcaccagggaatctgatcagcttactgtttctgatcaaagatgcgatcggctgccccagcctggacacattactgaaccctgtggtacagactgtgacctgaggtggcatgttgccagcaggagtgaatgtagtgcccagtgtggcttgggttaccgcacattggacatctactgtgccaaatatagcaggctggatgggaagactgagaaggttgatgatggtttttgcagcagccatcccaaaccaagcaaccgtgaaaaatgctcaggggaatgtaacacgggtggctggcgctattctgcctggactgaatgttcaaaaagctgtgacggtgggacccagaggagaagggctatttgtgtcaatacccgaaatgatgtactggatgacagcaaatgcacacatcaagagaaagttaccattcagaggtgcagtgagttcccttgtccacagtggaaatctggagactggtcagagtgcttggtcacctgtggaaaagggcataagcaccgccaggtctggtgtcagtttggtgaagatcgattaaatgatagaatgtgtgaccctgagaccaagccaacatctatgcagacttgtcagcagccggaatgtgcatcctggcaggcgggtccctggggacagtgcagtgtcacttgtggacagggataccagctaagagcagtgaaatgcatcattgggacttatatgtcagtggtagatgacaatgactgtaatgcagcaactagaccaactgatacccaggactgtgaattaccatcatgtcatcctcccccagctgccccggaaacgaggagaagcacatacagtgcaccaagaacccagtggcgatttgggtcttggaccccatgctcagccacttgtgggaaaggtacccggatgagatacgtcagctgccgagatgagaatggctctgtggctgacgagagtgcctgtgctaccctgcctagaccagtggcaaaggaagaatgttctgtgacaccctgtgggcaatggaaggccttggactggagctcttgctctgtgacctgtgggcaaggtagggcaacccggcaagtgatgtgtgtcaactacagtgaccacgtgatcgatcggagtgagtgtgaccaggattatatcccagaaactgaccaggactgttccatgtcaccatgccctcaaaggaccccagacagtggcttagctcagcaccccttccaaaatgaggactatcgtccccggagcgccagccccagccgcacccatgtgctcggtggaaaccagtggagaactggcccctggggagcatgttccagtacctgtgctggcggatcccagcggcgtgttgttgtatgtcaggatgaaaatggatacaccgcaaacgactgtgtggagagaataaaacctgatgagcaaagagcctgtgaatccggcccttgtcctcagtgggcttatggcaactggggagagtgcactaagctgtgtggtggaggcataagaacaagactggtggtctgtcagcggtccaacggtgaacggtttccagatttgagctgtgaaattcttgataaacctcccgatcgtgagcagtgtaacacacatgcttgtccacacgacgctgcatggagtactggcccttggagctcgtgttctgtctcttgtggtcgagggcataaacaacgaaatgtttactgcatggcaaaagatggaagccatttagaaagtgattactgtaagcacctggctaagccacatgggcacagaaagtgccgaggaggaagatgccccaaatggaaagctggcgcttggagtcagtgctctgtgtcctgtggccgaggcgtacagcagaggcatgtgggctgtcagatcggaacacacaaaatagccagagagaccgagtgcaacccatacaccagaccggagtcggaacgcgactgccaaggcccacggtgtcccctctacacttggagggcagaggaatggcaagaatgcaccaagacctgcggcgaaggctccaggtaccgcaaggtggtgtgtgtggatgacaacaaaaacgaggtgcatggggcacgctgtgacgtgagcaagcggccggtggaccgtgaaagctgtagtttgcaaccctgcgagtatgtctggatcacaggagaatggtcagagtgctcagtgacctgtggaaaaggctacaaacaaaggcttgtctcgtgcagcgagatttacaccgggaaggagaattatgaatacagctaccaaaccaccatcaactgcccaggcacgcagccccccagtgttcacccctgttacctgagggactgccctgtctcggccacctggagagttggcaactgggggagctgctcagtgtcttgtggtgttggagtgatgcagagatctgtgcaatgtttaaccaatgaggaccaacccagccacttatgccacactgatctgaagccagaagaacgaaaaacctgccgtaatgtctataactgtgagttaccccagaattgcaaggaggtaaaaagacttaaaggtgccagtgaagatggtgaatatttcctgatgattagaggaaagcttctgaagatattctgtgcggggatgcactctgaccaccccaaagagtacgtgacactggtgcatggagactctgagaatttctccgaggtttatgggcacaggttacacaacccaacagaatgtccctataacgggagccggcgcgatgactgccaatgtcggaaggattacacggccgctgggttttccagttttcagaaaatcagaatagacctgaccagcatgcagataatcaccactgacttacagtttgcaaggacaagcgaaggacatcccgtcccttttgccacagccggggattgctacagcgctgccaagtgcccacagggtcgttttagcatcaacctttatggaaccggcttgtctttaactgaatctgccagatggatatcacaagggaattatgctgtctctgacatcaagaagtcgccggatggtacccgagtcgtagggaaatgcggtggttactgtggaaaatgcactccatcctctggtactggcctggaggtgcgagttttatagctaaggtgctttgaagaggaagccattatggatggatgaaggatagtaatgcaatacctccaccttaatttgggtgcatgtgtatgtgtgtgtgtgtttgtgtgtgacttgtatgcttgtgtgtgtaaatgtgtgtacatatacatatatacatatctacacatacatatatacacatatatgtgtgtatgtagatatgtagactatcctaatgatgtaaagtttaatatttatgtttgaaattatttattgtgatgtaatatttttgtacgtaaaatgattctattatgactgcctttgcatgtagtaatatgacaaagtgatccttcattatcacggtacactattgtttacttttcatctgtaaatgttttattgttacttttttaaaatgaatttttttaaaacaatctagccatcatcaaggtgctataagagttgtataaaagatatttttggcatttctaggcaagtatcagccaataagtatgttagtgatatcacagattgtaccaactattaactatgttaaataagtattcagtttcatgtgatctctgggaaaaaaatatgctgccttggtgctaatattgtatgtatttaaatgatcatccgactcagaaatataaacacttttaatgaaagggaggaacggaaggacaatttccagtgcacagaatcacttggatgaaataagaccagctctttacccttatttttggatatgccttttttggaagagacttagactttatccttattgttgttagtgttgttaatattcgttgcttcagcccacggtgccttggtctctccacaatcaaatggaggatcccccaagcagcttcattacagagtgatattgggaaagtgagatcctctcaccattttgccaagatactctaaaatgacatccaagtttaccagtagaaagacacaggatgcacagaatgggcatgaccttcagctcacgagcacacctggagaaattcagaaccaggttctgaatcatcacgattgccttttgcatgaaaacatcggctggtgatgtgacttctcttcaggccatgagcctaacaccctgccggttttcatgcccgctgcagtaatggacgtttgtgtgaagaaatgaactgtggagtacaaaatgctttgagtctttccgattgctcattaattcacttttttgttacttctttccaaaatggaagtgctgaagccatggtctttctgcccctccaagctgatgaagggaagcctttgccaatggcccatggaagacacttggtttgagaaaccctgcccacttccaaa

SEQ ID NO: 1019 - DNA, 3168 bp, Homo sapiens
  source 1..3168: mol_type = unassigned DNA
gtgaatgtagtgcccagtgtggcttgggttaccgcacattggacatctactgtgccaaatatagcaggctggatgggaagactgagaaggttgatgatggtttttgcagcagccatcccaaaccaagcaaccgtgaaaaatgctcaggggaatgtaacacgggtggctggcgctattctgcctggactgaatgttcaaaaagctgtgacggtgggacccagaggagaagggctatttgtgtcaatacccgaaatgatgtactggatgacagcaaatgcacacatcaagagaaagttaccattcagaggtgcagtgagttcccttgtccacagtggaaatctggagactggtcagagtgcttggtcacctgtggaaaagggcataagcaccgccaggtctggtgtcagtttggtgaagatcgattaaatgatagaatgtgtgaccctgagaccaagccaacatctatgcagacttgtcagcagccggaatgtgcatcctggcaggcgggtccctggggacagtgcagtgtcacttgtggacagggataccagctaagagcagtgaaatgcatcattgggacttatatgtcagtggtagatgacaatgactgtaatgcagcaactagaccaactgatacccaggactgtgaattaccatcatgtcatcctcccccagctgccccggaaacgaggagaagcacatacagtgcaccaagaacccagtggcgatttgggtcttggaccccatgctcagccacttgtgggaaaggtacccggatgagatacgtcagctgccgagatgagaatggctctgtggctgacgagagtgcctgtgctaccctgcctagaccagtggcaaaggaagaatgttctgtgacaccctgtgggcaatggaaggccttggactggagctcttgctctgtgacctgtgggcaaggtagggcaacccggcaagtgatgtgtgtcaactacagtgaccacgtgatcgatcggagtgagtgtgaccaggattatatcccagaaactgaccaggactgttccatgtcaccatgccctcaaaggaccccagacagtggcttagctcagcaccccttccaaaatgaggactatcgtccccggagcgccagccccagccgcacccatgtgctcggtggaaaccagtggagaactggcccctggggagcatgttccagtacctgtgctggcggatcccagcggcgtgttgttgtatgtcaggatgaaaatggatacaccgcaaacgactgtgtggagagaataaaacctgatgagcaaagagcctgtgaatccggcccttgtcctcagtgggcttatggcaactggggagagtgcactaagctgtgtggtggaggcataagaacaagactggtggtctgtcagcggtccaacggtgaacggtttccagatttgagctgtgaaattcttgataaacctcccgatcgtgagcagtgtaacacacatgcttgtccacacgacgctgcatggagtactggcccttggagctcgtgttctgtctcttgtggtcgagggcataaacaacgaaatgtttactgcatggcaaaagatggaagccatttagaaagtgattactgtaagcacctggctaagccacatgggcacagaaagtgccgaggaggaagatgccccaaatggaaagctggcgcttggagtcagtgctctgtgtcctgtggccgaggcgtacagcagaggcatgtgggctgtcagatcggaacacacaaaatagccagagagaccgagtgcaacccatacaccagaccggagtcggaacgcgactgccaaggcccacggtgtcccctctacacttggagggcagaggaatggcaagaatgcaccaagacctgcggcgaaggctccaggtaccgcaaggtggtgtgtgtggatgacaacaaaaacgaggtgcatggggcacgctgtgacgtgagcaagcggccggtggaccgtgaaagctgtagtttgcaaccctgcgagtatgtctggatcacaggagaatggtcagagtgctcagtgacctgtggaaaaggctacaaacaaaggcttgtctcgtgcagcgagatttacaccgggaaggagaattatgaatacagctaccaaaccaccatcaactgcccaggcacgcagccccccagtgttcacccctgttacctgagggactgccctgtctcggccacctggagagttggcaactgggggagctgctcagtgtcttgtggtgttggagtgatgcagagatctgtgcaatgtttaaccaatgaggaccaacccagccacttatgccacactgatctgaagccagaagaacgaaaaacctgccgtaatgtctataactgtgagttaccccagaattgcaaggaggtaaaaagacttaaaggtgccagtgaagatggtgaatatttcctgatgattagaggaaagcttctgaagatattctgtgcggggatgcactctgaccaccccaaagagtacgtgacactggtgcatggagactctgagaatttctccgaggtttatgggcacaggttacacaacccaacagaatgtccctataacgggagccggcgcgatgactgccaatgtcggaaggattacacggccgctgggttttccagttttcagaaaatcagaatagacctgaccagcatgcagataatcaccactgacttacagtttgcaaggacaagcgaaggacatcccgtcccttttgccacagccggggattgctacagcgctgccaagtgcccacagggtcgttttagcatcaacctttatggaaccggcttgtctttaactgaatctgccagatggatatcacaagggaattatgctgtctctgacatcaagaagtcgccggatggtacccgagtcgtagggaaatgcggtggttactgtggaaaatgcactccatcctctggtactggcctggaggtgcgagttttatagctaaggaaaattgcctccagctgcatccatattgctgcaaaggacatgatttcattattttttatggctgcatagtatttcatcatgtatacagaccacatttttaaaatccagtccaccattaatcggtacctaggttgattccacgtttgctattgtgaatagtgctgcaataaacatgtgagtgcaggtg

SEQ ID NO: 1020 - DNA, 7464 bp, Homo sapiens
  source 1..7464: mol_type = unassigned DNA
acagggcgcccggcgcgcctcggagcgcaagttcctcgccttctcctgcccgctcgctgggcattatgcggccaagcagccgagccccagtcctcctcctcctcctgctcctccggctcctcctgcggcccgagcggctcagctctcggcaggcggcggcgttgctcagccgagcgcagacgggaccctcgcagcgagacctcagcgactcctaaagtcaaaagttggcggcgggcgccgggctccgcgcgctctccacggccgctgcctcgcgtcgccgccgcagccaaggagggcaggagggaggggggtgggggcagcggagggaggggtgggaagcaccatgcagtttgtatcctgggccacactgctaacgctcctggtgcgggacctggccgagatggggagcccagacgccgcggcggccgtgcgcaaggacaggctgcacccgaggcaagtgaaattattagagaccctgagcgaatacgaaatcgtgtctcccatccgagtgaacgctctcggagaaccctttcccacgaacgtccacttcaaaagaacgcgacggagcattaactctgccactgacccctggcctgccttcgcctcctcctcttcctcctctacctcctcccaggcgcattaccgcctctctgccttcggccagcagtttctatttaatctcaccgccaatgccggatttatcgctccactgttcactgtcaccctcctcgggacgcccggggtgaatcagaccaagttttattccgaagaggaagcggaactcaagcactgtttctacaaaggctatgtcaataccaactccgagcacacggccgtcatcagcctctgctcaggaatgctgggcacattccggtctcatgatggggattattttattgaaccactacagtctatggatgaacaagaagatgaagaggaacaaaacaaaccccacatcatttataggcgcagcgccccccagagagagccctcaacaggaaggcatgcatgtgacacctcagaacacaaaaataggcacagtaaagacaagaagaaaaccagagcaagaaaatggggagaaaggattaacctggctggtgacgtagcagcattaaacagcggcttagcaacagaggcattttctgcttatggtaataagacggacaacacaagagaaaagaggacccacagaaggacaaaacgttttttatcctatccacggtttgtagaagtcttggtggtggcagacaacagaatggtttcataccatggagaaaaccttcaacactatattttaactttaatgtcaattgtagcctctatctataaagacccaagtattggaaatttaattaatattgttattgtgaacttaattgtgattcataatgaacaggatgggccttccatatcttttaatgctcagacaacattaaaaaacttttgccagtggcagcattcgaagaacagtccaggtggaatccatcatgatactgctgttctcttaacaagacaggatatctgcagagctcacgacaaatgtgataccttaggcctggctgaactgggaaccatttgtgatccctatagaagctgttctattagtgaagatagtggattgagtacagcttttacgatcgcccatgagctgggccatgtgtttaacatgcctcatgatgacaacaacaaatgtaaagaagaaggagttaagagtccccagcatgtcatggctccaacactgaacttctacaccaacccctggatgtggtcaaagtgtagtcgaaaatatatcactgagtttttagacactggttatggcgagtgtttgcttaacgaacctgaatccagaccctaccctttgcctgtccaactgccaggcatcctttacaacgtgaataaacaatgtgaattgatttttggaccaggttctcaggtgtgcccatatatgatgcagtgcagacggctctggtgcaataacgtcaatggagtacacaaaggctgccggactcagcacacaccctgggccgatgggacggagtgcgagcctggaaagcactgcaagtatggattttgtgttcccaaagaaatggatgtccccgtgacagatggatcctggggaagttggagtccctttggaacctgctccagaacatgtggagggggcatcaaaacagccattcgagagtgcaacagaccagaaccaaaaaatggtggaaaatactgtgtaggacgtagaatgaaatttaagtcctgcaacacggagccatgtctcaagcagaagcgagacttccgagatgaacagtgtgctcactttgacgggaagcattttaacatcaacggtctgcttcccaatgtgcgctgggtccctaaatacagtggaattctgatgaaggaccggtgcaagttgttctgcagagtggcagggaacacagcctactatcagcttcgagacagagtgatagatggaactccttgtggccaggacacaaatgatatctgtgtccagggcctttgccggcaagctggatgcgatcatgttttaaactcaaaagcccggagagataaatgtggggtttgtggtggcgataattcttcatgcaaaacagtggcaggaacatttaatacagtacattatggttacaatactgtggtccgaattccagctggtgctaccaatattgatgtgcggcagcacagtttctcaggggaaacagacgatgacaactacttagctttatcaagcagtaaaggtgaattcttgctaaatggaaactttgttgtcacaatggccaaaagggaaattcgcattgggaatgctgtggtagagtacagtgggtccgagactgccgtagaaagaattaactcaacagatcgcattgagcaagaacttttgcttcaggttttgtcggtgggaaagttgtacaaccccgatgtacgctattctttcaatattccaattgaagataaacctcagcagttttactggaacagtcatgggccatggcaagcatgcagtaaaccctgccaaggggaacggaaacgaaaacttgtttgcaccagggaatctgatcagcttactgtttctgatcaaagatgcgatcggctgccccagcctggacacattactgaaccctgtggtacagactgtgacctgaggtggcatgttgccagcaggagtgaatgtagtgcccagtgtggcttgggttaccgcacattggacatctactgtgccaaatatagcaggctggatgggaagactgagaaggttgatgatggtttttgcagcagccatcccaaaccaagcaaccgtgaaaaatgctcaggggaatgtaacacgggtggctggcgctattctgcctggactgaatgttcaaaaagctgtgacggtgggacccagaggagaagggctatttgtgtcaatacccgaaatgatgtactggatgacagcaaatgcacacatcaagagaaagttaccattcagaggtgcagtgagttcccttgtccacagtggaaatctggagactggtcagagtgcttggtcacctgtggaaaagggcataagcaccgccaggtctggtgtcagtttggtgaagatcgattaaatgatagaatgtgtgaccctgagaccaagccaacatctatgcagacttgtcagcagccggaatgtgcatcctggcaggcgggtccctggggacagtgcagtgtcacttgtggacagggataccagctaagagcagtgaaatgcatcattgggacttatatgtcagtggtagatgacaatgactgtaatgcagcaactagaccaactgatacccaggactgtgaattaccatcatgtcatcctcccccagctgccccggaaacgaggagaagcacatacagtgcaccaagaacccagtggcgatttgggtcttggaccccatgctcagccacttgtgggaaaggtacccggatgagatacgtcagctgccgagatgagaatggctctgtggctgacgagagtgcctgtgctaccctgcctagaccagtggcaaaggaagaatgttctgtgacaccctgtgggcaatggaaggccttggactggagctcttgctctgtgacctgtgggcaaggtagggcaacccggcaagtgatgtgtgtcaactacagtgaccacgtgatcgatcggagtgagtgtgaccaggattatatcccagaaactgaccaggactgttccatgtcaccatgccctcaaaggaccccagacagtggcttagctcagcaccccttccaaaatgaggactatcgtccccggagcgccagccccagccgcacccatgtgctcggtggaaaccagtggagaactggcccctggggagcatgttccagtacctgtgctggcggatcccagcggcgtgttgttgtatgtcaggatgaaaatggatacaccgcaaacgactgtgtggagagaataaaacctgatgagcaaagagcctgtgaatccggcccttgtcctcagtgggcttatggcaactggggagagtgcactaagctgtgtggtggaggcataagaacaagactggtggtctgtcagcggtccaacggtgaacggtttccagatttgagctgtgaaattcttgataaacctcccgatcgtgagcagtgtaacacacatgcttgtccacacgacgctgcatggagtactggcccttggagctcgtgttctgtctcttgtggtcgagggcataaacaacgaaatgtttactgcatggcaaaagatggaagccatttagaaagtgattactgtaagcacctggctaagccacatgggcacagaaagtgccgaggaggaagatgccccaaatggaaagctggcgcttggagtcagtgctctgtgtcctgtggccgaggcgtacagcagaggcatgtgggctgtcagatcggaacacacaaaatagccagagagaccgagtgcaacccatacaccagaccggagtcggaacgcgactgccaaggcccacggtgtcccctctacacttggagggcagaggaatggcaagaatgcaccaagacctgcggcgaaggctccaggtaccgcaaggtggtgtgtgtggatgacaacaaaaacgaggtgcatggggcacgctgtgacgtgagcaagcggccggtggaccgtgaaagctgtagtttgcaaccctgcgagtatgtctggatcacaggagaatggtcagagtgctcagtgacctgtggaaaaggctacaaacaaaggcttgtctcgtgcagcgagatttacaccgggaaggagaattatgaatacagctaccaaaccaccatcaactgcccaggcacgcagccccccagtgttcacccctgttacctgagggactgccctgtctcggccacctggagagttggcaactgggggagctgctcagtgtcttgtggtgttggagtgatgcagagatctgtgcaatgtttaaccaatgaggaccaacccagccacttatgccacactgatctgaagccagaagaacgaaaaacctgccgtaatgtctataactgtgagttaccccagaattgcaaggaggtaaaaagacttaaaggtgccagtgaagatggtgaatatttcctgatgattagaggaaagcttctgaagatattctgtgcggggatgcactctgaccaccccaaagagtacgtgacactggtgcatggagactctgagaatttctccgaggtttatgggcacaggttacacaacccaacagaatgtccctataacgggagccggcgcgatgactgccaatgtcggaaggattacacggccgctgggttttccagttttcagaaaatcagaatagacctgaccagcatgcagataatcaccactgacttacagtttgcaaggacaagcgaaggacatcccgtcccttttgccacagccggggattgctacagcgctgccaagtgcccacagggtcgttttagcatcaacctttatggaaccggcttgtctttaactgaatctgccagatggatatcacaagggaattatgctgtctctgacatcaagaagtcgccggatggtacccgagtcgtagggaaatgcggtggttactgtggaaaatgcactccatcctctggtactggcctggaggtgcgagttttatagctaaggtgctttgaagaggaagccattatggatggatgaaggatagtaatgcaatacctccaccttaatttgggtgcatgtgtatgtgtgtgtgtgtttgtgtgtgacttgtatgcttgtgtgtgtaaatgtgtgtacatatacatatatacatatctacacatacatatatacacatatatgtgtgtatgtagatatgtagactatcctaatgatgtaaagtttaatatttatgtttgaaattatttattgtgatgtaatatttttgtacgtaaaatgattctattatgactgcctttgcatgtagtaatatgacaaagtgatccttcattatcacggtacactattgtttacttttcatctgtaaatgttttattgttacttttttaaaatgaatttttttaaaacaatctagccatcatcaaggtgctataagagttgtataaaagatatttttggcatttctaggcaagtatcagccaataagtatgttagtgatatcacagattgtaccaactattaactatgttaaataagtattcagtttcatgtgatctctgggaaaaaaatatgctgccttggtgctaatattgtatgtatttaaatgatcatccgactcagaaatataaacacttttaatgaaagggaggaacggaaggacaatttccagtgcacagaatcacttggatgaaataagaccagctctttacccttatttttggatatgccttttttggaagagacttagactttatccttattgttgttagtgttgttaatattcgttgcttcagcccacggtgccttggtctctccacaatcaaatggaggatcccccaagcagcttcattacagagtgatattgggaaagtgagatcctctcaccattttgccaagatactctaaaatgacatccaagtttaccagtagaaagacacaggatgcacagaatgggcatgaccttcagctcacgagcacacctggagaaattcagaaccaggttctgaatcatcacgattgccttttgcatgaaaacatcggctggtgatgtgacttctcttcaggccatgagcctaacaccctgccggttttcatgcccgctgcagtaatggacgtttgtgtgaagaaatgaactgtggagtacaaaatgctttgagtctttccgattgctcattaattcacttttttgttacttctttccaaaatggaagtgctgaagccatggtctttctgcccctccaagctgatgaagggaagcctttgccaatggcccatggaagacacttggtttgagaaaccctgcccacttccaa

SEQ ID NO: 1021 - DNA, 2044 bp, Homo sapiens
  source 1..2044: mol_type = unassigned DNA
aagataaaactggacactggggagaccacaacttcatgctgcgtgggatctcccagctacctgcagtggccaccatgtcttgggtcctgctgcctgtactttggctcattgttcaaactcaaggaaaggtatgaacctgaagttcaatatcagatgatcttaaatggagaagaaatcattctctccctacaaaaaaccaagcacctcctggggccagactacactgaaacattgtactcacccagaggagaggaaattaccacgaaacctgagaacatggaacactgttactataaaggaaacatcctaaatgaaaagaattctgttgccagcatcagtacttgtgacgggttgagaggatacttcacacatcatcaccaaagataccagataaaacctctgaaaagcacagacgagaaagaacatgccgtctttacatctaaccaggaggaacaagacccagctaaccacacatgtggtgtgaagagcactgacgggaaacaaggcccaattcgaatctctagatcactcaaaagcccagagaaagaagactttcttcgggcacagaaatacattgatctctatttggtgctggataatgccttttataagaactataatgagaatctaactctgataagaagctttgtgtttgatgtgatgaacctactcaatgtgatatataacaccatagatgttcaagtggccttggtaggtatggaaatctggtctgatggggataagataaaggtggtgcccagcgcaagcaccacgtttgacaacttcctgagatggcacagttctaacctggggaaaaagatccacgaccatgctcagcttctcagcgggattagcttcaacaatcgacgtgtgggactggcagcttcaaattccttgtgttccccatcttcggttgctgttattgaggctaaaaaaaagaataatgtggctcttgtaggagtgatgtcacatgagctgggccatgtccttggtatgcctgatgttccattcaacaccaagtgtccctctggcagttgtgtgatgaatcagtatctgagttcaaaattcccaaaggatttcagtacatcttgccgtgcacattttgaaagataccttttatctcagaaaccaaagtgcctgctgcaagcacctattcctacaaatataatgacaacaccagtgtgtgggaaccaccttctagaagtgggagaagactgtgattgtggctctcctaaggagtgtaccaatctctgctgtgaagccctaacgtgtaaactgaagcctggaactgattgcggaggagatgctccaaaccataccacagagtgaatccaaaagtctgcttcactgagatgctaccttgccaggacaagaaccaagaactctaactgtcccaggaatcttgtgaattttcacccataatggtctttcacttgtcattctactttctatattgttatcagtccaggaaacaggtaaacagatgtaattagagacattggctctttgtttaggcctaatctttctttttacttttttttttcttttttctttttttttaaagatcatgaatttgtgacttagttctgccctttggagaacaaaagaaagcagtcttccatcaaatcaccttaaaatgcacggctaaactattcagagttaacactccagaattgttaaattacaagtactatgctttaatgcttctttcatcttactagtatggcctataaaaaaaataataccacttgatgggtgaaggctttggcaatagaaagaagaatagaattcaggttttatgttattcctctgtgttcacttcgccttgctcttgaaagtgcagtatttttctacatcatgtcaagaatgattcaatgtaaatatttttcattttatcatgtatatcctatacacacatctccttcatcatcatatatgaagtttattttgagaagtctacattgcttacattttaattgagccagcaaagaaggcttaatgatttattgaaccataatgtcaataaaaacacaacttttgaggc

SEQ ID NO: 1022 - DNA, 2348 bp, Homo sapiens
  source 1..2348: mol_type = unassigned DNA
agatgtgagtcctcaatgagctataaccacagccataaatatctctcaaagatgaggaacattctcatgatgttgacactgcaattttttgacaatttcccaacactcttaagaaacattccccaatctcacacgaaaagtgggggttttaattttcttgttcaacttctaaagagaaattggagaagataaaactggacactggggagaccacaacttcatgctgcgtgggatctcccagctacctgcagtggccaccatgtcttgggtcctgctgcctgtactttggctcattgttcaaactcaagcaatagccataaagcaaacacctgaattaacgctccatgaaatagtttgtcctaaaaaacttcacattttacacaaaagagagatcaagaacaaccagacagaaaagcatggcaaagaggaaaggtatgaacctgaagttcaatatcagatgatcttaaatggagaagaaatcattctctccctacaaaaaaccaagcacctcctggggccagactacactgaaacattgtactcacccagaggagaggaaattaccacgaaacctgagaacatggaacactgttactataaaggaaacatcctaaatgaaaagaattctgttgccagcatcagtacttgtgacgggttgagaggatacttcacacatcatcaccaaagataccagataaaacctctgaaaagcacagacgagaaagaacatgccgtctttacatctaaccaggaggaacaagacccagctaaccacacatgtggtgtgaagagcactgacgggaaacaaggcccaattcgaatctctagatcactcaaaagcccagagaaagaagactttcttcgggcacagaaatacattgatctctatttggtgctggataatgccttttataagaactataatgagaatctaactctgataagaagctttgtgtttgatgtgatgaacctactcaatgtgatatataacaccatagatgttcaagtggccttggtaggtatggaaatctggtctgatggggataagataaaggtggtgcccagcgcaagcaccacgtttgacaacttcctgagatggcacagttctaacctggggaaaaagatccacgaccatgctcagcttctcagcgggattagcttcaacaatcgacgtgtgggactggcagcttcaaattccttgtgttccccatcttcggttgctgttattgaggctaaaaaaaagaataatgtggctcttgtaggagtgatgtcacatgagctgggccatgtccttggtatgcctgatgttccattcaacaccaagtgtccctctggcagttgtgtgatgaatcagtatctgagttcaaaattcccaaaggatttcagtacatcttgccgtgcacattttgaaagataccttttatctcagaaaccaaagtgcctgctgcaagcacctattcctacaaatataatgacaacaccagtgtgtgggaaccaccttctagaagtgggagaagactgtgattgtggctctcctaaggagtgtaccaatctctgctgtgaagccctaacgtgtaaactgaagcctggaactgattgcggaggagatgctccaaaccataccacagagtgaatccaaaagtctgcttcactgagatgctaccttgccaggacaagaaccaagaactctaactgtcccaggaatcttgtgaattttcacccataatggtctttcacttgtcattctactttctatattgttatcagtccaggaaacaggtaaacagatgtaattagagacattggctctttgtttaggcctaatctttctttttacttttttttttcttttttctttttttttaaagatcatgaatttgtgacttagttctgccctttggagaacaaaagaaagcagtcttccatcaaatcaccttaaaatgcacggctaaactattcagagttaacactccagaattgttaaattacaagtactatgctttaatgcttctttcatcttactagtatggcctataaaaaaaataataccacttgatgggtgaaggctttggcaatagaaagaagaatagaattcaggttttatgttattcctctgtgttcacttcgccttgctcttgaaagtgcagtatttttctacatcatgtcaagaatgattcaatgtaaatatttttcattttatcatgtatatcctatacacacatctccttcatcatcatatatgaagtttattttgagaagtctacattgcttacattttaattgagccagcaaagaaggcttaatgatttattgaaccataatgtcaataaaaacacaacttttgaggc

SEQ ID NO: 1023 - DNA, 2438 bp, Homo sapiens
  source 1..2438: mol_type = unassigned DNA
agatgtgagtcctcaatgagctataaccacagccataaatatctctcaaagatgaggaacattctcatgatgttgacactgcaattttttgacaatttcccaacactcttaagaaacattccccaatctcacacgaaaagtgggggttttaattttcttgttcaacttctaaagagaaattggagaagataaaactggacactggggagaccacaacttcatgctgcgtgggatctcccagctacctgcagtggccaccatgtcttgggtcctgctgcctgtactttggctcattgttcaaactcaagcctcaaactgtgcgtggcctaaagtcagcattcaataaatatttgtgaaatgaatatttcagttttcacataaaagaaatatcagagaagcaatagccataaagcaaacacctgaattaacgctccatgaaatagtttgtcctaaaaaacttcacattttacacaaaagagagatcaagaacaaccagacagaaaagcatggcaaagaggaaaggtatgaacctgaagttcaatatcagatgatcttaaatggagaagaaatcattctctccctacaaaaaaccaagcacctcctggggccagactacactgaaacattgtactcacccagaggagaggaaattaccacgaaacctgagaacatggaacactgttactataaaggaaacatcctaaatgaaaagaattctgttgccagcatcagtacttgtgacgggttgagaggatacttcacacatcatcaccaaagataccagataaaacctctgaaaagcacagacgagaaagaacatgccgtctttacatctaaccaggaggaacaagacccagctaaccacacatgtggtgtgaagagcactgacgggaaacaaggcccaattcgaatctctagatcactcaaaagcccagagaaagaagactttcttcgggcacagaaatacattgatctctatttggtgctggataatgccttttataagaactataatgagaatctaactctgataagaagctttgtgtttgatgtgatgaacctactcaatgtgatatataacaccatagatgttcaagtggccttggtaggtatggaaatctggtctgatggggataagataaaggtggtgcccagcgcaagcaccacgtttgacaacttcctgagatggcacagttctaacctggggaaaaagatccacgaccatgctcagcttctcagcgggattagcttcaacaatcgacgtgtgggactggcagcttcaaattccttgtgttccccatcttcggttgctgttattgaggctaaaaaaaagaataatgtggctcttgtaggagtgatgtcacatgagctgggccatgtccttggtatgcctgatgttccattcaacaccaagtgtccctctggcagttgtgtgatgaatcagtatctgagttcaaaattcccaaaggatttcagtacatcttgccgtgcacattttgaaagataccttttatctcagaaaccaaagtgcctgctgcaagcacctattcctacaaatataatgacaacaccagtgtgtgggaaccaccttctagaagtgggagaagactgtgattgtggctctcctaaggagtgtaccaatctctgctgtgaagccctaacgtgtaaactgaagcctggaactgattgcggaggagatgctccaaaccataccacagagtgaatccaaaagtctgcttcactgagatgctaccttgccaggacaagaaccaagaactctaactgtcccaggaatcttgtgaattttcacccataatggtctttcacttgtcattctactttctatattgttatcagtccaggaaacaggtaaacagatgtaattagagacattggctctttgtttaggcctaatctttctttttacttttttttttcttttttctttttttttaaagatcatgaatttgtgacttagttctgccctttggagaacaaaagaaagcagtcttccatcaaatcaccttaaaatgcacggctaaactattcagagttaacactccagaattgttaaattacaagtactatgctttaatgcttctttcatcttactagtatggcctataaaaaaaataataccacttgatgggtgaaggctttggcaatagaaagaagaatagaattcaggttttatgttattcctctgtgttcacttcgccttgctcttgaaagtgcagtatttttctacatcatgtcaagaatgattcaatgtaaatatttttcattttatcatgtatatcctatacacacatctccttcatcatcatatatgaagtttattttgagaagtctacattgcttacattttaattgagccagcaaagaaggcttaatgatttattgaaccataatgtcaataaaaacacaacttttgaggc

SEQ ID NO: 1024 - DNA, 2253 bp, Homo sapiens
  source 1..2253: mol_type = unassigned DNA
atggaatgctgccgtcgggcaactcctggcacactgctcctctttctggctttcctgctcctgagttccaggaccgcacgctccgaggaggaccgggacggcctatgggatgcctggggcccatggagtgaatgctcacgcacctgcgggggtggggcctcctactctctgaggcgctgcctgagcagcaagagctgtgaaggaagaaatatccgatacagaacatgcagtaatgtggactgcccaccagaagcaggtgatttccgagctcagcaatgctcagctcataatgatgtcaagcaccatggccagttttatgaatggcttcctgtgtctaatgaccctgacaacccatgttcactcaagtgccaagccaaaggaacaaccctggttgttgaactagcacctaaggtcttagatggtacgcgttgctatacagaatctttggatatgtgcatcagtggtttatgccaaattgttggctgcgatcaccagctgggaagcaccgtcaaggaagataactgtggggtctgcaacggagatgggtccacctgccggctggtccgagggcagtataaatcccagctctccgcaaccaaatcggatgatactgtggttgcaattccctatggaagtagacatattcgccttgtcttaaaaggtcctgatcacttatatctggaaaccaaaaccctccaggggactaaaggtgaaaacagtctcagctccacaggaactttccttgtggacaattctagtgtggacttccagaaatttccagacaaagagatactgagaatggctggaccactcacagcagatttcattgtcaagattcgtaactcgggctccgctgacagtacagtccagttcatcttctatcaacccatcatccaccgatggagggagacggatttctttccttgctcagcaacctgtggaggaggttatcagctgacatcggctgagtgctacgatctgaggagcaaccgtgtggttgctgaccaatactgtcactattacccagagaacatcaaacccaaacccaagcttcaggagtgcaacttggatccttgtccagccagtgacggatacaagcagatcatgccttatgacctctaccatccccttcctcggtgggaggccaccccatggaccgcgtgctcctcctcgtgtggggggggcatccagagccgggcagtttcctgtgtggaggaggacatccaggggcatgtcacttcagtggaagagtggaaatgcatgtacacccctaagatgcccatcgcgcagccctgcaacatttttgactgccctaaatggctggcacaggagtggtctccgtgcacagtgacatgtggccagggcctcagataccgtgtggtcctctgcatcgaccatcgaggaatgcacacaggaggctgtagcccaaaaacaaagccccacataaaagaggaatgcatcgtacccactccctgctataaacccaaagagaaacttccagtcgaggccaagttgccatggttcaaacaagctcaagagctagaagaaggagctgctgtgtcagaggagccctcgttcatcccagaggcctggtcggcctgcacagtcacctgtggtgtggggacccaggtgcgaatagtcaggtgccaggtgctcctgtctttctctcagtccgtggctgacctgcctattgacgagtgtgaagggcccaagccagcatcccagcgtgcctgttatgcaggcccatgcagcggggaaattcctgagttcaacccagacgagacagatgggctctttggtggcctgcaggatttcgacgagctgtatgactgggagtatgaggggttcaccaagtgctccgagtcctgtggaggaggtgtccaggaggctgtggtgagctgcttgaacaaacagactcgggagcctgctgaggagaacctgtgcgtgaccagccgccggcccccacagctcctgaagtcctgcaatttggatccctgcccagcaagaagcagtatcgactcagcatggaacgcctgcaacgttctttgttaggcaaccaagaggcctggcttctcatcctgctgtcaccaactagctctgtggcctagggcgaggtgtctgccctttatgtttccacatctgcaaagtgaactggttgtacctgatgatctgagatcccatgacttgctcacatgtcccatgattctttattttgtaggcagaagcattaaacagctactcctgctgctgtgt

SEQ ID NO: 1025 - DNA, 3800 bp, Homo sapiens
  source 1..3800: mol_type = unassigned DNA
atgtgtttgactgatgagtggggtttttttttttttttcttcctaggagtgcctgaagctgaagtcacttggttcaggaataaaagcaaactgggctccccgcaccatctgcacgaaggctccttgctgctcacaaacgtgtcctcctcggatcagggcctgtactcctgcagggcggccaatcttcatggagagctgactgagagcacccagctgctgatcctagatcccccccaagtccccacacagttggaagacatcagggccttgctcgctgccactggaccgaaccttccttcagtgctgacgtctcctctgggaacacagctggtcctggatcctgggaattctgctctccttggctgccccatcaaaggtcaccctgtccctaatatcacctggtttcatggtggtcagccaattgtcactgccacaggactgacgcatcacatcttggcagctggacagatccttcaagttgcaaaccttagcggtgggtctcaaggggaattcagctgccttgctcagaatgaggcaggggtgctcatgcagaaggcatctttagtgatccaagattactggtggtctgtggacagactggcaacctgctcagcctcctgtggtaaccggggggttcagcagccccgcttgaggtgcctgctgaacagcacggaggtcaaccctgcccactgcgcagggaaggttcgccctgcggtgcagcccatcgcgtgcaaccggagagactgcccttctcggtggatggtgacctcctggtctgcctgtacccggagctgtgggggaggtgtccagacccgcagggtgacctgtcaaaagctgaaagcctctgggatctccacccctgtgtccaatgacatgtgcacccaggtcgccaagcggcctgtggacacccaggcctgtaaccagcagctgtgtgtggagtgggccttctccagctggggccagtgcaatgggccttgcatcgggcctcacctagctgtgcaacacagacaagtcttctgccagacacgggatggcatcaccttaccatcagagcagtgcagtgctcttccgaggcctgtgagcacccagaactgctggtcagaggcctgcagtgtacactggagagtcagcctgtggaccctgtgcacagctacctgtggcaactacggcttccagtcccggcgtgtggagtgtgtgcatgcccgcaccaacaaggcagtgcctgagcacctgtgctcctgggggccccggcctgccaactggcagcgctgcaacatcaccccatgtgaaaacatggagtgcagagacaccaccaggtactgcgagaaggtgaaacagctgaaactctgccaactcagccagtttaaatctcgctgctgtggaacttgtggcaaagcgtgaagatagggtgtggggaaaaactctaccctggccacacgaaggactcacgcaaccacctcggacagaacctaagctttcttcattttatttatttatttccccctccccactccacacacacccttccaacctcctccacctccaccttcaagcataaggacgtccgcgtgttttctctttcagttagctggaggacaggatgttgggaaaggaaaggacagatgtctaaaggaggttgcagagcaggccaggcagacagtgggggctcccttgaagagcttcctccctcccaaacctgggtctcaaagacctagaaagaggcaggcacagcccctgcggacagcagggagccagaaggtttgtagcctattggtgcaaacattggacaaattcctgtgtctttcctagaagcgcactatcacaaacacaggagtgttttgctcctttgtctcctcttccccatctatgtccctttagtcacagttaggacaaatggggaggggacaccatgctgaggcagaaactagcccagaactcactcagttcttctagtgggtgagtgcagagagagaagaactcagatcaccagtagggagaggtaaaaaagcaaacaaagcaggctctaaggcacacaacattgcagaaaatgaggaagggaggggagggaagggacagaagcaaaaaggagcctgtggtgttccccagtggggcagggtgagcaggggcttccaggctgcatgaggctcatggaccagctctgatcccatgcatgtgcgcatgctcagagccctgctgcccacaacagagcactgcgctgcgtgggagtccccacttcccaagctatcagagtcaacgtcctgcctgtgcagctgcagcaaagccagtgagaggtgggtctcgccatgcagtaaggccaccctggcacctctttatctaaatccgaagtcccctagccccgcactaactaactgctgctgtgggccagggccattttgagcatgaatggcccaggttttttgccttctaggacctttgctgctccaccgaagggccagggactatggttaacttatcaacatcaacccattaactagtcactgtgccagagagtatctgtcaggctgtcaggttgtagcaacctcttcattccagagctggcccagggaccggggtgggacaatgggtttatgcgtgtccacagtacaccctccctctcccagcctccaccccagggtctgcaggtcctccggcatgtagtatttatctagcaaggcggggtggtggaggcagcaccctggcaaagcagctcacacactgcagccacactcatcagctgtggtgaggcggctggagcaaagtcaaagtcatgcagcaaaatgaaaactctgggactcttcggcaaaatcctcattaagccgagcagctttggccaagtaatttttgcctccttccctcgcgtggcctgagtttaggagcaagggtggccagagtcccttacccacagataagcctcccctcatgaaatgccactcaccccgggctaccattgacatcagggctgcatttccagccagcctggaagtaaaatttgagaggaagacaatattaatctgtgtccccacctagtgagctgtggacaggtttaagttgggtctccttcttcttcaccacaaaaacaggctctaagaaatcatgttactaaaaaatcagtgtaaagtctgtttaaaataaaaaagaatgttttctatgtctgtatatcttttgtgaatatttattaggatttcttattaaaaaagtgcaatattaataattgtacattgtcatccagaaacaaaactattggggggactttattaactaacttcctgcagttgtgttcctgtaaactcagtagtgattattatatttttcctatttttaatagaacctggtgtttaactctggatccattcactgtacaggatgtgttgtaaaaactaacatgggatgctgaggcagtaagagggaattcatttgtggcataatagttatgcatggaatgataaagacagacaaattccatactactactaatgtggttaattatttctagttcgatagtgattgaaaatcagtggtcactatttacatttcctaaagagcaagcatcctccagctccatgttgggttggagcagttggcagtgggtctcagtgagctggcagaacctaggtttgggtgggaagcagaatgctcgttgcatgaaatgaatgtacatttaatgtttgttctgtgaattgcaactcagcagcaccacaagacaatgaaggctgctggctaatgtggaaggaggcactttctcctctaaaacacaaaactgtatttgtattttttgtacagataatacagcttatttattt

SEQ ID NO: 1026 - DNA, 1864 bp, Homo sapiens
  source 1..1864: mol_type = unassigned DNA
aaatgtgagaggggctgatggaagctgataggcaggactggagtgttagcaccagtactggatgtgacagcaggcagaggagcacttagcagcttattcagtgtccgattctgattccggcaaggatccaagcatggaatgctgccgtcgggcaactcctggcacactgctcctctttctggctttcctgctcctgagttccaggaccgcacgctccgaggaggaccgggacggcctatgggatgcctggggcccatggagtgaatgctcacgcacctgcgggggtggggcctcctactctctgaggcgctgcctgagcagcaagagctgtgaaggaagaaatatccgatacagaacatgcagtaatgtggactgcccaccagaagcaggtgatttccgagctcagcaatgctcagctcataatgatgtcaagcaccatggccagttttatgaatggcttcctgtgtctaatgaccctgacaacccatgttcactcaagtgccaagccaaaggaacaaccctggttgttgaactagcacctaaggtcttagatggtacgcgttgctatacagaatctttggatatgtgcatcagtggtttatgccaaattgttggctgcgatcaccagctgggaagcaccgtcaaggaagataactgtggggtctgcaacggagatgggtccacctgccggctggtccgagggcagtataaatcccagctctccgcaaccaaatcggatgatactgtggttgcaattccctatggaagtagacatattcgccttgtcttaaaaggtcctgatcacttatatctggaaaccaaaaccctccaggggactaaaggtgaaaacagtctcagctccacaggaactttccttgtggacaattctagtgtggacttccagaaatttccagacaaagagatactgagaatggctggaccactcacagcagatttcattgtcaagattcgtaactcgggctccgctgacagtacagtccagttcatcttctatcaacccatcatccaccgatggagggagacggatttctttccttgctcagcaacctgtggaggaggttatcagctgacatcggctgagtgctacgatctgaggagcaaccgtgtggttgctgaccaatactgtcactattacccagagaacatcaaacccaaacccaagcttcaggagtgcaacttggatccttgtccagccagtgacggatacaagcagatcatgccttatgacctctaccatccccttcctcggtgggaggccaccccatggaccgcgtgctcctcctcgtgtggggggggcatccagagccgggcagtttcctgtgtggaggaggacatccaggggcatgtcacttcagtggaagagtggaaatgcatgtacacccctaagatgcccatcgcgcagccctgcaacatttttgactgccctaaatggctggcacaggagtggtctccgtgcacagtgacatgtggccagggcctcagataccgtgtggtcctctgcatcgaccatcgaggaatgcacacaggaggctgtagcccaaaaacaaagccccacataaaagaggaatgcatcgtacccactccctgctataaacccaaagagaaacttccagtcgaggccaagttgccatggttcaaacaagctcaagagctagaagaaggagctgctgtgtcagaggagccctcgtaagttgtaaaagcacagactgttctatatttgaaactgttttgtttaaagaaagcagtgtctcactggttgtagctttcatgggttctgaactaagtgtaatcatctcaccaaagctttttggctctcaaattaaagattgattagtttcaaaaa

SEQ ID NO: 1027 - DNA, 3592 bp, Homo sapiens
  source 1..3592: mol_type = unassigned DNA
atgtgtttgactgatgagtggggtttttttttttttttcttcctaggagtgcctgaagctgaagtcacttggttcaggaataaaagcaaactgggctccccgcaccatctgcacgaaggctccttgctgctcacaaacgtgtcctcctcggatcagggcctgtactcctgcagggcggccaatcttcatggagagctgactgagagcacccagctgctgatcctagatcccccccaagtccccacacagttggaagacatcagggccttgctcgctgccactggaccgaaccttccttcagtgctgacgtctcctctgggaacacagctggtcctggatcctgggaattctgctctccttggctgccccatcaaaggtcaccctgtccctaatatcacctggtttcatggtggtcagccaattgtcactgccacaggactgacgcatcacatcttggcagctggacagatccttcaagttgcaaaccttagcggtgggtctcaaggggaattcagctgccttgctcagaatgaggcaggggtgctcatgcagaaggcatctttagtgatccaagattactggtggtctgtggacagactggcaacctgctcagcctcctgtggtaaccggggggttcagcagccccgcttgaggtgcctgctgaacagcacggaggtcaaccctgcccactgcgcagggaaggttcgccctgcggtgcagcccatcgcgtgcaaccggagagactgcccttctcgtgcaatgggccttgcatcgggcctcacctagctgtgcaacacagacaagtcttctgccagacacgggatggcatcaccttaccatcagagcagtgcagtgctcttccgaggcctgtgagcacccagaactgctggtcagaggcctgcagtgtacactggagagtcagcctgtggaccctgtgcacagctacctgtggcaactacggcttccagtcccggcgtgtggagtgtgtgcatgcccgcaccaacaaggcagtgcctgagcacctgtgctcctgggggccccggcctgccaactggcagcgctgcaacatcaccccatgtgaaaacatggagtgcagagacaccaccaggtactgcgagaaggtgaaacagctgaaactctgccaactcagccagtttaaatctcgctgctgtggaacttgtggcaaagcgtgaagatagggtgtggggaaaaactctaccctggccacacgaaggactcacgcaaccacctcggacagaacctaagctttcttcattttatttatttatttccccctccccactccacacacacccttccaacctcctccacctccaccttcaagcataaggacgtccgcgtgttttctctttcagttagctggaggacaggatgttgggaaaggaaaggacagatgtctaaaggaggttgcagagcaggccaggcagacagtgggggctcccttgaagagcttcctccctcccaaacctgggtctcaaagacctagaaagaggcaggcacagcccctgcggacagcagggagccagaaggtttgtagcctattggtgcaaacattggacaaattcctgtgtctttcctagaagcgcactatcacaaacacaggagtgttttgctcctttgtctcctcttccccatctatgtccctttagtcacagttaggacaaatggggaggggacaccatgctgaggcagaaactagcccagaactcactcagttcttctagtgggtgagtgcagagagagaagaactcagatcaccagtagggagaggtaaaaaagcaaacaaagcaggctctaaggcacacaacattgcagaaaatgaggaagggaggggagggaagggacagaagcaaaaaggagcctgtggtgttccccagtggggcagggtgagcaggggcttccaggctgcatgaggctcatggaccagctctgatcccatgcatgtgcgcatgctcagagccctgctgcccacaacagagcactgcgctgcgtgggagtccccacttcccaagctatcagagtcaacgtcctgcctgtgcagctgcagcaaagccagtgagaggtgggtctcgccatgcagtaaggccaccctggcacctctttatctaaatccgaagtcccctagccccgcactaactaactgctgctgtgggccagggccattttgagcatgaatggcccaggttttttgccttctaggacctttgctgctccaccgaagggccagggactatggttaacttatcaacatcaacccattaactagtcactgtgccagagagtatctgtcaggctgtcaggttgtagcaacctcttcattccagagctggcccagggaccggggtgggacaatgggtttatgcgtgtccacagtacaccctccctctcccagcctccaccccagggtctgcaggtcctccggcatgtagtatttatctagcaaggcggggtggtggaggcagcaccctggcaaagcagctcacacactgcagccacactcatcagctgtggtgaggcggctggagcaaagtcaaagtcatgcagcaaaatgaaaactctgggactcttcggcaaaatcctcattaagccgagcagctttggccaagtaatttttgcctccttccctcgcgtggcctgagtttaggagcaagggtggccagagtcccttacccacagataagcctcccctcatgaaatgccactcaccccgggctaccattgacatcagggctgcatttccagccagcctggaagtaaaatttgagaggaagacaatattaatctgtgtccccacctagtgagctgtggacaggtttaagttgggtctccttcttcttcaccacaaaaacaggctctaagaaatcatgttactaaaaaatcagtgtaaagtctgtttaaaataaaaaagaatgttttctatgtctgtatatcttttgtgaatatttattaggatttcttattaaaaaagtgcaatattaataattgtacattgtcatccagaaacaaaactattggggggactttattaactaacttcctgcagttgtgttcctgtaaactcagtagtgattattatatttttcctatttttaatagaacctggtgtttaactctggatccattcactgtacaggatgtgttgtaaaaactaacatgggatgctgaggcagtaagagggaattcatttgtggcataatagttatgcatggaatgataaagacagacaaattccatactactactaatgtggttaattatttctagttcgatagtgattgaaaatcagtggtcactatttacatttcctaaagagcaagcatcctccagctccatgttgggttggagcagttggcagtgggtctcagtgagctggcagaacctaggtttgggtgggaagcagaatgctcgttgcatgaaatgaatgtacatttaatgtttgttctgtgaattgcaactcagcagcaccacaagacaatgaaggctgctggctaatgtggaaggaggcactttctcctctaaaacacaaaactgtatttgtattttttgtacagataatacagcttatttattt

SEQ ID NO: 1028 - DNA, 8030 bp, Homo sapiens
  source 1..8030: mol_type = unassigned DNA
tttcccttctcgctctgctgctcgctcgcctttctttttcgtccttttcccccttttttgctcgcaccgttacactttctctgtcctcctggctttgttattcagcatgtctgattagcaggagcctgattggctggctgcctgctccgagagagattccattcagcttaccccccacccatccacccacccacccctcggtcaggaaatgtgagaggggctgatggaagctgataggcaggactggagtgttagcaccagtactggatgtgacagcaggcagaggagcacttagcagcttattcagtgtccgattctgattccggcaaggatccaagcatggaatgctgccgtcgggcaactcctggcacactgctcctctttctggctttcctgctcctgagttccaggaccgcacgctccgaggaggaccgggacggcctatgggatgcctggggcccatggagtgaatgctcacgcacctgcgggggtggggcctcctactctctgaggcgctgcctgagcagcaagagctgtgaaggaagaaatatccgatacagaacatgcagtaatgtggactgcccaccagaagcaggtgatttccgagctcagcaatgctcagctcataatgatgtcaagcaccatggccagttttatgaatggcttcctgtgtctaatgaccctgacaacccatgttcactcaagtgccaagccaaaggaacaaccctggttgttgaactagcacctaaggtcttagatggtacgcgttgctatacagaatctttggatatgtgcatcagtggtttatgccaaattgttggctgcgatcaccagctgggaagcaccgtcaaggaagataactgtggggtctgcaacggagatgggtccacctgccggctggtccgagggcagtataaatcccagctctccgcaaccaaatcggatgatactgtggttgcaattccctatggaagtagacatattcgccttgtcttaaaaggtcctgatcacttatatctggaaaccaaaaccctccaggggactaaaggtgaaaacagtctcagctccacaggaactttccttgtggacaattctagtgtggacttccagaaatttccagacaaagagatactgagaatggctggaccactcacagcagatttcattgtcaagattcgtaactcgggctccgctgacagtacagtccagttcatcttctatcaacccatcatccaccgatggagggagacggatttctttccttgctcagcaacctgtggaggaggttatcagctgacatcggctgagtgctacgatctgaggagcaaccgtgtggttgctgaccaatactgtcactattacccagagaacatcaaacccaaacccaagcttcaggagtgcaacttggatccttgtccagccagtgacggatacaagcagatcatgccttatgacctctaccatccccttcctcggtgggaggccaccccatggaccgcgtgctcctcctcgtgtggggggggcatccagagccgggcagtttcctgtgtggaggaggacatccaggggcatgtcacttcagtggaagagtggaaatgcatgtacacccctaagatgcccatcgcgcagccctgcaacatttttgactgccctaaatggctggcacaggagtggtctccgtgcacagtgacatgtggccagggcctcagataccgtgtggtcctctgcatcgaccatcgaggaatgcacacaggaggctgtagcccaaaaacaaagccccacataaaagaggaatgcatcgtacccactccctgctataaacccaaagagaaacttccagtcgaggccaagttgccatggttcaaacaagctcaagagctagaagaaggagctgctgtgtcagaggagccctcgttcatcccagaggcctggtcggcctgcacagtcacctgtggtgtggggacccaggtgcgaatagtcaggtgccaggtgctcctgtctttctctcagtccgtggctgacctgcctattgacgagtgtgaagggcccaagccagcatcccagcgtgcctgttatgcaggcccatgcagcggggaaattcctgagttcaacccagacgagacagatgggctctttggtggcctgcaggatttcgacgagctgtatgactgggagtatgaggggttcaccaagtgctccgagtcctgtggaggaggtgtccaggaggctgtggtgagctgcttgaacaaacagactcgggagcctgctgaggagaacctgtgcgtgaccagccgccggcccccacagctcctgaagtcctgcaatttggatccctgcccagcaaggtgggaaattggcaagtggagtccatgtagtctcacatgtggggtcggcctacagaccagagacgtcttctgcagccacctgctttccagagagatgaatgaaacagtcatcctggctgatgagctgtgtcgccagcccaagcccagcacggtgcaagcttgtaaccgctttaattgccccccagcctggtaccctgcacagtggcagccgtgttccagaacgtgtggcgggggtgttcagaaacgtgaggttctttgcaagcagcgcatggctgatggcagcttcctggagcttcctgagaccttctgttcagcttcaaaacctgcctgccagcaagcatgcaagaaagatgactgtcccagcgagtggcttctctcagactggacagagtgttccacaagctgcggggaaggcacccagactcgaagcgccatttgccgaaagatgctgaaaaccggcctctcaacggttgtcaattccaccctgtgcccgcccctgcctttctcttcctccatcaggccctgtatgctggcaacctgtgcaaggcccgggcggccatccacgaagcacagcccgcacatcgcggccgccaggaaggtctacatacagactcgcaggcagaggaagctgcacttcgtggtggggggcttcgcctacctgctccccaagacggcggtggtgctgcgctgcccggcgcgcagggtccgcaagcccctcatcacctgggagaaggacggccagcacctcatcagctcgacgcacgtcacggtggcccccttcggctatctcaagatccaccgcctcaagccctcggatgcaggcgtctacacctgctcagcgggcccggcccgggagcactttgtgattaagctcatcggaggcaaccgcaagctcgtggcccggcccttgagcccgagaagtgaggaagaggtgcttgcggggaggaagggcggcccgaaggaggccctgcagacccacaaacaccagaacgggatcttctccaacggcagcaaggcggagaagcggggcctggccgccaacccggggagccgctacgacgacctcgtctcccggctgctggagcagggcggctggcccggagagctgctggcctcgtgggaggcgcaggactctgcggaaaggaacacgacctcggaggaggacccgggtgcagagcaagtgctcctgcacctgcccttcaccatggtgaccgagcagcggcgcctggacgacatcctggggaacctctcccagcagcccgaggagctgcgcgacctctacagcaagcacctggtggcccagctggcccaggagatcttccgcagccacctggagcaccaggacacgctcctgaagccctcggagcgcaggacttccccagtgactctctcgcctcataaacacgtgtctggcttcagcagctccctgcggacctcctccaccggggacgccgggggaggctctcgaaggccacaccgcaagcccaccatcctgcgcaagatctcagcggcccagcagctctcagcctcggaggtggtcacccacctggggcagacggtggccctggccagcgggacactgagtgttcttctgcactgtgaggccatcggccacccaaggcctaccatcagctgggccaggaatggagaagaagttcagttcagtgacaggattcttctacagccagatgattccttacagatcttggcaccagtggaagcagatgtgggtttctacacttgcaatgccaccaatgccttgggatacgactctgtctccattgccgtcacattagcaggaaagccactagtgaaaacgtcacgaatgacagtgatcaacacggagaagcctgcagtcacagtcgatataggaagcaccatcaaaacagtgcagggagtgaatgtgacaatcaactgccaggttgcaggagtgcctgaagctgaagtcacttggttcaggaataaaagcaaactgggctccccgcaccatctgcacgaaggctccttgctgctcacaaacgtgtcctcctcggatcagggcctgtactcctgcagggcggccaatcttcatggagagctgactgagagcacccagctgctgatcctagatcccccccaagtccccacacagttggaagacatcagggccttgctcgctgccactggaccgaaccttccttcagtgctgacgtctcctctgggaacacagctggtcctggatcctgggaattctgctctccttggctgccccatcaaaggtcaccctgtccctaatatcacctggtttcatggtggtcagccaattgtcactgccacaggactgacgcatcacatcttggcagctggacagatccttcaagttgcaaaccttagcggtgggtctcaaggggaattcagctgccttgctcagaatgaggcaggggtgctcatgcagaaggcatctttagtgatccaagattactggtggtctgtggacagactggcaacctgctcagcctcctgtggtaaccggggggttcagcagccccgcttgaggtgcctgctgaacagcacggaggtcaaccctgcccactgcgcagggaaggttcgccctgcggtgcagcccatcgcgtgcaaccggagagactgcccttctcggtggatggtgacctcctggtctgcctgtacccggagctgtgggggaggtgtccagacccgcagggtgacctgtcaaaagctgaaagcctctgggatctccacccctgtgtccaatgacatgtgcacccaggtcgccaagcggcctgtggacacccaggcctgtaaccagcagctgtgtgtggagtgggccttctccagctggggccagtgcaatgggccttgcatcgggcctcacctagctgtgcaacacagacaagtcttctgccagacacgggatggcatcaccttaccatcagagcagtgcagtgctcttccgaggcctgtgagcacccagaactgctggtcagaggcctgcagtgtacactggagagtcagcctgtggaccctgtgcacagctacctgtggcaactacggcttccagtcccggcgtgtggagtgtgtgcatgcccgcaccaacaaggcagtgcctgagcacctgtgctcctgggggccccggcctgccaactggcagcgctgcaacatcaccccatgtgaaaacatggagtgcagagacaccaccaggtactgcgagaaggtgaaacagctgaaactctgccaactcagccagtttaaatctcgctgctgtggaacttgtggcaaagcgtgaagatagggtgtggggaaaaactctaccctggccacacgaaggactcacgcaaccacctcggacagaacctaagctttcttcattttatttatttatttccccctccccactccacacacacccttccaacctcctccacctccaccttcaagcataaggacgtccgcgtgttttctctttcagttagctggaggacaggatgttgggaaaggaaaggacagatgtctaaaggaggttgcagagcaggccaggcagacagtgggggctcccttgaagagcttcctccctcccaaacctgggtctcaaagacctagaaagaggcaggcacagcccctgcggacagcagggagccagaaggtttgtagcctattggtgcaaacattggacaaattcctgtgtctttcctagaagcgcactatcacaaacacaggagtgttttgctcctttgtctcctcttccccatctatgtccctttagtcacagttaggacaaatggggaggggacaccatgctgaggcagaaactagcccagaactcactcagttcttctagtgggtgagtgcagagagagaagaactcagatcaccagtagggagaggtaaaaaagcaaacaaagcaggctctaaggcacacaacattgcagaaaatgaggaagggaggggagggaagggacagaagcaaaaaggagcctgtggtgttccccagtggggcagggtgagcaggggcttccaggctgcatgaggctcatggaccagctctgatcccatgcatgtgcgcatgctcagagccctgctgcccacaacagagcactgcgctgcgtgggagtccccacttcccaagctatcagagtcaacgtcctgcctgtgcagctgcagcaaagccagtgagaggtgggtctcgccatgcagtaaggccaccctggcacctctttatctaaatccgaagtcccctagccccgcactaactaactgctgctgtgggccagggccattttgagcatgaatggcccaggttttttgccttctaggacctttgctgctccaccgaagggccagggactatggttaacttatcaacatcaacccattaactagtcactgtgccagagagtatctgtcaggctgtcaggttgtagcaacctcttcattccagagctggcccagggaccggggtgggacaatgggtttatgcgtgtccacagtacaccctccctctcccagcctccaccccagggtctgcaggtcctccggcatgtagtatttatctagcaaggcggggtggtggaggcagcaccctggcaaagcagctcacacactgcagccacactcatcagctgtggtgaggcggctggagcaaagtcaaagtcatgcagcaaaatgaaaactctgggactcttcggcaaaatcctcattaagccgagcagctttggccaagtaatttttgcctccttccctcgcgtggcctgagtttaggagcaagggtggccagagtcccttacccacagataagcctcccctcatgaaatgccactcaccccgggctaccattgacatcagggctgcatttccagccagcctggaagtaaaatttgagaggaagacaatattaatctgtgtccccacctagtgagctgtggacaggtttaagttgggtctccttcttcttcaccacaaaaacaggctctaagaaatcatgttactaaaaaatcagtgtaaagtctgtttaaaataaaaaagaatgttttctatgtctgtatatcttttgtgaatatttattaggatttcttattaaaaaagtgcaatattaataattgtacattgtcatccagaaacaaaactattggggggactttattaactaacttcctgcagttgtgttcctgtaaactcagtagtgattattatatttttcctatttttaatagaacctggtgtttaactctggatccattcactgtacaggatgtgttgtaaaaactaacatgggatgctgaggcagtaagagggaattcatttgtggcataatagttatgcatggaatgataaagacagacaaattccatactactactaatgtggttaattatttctagttcgatagtgattgaaaatcagtggtcactatttacatttcctaaagagcaagcatcctccagctccatgttgggttggagcagttggcagtgggtctcagtgagctggcagaacctaggtttgggtgggaagcagaatgctcgttgcatgaaatgaatgtacatttaatgtttgttctgtgaattgcaactcagcagcaccacaagacaatgaaggctgctggctaatgtggaaggaggcactttctcctctaaaacacaaaactgtatttgtattttttgtacagataatacagcttatttatttaaa

SEQ ID NO: 1029 - DNA, 2321 bp, Homo sapiens
  source 1..2321: mol_type = unassigned DNA
gcaggcagaggagcacttagcagcttattcagtgtccgattctgattccggcaaggatccaagcatggaatgctgccgtcgggcaactcctggcacactgctcctctttctggctttcctgctcctgagttccaggaccgcacgctccgaggaggaccgggacggcctatgggatgcctggggcccatggagtgaatgctcacgcacctgcgggggtggggcctcctactctctgaggcgctgcctgagcagcaagagctgtgaaggaagaaatatccgatacagaacatgcagtaatgtggactgcccaccagaagcaggtgatttccgagctcagcaatgctcagctcataatgatgtcaagcaccatggccagttttatgaatggcttcctgtgtctaatgaccctgacaacccatgttcactcaagtgccaagccaaaggaacaaccctggttgttgaactagcacctaaggtcttagatggtacgcgttgctatacagaatctttggatatgtgcatcagtggtttatgccaaattgttggctgcgatcaccagctgggaagcaccgtcaaggaagataactgtggggtctgcaacggagatgggtccacctgccggctggtccgagggcagtataaatcccagctctccgcaaccaaatcggatgatactgtggttgcaattccctatggaagtagacatattcgccttgtcttaaaaggtcctgatcacttatatctggaaaccaaaaccctccaggggactaaaggtgaaaacagtctcagctccacaggaactttccttgtggacaattctagtgtggacttccagaaatttccagacaaagagatactgagaatggctggaccactcacagcagatttcattgtcaagattcgtaactcgggctccgctgacagtacagtccagttcatcttctatcaacccatcatccaccgatggagggagacggatttctttccttgctcagcaacctgtggaggaggttatcagctgacatcggctgagtgctacgatctgaggagcaaccgtgtggttgctgaccaatactgtcactattacccagagaacatcaaacccaaacccaagcttcaggagtgcaacttggatccttgtccagccaggtgggaggccaccccatggaccgcgtgctcctcctcgtgtggggggggcatccagagccgggcagtttcctgtgtggaggaggacatccaggggcatgtcacttcagtggaagagtggaaatgcatgtacacccctaagatgcccatcgcgcagccctgcaacatttttgactgccctaaatggctggcacaggagtggtctccggtaactgtgccttctttctttgttcattaggagagtaagtccactcttccctctcatcatcatggccccaccgggtaccctgagcagctccacactcttcttgaggtgtctagaagcctaccagcttagctcctggagtaggaatgccccaaatccagcatgaccaaaagtaaatgatgtttttttaaagtgtctttcttcaagtttcttcaagaagcctctattgttccccagataatgttccctcaaatagcacggggaagcaactgcctttcaagggtaattgaggctgaatgaatgatcccgaatctgtaaaagctgctttgatgatagagctcagtagaccagaagtttgatttcattttgtatgtattatgctttgtatccgaaagggtctaagtggattaatattaaaactatgtatattaatcattggagaagggggaagaggaaatgaaaatagcacaaaaattaaaattggaacgaagtaagataattaaaacaaaaaacttatagatgttaggaaacctgctgtaattaaacataaaatgtcattcagggtttcctgactgctaatgcagaaaggaaaatcgtaaaggaaacagaaagatgaaataagccattgtgccctccgcctcagaaatgacaaaagactcttcactgagccctgtggcttcatggcagcagatcagagctgtgacattttctacatctagacatgctaccagacatggggaaccattagaggtgcaatctacattgggcatctggtcattcaatctgtttttttaaatgttatttttgcctttcaatgtaatcaattggattaacaatgctgcaatataatttagctataatcgtagtttaaattttttgatatccatgtaggggtatttcccatatttttggaagtagcggtcattagcaaagtaactaaataaaatacagtgctggtagtcaaaattaa

SEQ ID NO: 1030 - DNA, 4068 bp, Homo sapiens
  source 1..4068: mol_type = unassigned DNA
cactggcggagaaaatccccttcttttttttctctctctttttttctttttgagacggaatctcactctttcacccagactggagggcagcggcgagatctcggctcactgcaacctccacctcccaggttcaagcaattctcctgcctcagccttccgagtagctgggattacaggtgcccgccaccacgcccagctaatttttgtatttttagtagagacaggattttaccatgttggccatgctggtctcaaactcctgacctcgtgtgatccccctgcttcagcctctcaaactgctgggattataggcatgagccactgcgcctggccaacaatccccttctaaaggcaggtggtgtctccagcaccagggccatacggctgcaacacccctacaagtgccgggtctgccagacaaccacgaccaactagtcccagataaccttgaggcctgggcactggctgggccccgagggctcttcccaaagcgtaccctggtcatctggaagaggatcggagctggcctggtggtgacagtggccttgcttcctaggatggatggcagatggcaatgttcctgctgggcctggttcctgctggttctggcagttgtagctggggacacagtgtcaaccgggtccacggacaacagcccaacatccaatagcctggaggggggcaccgacgccacggccttctggtggggggagtggaccaagtggacggcgtgttcccgcagttgcgggggtggggtgacatcccaggagcggcactgcctgcagcagaggaggaagtccgtcccgggccccgggaacaggacctgcacgggcacgtccaagcggtaccagctctgcagagtgcaggagtgtccgccggacgggaggagcttccgcgaggagcagtgcgtctccttcaactcccacgtgtacaacgggcggacgcaccagtggaagcctctgtacccggatgactatgtccacatctccagcaaaccgtgtgacctgcactgtaccaccgtggacggccagcggcagctcatggtccccgcccgcgacggcacatcctgcaagctcactgacctgcgaggggtttgcgtgtctggaaaatgtgagcccatcggctgtgacggggtgcttttctccacccacacactggacaagtgtggcatctgccagggggacggtagcagctgcacccacgtgacgggcaactatcgcaaggggaatgcccaccttggttactctctggtgacccacatcccggctggtgcccgagacatccagattgtagagaggaagaagtccgctgacgtgctagctcttgcagacgaagctggctactacttcttcaacggcaactacaaggtggacagccccaagaacttcaacatcgcaggcacggtggtcaagtacaggcggcccatggatgtctatgagaccggaatcgagtacatcgtggcacaggggcccaccaaccagggcctgaatgtcatggtgtggaaccagaacggcaaaagcccctccatcaccttcgagtacacgctgctgcagccgccacacgagagccgcccccagcccatctactatggcttctccgagagcgctgagagccagggcctggacggggccgggctgatgggcttcgtcccgcacaacggctccctctacggccaggcctcctcagagcggctgggcctggacaaccggctgttcggccacccgggcctggacatggagctgggccccagccagggccaggagaccaacgaggtgtgcgagcaggccggcggcggggcctgcgaggggccccccaggggcaagggcttccgagaccgcaacgtcacggggactcctctcaccggggacaaggatgacgaagaggttgacacccacttcgcctcccaggagttcttctcggctaacgccatctctgaccagctgctgggcgcaggctctgacttgaaggacttcaccctcaatgagactgtgaacagcatctttgcacagggcgccccaaggagctccctggccgagagcttcttcgtggattatgaggagaacgagggggctggcccttacctgctcaacgggtcctacctggagctgagcagcgacagggttgccaacagctcctccgaggccccattccccaacgttagcaccagcctgctcacctcggccgggaacaggactcacaaggccaggaccaggcccaaggcgcgcaagcaaggcgtgagtcccgcggacatgtaccggtggaagctctcgtcccacgagccctgcagtgccacctgcaccacaggggtcatgtctgcgtacgccatgtgtgtccgctatgatggcgtcgaggtggatgacagctactgtgacgccctgacccgtcccgagcctgtccacgagttctgcgctgggagggagtgccagcccaggtgggagacgagcagctggagcgagtgttcgcgcacctgcggagagggctaccagttccgcgtcgtgcgctgctggaagatgctctcgcccggcttcgacagctccgtgtacagcgacctgtgcgaggcagccgaggccgtgcggcccgaggaacgcaagacctgccggaaccccgcctgcgggccccagtgggagatgtcggagtggtccgagtgcactgccaagtgtggggagcgcagtgtggtgaccagggacatccgctgctcggaggatgagaagctgtgtgaccccaacaccaggcctgtaggggagaagaactgcacgggcccgccctgtgaccggcagtggaccgtctccgactggggaccgtgcagtggaagctgcgggcaaggccgcaccatcaggcacgtgtactgcaagaccagcgacggacgggtagtacctgagtcccagtgccagatggagaccaagcctctggccatccacccctgtggggacaaaaactgtcccgcccactggctggcccaggactgggagcggtgcaacaccacctgcgggcgcggggtcaagaagcggctggtgctctgcatggagctggccaacgggaagccgcagacgcgcagtggccccgagtgcgggctcgccaagaagcctcccgaggagagcacgtgtttcgagaggccctgcttcaagtggtacaccagcccctggtcagagtgcaccaagacctgcggggtgggcgtgaggatgcgagacgtcaagtgctaccaggggaccgacatcgtccgtggttgcgatccgttggtgaagcccgttggcagacaggcctgtgatctgcagccctgccccacggagcccccagatgacagctgccaggaccagccaggcaccaactgtgccctggccatcaaagtgaacctctgcgggcactggtactacagcaaggcgtgctgccgctcctgcaggcccccccactcctaggcccggcagctgcagccccttccagatgaagaccaagcgcccctcctggggctgctgcagcttctggggcctccacagacccccctcctgcggggcacgctggcctaagagacgtggcactgagcctcggctgtcgagaggggacttcccacggcccgtggacctttgtgctcctggggcagagcctccggcacccagtggcctcccccagacagagccacccctgccgtgggaacctgtccgtgttcctgcgtggatcctgtgtttgtggctcccactccccagccccccagcagcccccagccgaggggcccagggcccacagccagcggtggaggtgtcttgctccgggcccgtagcccacgccctctctgggtggcagggccttctgaaggaaacttgcaggcgagcccaacgtggtggggggccttcctccctcagaggccatggggtgagaggggctcaggcagccaaggaggcccaggcgtgctccctcttatggagcccctcccatggagctctcttcccgccgcactttctaccccgggcagaggcgcttgcccacgggacgtttggggatggacctcggcccccgcccctgcagtcagcgtcagtgctcatctacgttaataaagtggtcctatttatggcggca

SEQ ID NO: 1031 - DNA, 3725 bp, Homo sapiens
  source 1..3725: mol_type = unassigned DNA
cgccgtctgccctccgcagcgctcgcccctttctctgggaggacaacctgctgacccgaagccagggtctgccagacaaccacgaccaactagtcccagataaccttgaggcctgggcactggctgggccccgagggctcttcccaaagcgtaccctggtcatctggaagaggatcggagctggcctggtggtgacagtggccttgcttcctaggatggatggcagatggcaatgttcctgctgggcctggttcctgctggttctggcagttgtagctggggacacagtgtcaaccgggtccacggacaacagcccaacatccaatagcctggaggggggcaccgacgccacggccttctggtggggggagtggaccaagtggacggcgtgttcccgcagttgcgggggtggggtgacatcccaggagcggcactgcctgcagcagaggaggaagtccgtcccgggccccgggaacaggacctgcacgggcacgtccaagcggtaccagctctgcagagtgcaggagtgtccgccggacgggaggagcttccgcgaggagcagtgcgtctccttcaactcccacgtgtacaacgggcggacgcaccagtggaagcctctgtacccggatgactatgtccacatctccagcaaaccgtgtgacctgcactgtaccaccgtggacggccagcggcagctcatggtccccgcccgcgacggcacatcctgcaagctcactgacctgcgaggggtttgcgtgtctggaaaatgtgagcccatcggctgtgacggggtgcttttctccacccacacactggacaagtgtggcatctgccagggggacggtagcagctgcacccacgtgacgggcaactatcgcaaggggaatgcccaccttggttactctctggtgacccacatcccggctggtgcccgagacatccagattgtagagaggaagaagtccgctgacgtgctagctcttgcagacgaagctggctactacttcttcaacggcaactacaaggtggacagccccaagaacttcaacatcgcaggcacggtggtcaagtacaggcggcccatggatgtctatgagaccggaatcgagtacatcgtggcacaggggcccaccaaccagggcctgaatgtcatggtgtggaaccagaacggcaaaagcccctccatcaccttcgagtacacgctgctgcagccgccacacgagagccgcccccagcccatctactatggcttctccgagagcgctgagagccagggcctggacggggccgggctgatgggcttcgtcccgcacaacggctccctctacggccaggcctcctcagagcggctgggcctggacaaccggctgttcggccacccgggcctggacatggagctgggccccagccagggccaggagaccaacgaggtgtgcgagcaggccggcggcggggcctgcgaggggccccccaggggcaagggcttccgagaccgcaacgtcacggggactcctctcaccggggacaaggatgacgaagaggttgacacccacttcgcctcccaggagttcttctcggctaacgccatctctgaccagctgctgggcgcaggctctgacttgaaggacttcaccctcaatgagactgtgaacagcatctttgcacagggcgccccaaggagctccctggccgagagcttcttcgtggattatgaggagaacgagggggctggcccttacctgctcaacgggtcctacctggagctgagcagcgacagggttgccaacagctcctccgaggccccattccccaacgttagcaccagcctgctcacctcggccgggaacaggactcacaaggccaggaccaggcccaaggcgcgcaagcaaggcgtgagtcccgcggacatgtaccggtggaagctctcgtcccacgagccctgcagtgccacctgcaccacaggggtcatgtctgcgtacgccatgtgtgtccgctatgatggcgtcgaggtggatgacagctactgtgacgccctgacccgtcccgagcctgtccacgagttctgcgctgggagggagtgccagcccaggtgggagacgagcagctggagcgagtgttcgcgcacctgcggagagggctaccagttccgcgtcgtgcgctgctggaagatgctctcgcccggcttcgacagctccgtgtacagcgacctgtgcgaggcagccgaggccgtgcggcccgaggaacgcaagacctgccggaaccccgcctgcgggccccagtgggagatgtcggagtggtccgagtgcactgccaagtgtggggagcgcagtgtggtgaccagggacatccgctgctcggaggatgagaagctgtgtgaccccaacaccaggcctgtaggggagaagaactgcacgggcccgccctgtgaccggcagtggaccgtctccgactggggaccgtgcagtggaagctgcgggcaaggccgcaccatcaggcacgtgtactgcaagaccagcgacggacgggtagtacctgagtcccagtgccagatggagaccaagcctctggccatccacccctgtggggacaaaaactgtcccgcccactggctggcccaggactgggagcggtgcaacaccacctgcgggcgcggggtcaagaagcggctggtgctctgcatggagctggccaacgggaagccgcagacgcgcagtggccccgagtgcgggctcgccaagaagcctcccgaggagagcacgtgtttcgagaggccctgcttcaagtggtacaccagcccctggtcagagtgcaccaagacctgcggggtgggcgtgaggatgcgagacgtcaagtgctaccaggggaccgacatcgtccgtggttgcgatccgttggtgaagcccgttggcagacaggcctgtgatctgcagccctgccccacggagcccccagatgacagctgccaggaccagccaggcaccaactgtgccctggccatcaaagtgaacctctgcgggcactggtactacagcaaggcgtgctgccgctcctgcaggcccccccactcctaggcccggcagctgcagccccttccagatgaagaccaagcgcccctcctggggctgctgcagcttctggggcctccacagacccccctcctgcggggcacgctggcctaagagacgtggcactgagcctcggctgtcgagaggggacttcccacggcccgtggacctttgtgctcctggggcagagcctccggcacccagtggcctcccccagacagagccacccctgccgtgggaacctgtccgtgttcctgcgtggatcctgtgtttgtggctcccactccccagccccccagcagcccccagccgaggggcccagggcccacagccagcggtggaggtgtcttgctccgggcccgtagcccacgccctctctgggtggcagggccttctgaaggaaacttgcaggcgagcccaacgtggtggggggccttcctccctcagaggccatggggtgagaggggctcaggcagccaaggaggcccaggcgtgctccctcttatggagcccctcccatggagctctcttcccgccgcactttctaccccgggcagaggcgcttgcccacgggacgtttggggatggacctcggcccccgcccctgcagtcagcgtcagtgctcatctacgttaataaagtggtcctatttatggcggc

SEQ ID NO: 1032 - DNA, 4270 bp, Homo sapiens
  source 1..4270: mol_type = unassigned DNA
acgggacacctcatacatcccagaccccattctcaggagccccagggacagggcccgctctggaggcagaagccggacaggcggggctggggctttgccaccgccagcctccccggtaacctcaggccagcggctgctccgtctggacacccgacatgtggcccccagttctggacccgggaagaaggcctccctgctcgccgctcctgggccgccgccgccggcagcagccaacaggcagctgggccggcctggccgggctccagaggcgcagagcgggttaaagtgtgcgccaggccggccggcgcgggcgggggagcggcctggtgggaagtgtgagtgttcctccccgtctgcctgacagctataaaggcggccgccggcgcagagccgccactgggctgcgcccctcccgggaaccccctctcttggatgctctttgaagtgggagagggaggcggcgcgggggaggaggggaaggggagagggaggccgggccgcagcctctgcactcacgccgcccccgcacgcacagcgcacctggcgccgtctgccctccgcagcgctcgcccctttctctgggaggacaacctgctgacccgaagccagggtctgccagacaaccacgaccaactagtcccagataaccttgaggcctgggcactggctgggccccgagggctcttcccaaagcgtaccctggtcatctggaagaggatcggagctggcctggtggtgacagtggccttgcttcctaggatggatggcagatggcaatgttcctgctgggcctggttcctgctggttctggcagttgtagctggggacacagtgtcaaccgggtccacggacaacagcccaacatccaatagcctggaggggggcaccgacgccacggccttctggtggggggagtggaccaagtggacggcgtgttcccgcagttgcgggggtggggtgacatcccaggagcggcactgcctgcagcagaggaggaagtccgtcccgggccccgggaacaggacctgcacgggcacgtccaagcggtaccagctctgcagagtgcaggagtgtccgccggacgggaggagcttccgcgaggagcagtgcgtctccttcaactcccacgtgtacaacgggcggacgcaccagtggaagcctctgtacccggatgactatgtccacatctccagcaaaccgtgtgacctgcactgtaccaccgtggacggccagcggcagctcatggtccccgcccgcgacggcacatcctgcaagctcactgacctgcgaggggtttgcgtgtctggaaaatgtgagcccatcggctgtgacggggtgcttttctccacccacacactggacaagtgtggcatctgccagggggacggtagcagctgcacccacgtgacgggcaactatcgcaaggggaatgcccaccttggttactctctggtgacccacatcccggctggtgcccgagacatccagattgtagagaggaagaagtccgctgacgtgctagctcttgcagacgaagctggctactacttcttcaacggcaactacaaggtggacagccccaagaacttcaacatcgcaggcacggtggtcaagtacaggcggcccatggatgtctatgagaccggaatcgagtacatcgtggcacaggggcccaccaaccagggcctgaatgtcatggtgtggaaccagaacggcaaaagcccctccatcaccttcgagtacacgctgctgcagccgccacacgagagccgcccccagcccatctactatggcttctccgagagcgctgagagccagggcctggacggggccgggctgatgggcttcgtcccgcacaacggctccctctacggccaggcctcctcagagcggctgggcctggacaaccggctgttcggccacccgggcctggacatggagctgggccccagccagggccaggagaccaacgaggtgtgcgagcaggccggcggcggggcctgcgaggggccccccaggggcaagggcttccgagaccgcaacgtcacggggactcctctcaccggggacaaggatgacgaagaggttgacacccacttcgcctcccaggagttcttctcggctaacgccatctctgaccagctgctgggcgcaggctctgacttgaaggacttcaccctcaatgagactgtgaacagcatctttgcacagggcgccccaaggagctccctggccgagagcttcttcgtggattatgaggagaacgagggggctggcccttacctgctcaacgggtcctacctggagctgagcagcgacagggttgccaacagctcctccgaggccccattccccaacgttagcaccagcctgctcacctcggccgggaacaggactcacaaggccaggaccaggcccaaggcgcgcaagcaaggcgtgagtcccgcggacatgtaccggtggaagctctcgtcccacgagccctgcagtgccacctgcaccacaggggtcatgtctgcgtacgccatgtgtgtccgctatgatggcgtcgaggtggatgacagctactgtgacgccctgacccgtcccgagcctgtccacgagttctgcgctgggagggagtgccagcccaggtgggagacgagcagctggagcgagtgttcgcgcacctgcggagagggctaccagttccgcgtcgtgcgctgctggaagatgctctcgcccggcttcgacagctccgtgtacagcgacctgtgcgaggcagccgaggccgtgcggcccgaggaacgcaagacctgccggaaccccgcctgcgggccccagtgggagatgtcggagtggtccgagtgcactgccaagtgtggggagcgcagtgtggtgaccagggacatccgctgctcggaggatgagaagctgtgtgaccccaacaccaggcctgtaggggagaagaactgcacgggcccgccctgtgaccggcagtggaccgtctccgactggggaccgtgcagtggaagctgcgggcaaggccgcaccatcaggcacgtgtactgcaagaccagcgacggacgggtagtacctgagtcccagtgccagatggagaccaagcctctggccatccacccctgtggggacaaaaactgtcccgcccactggctggcccaggactgggagcggtgcaacaccacctgcgggcgcggggtcaagaagcggctggtgctctgcatggagctggccaacgggaagccgcagacgcgcagtggccccgagtgcgggctcgccaagaagcctcccgaggagagcacgtgtttcgagaggccctgcttcaagtggtacaccagcccctggtcagagtgcaccaagacctgcggggtgggcgtgaggatgcgagacgtcaagtgctaccaggggaccgacatcgtccgtggttgcgatccgttggtgaagcccgttggcagacaggcctgtgatctgcagccctgccccacggagcccccagatgacagctgccaggaccagccaggcaccaactgtgccctggccatcaaagtgaacctctgcgggcactggtactacagcaaggcgtgctgccgctcctgcaggcccccccactcctaggcccggcagctgcagccccttccagatgaagaccaagcgcccctcctggggctgctgcagcttctggggcctccacagacccccctcctgcggggcacgctggcctaagagacgtggcactgagcctcggctgtcgagaggggacttcccacggcccgtggacctttgtgctcctggggcagagcctccggcacccagtggcctcccccagacagagccacccctgccgtgggaacctgtccgtgttcctgcgtggatcctgtgtttgtggctcccactccccagccccccagcagcccccagccgaggggcccagggcccacagccagcggtggaggtgtcttgctccgggcccgtagcccacgccctctctgggtggcagggccttctgaaggaaacttgcaggcgagcccaacgtggtggggggccttcctccctcagaggccatggggtgagaggggctcaggcagccaaggaggcccaggcgtgctccctcttatggagcccctcccatggagctctcttcccgccgcactttctaccccgggcagaggcgcttgcccacgggacgtttggggatggacctcggcccccgcccctgcagtcagcgtcagtgctcatctacgttaataaagtggtcctatttatggcggca

SEQ ID NO: 1033 - DNA, 7336 bp, Homo sapiens
  source 1..7336: mol_type = unassigned DNA
cccagccccatttaacttcgcggcggcggcggcgactgcggcgccgcgggctggaggccggcgtcggggaaggtcctggtgccggattccgcacgaggtgttgacgggcggcttctgccaacttctccccagcgcgcgccgagcccgcgcggccccggggctgcacgtcccagatacttctgcggcgcaaggctacaactgagacccggaggagactagaccccatggcttcctggacgagcccctggtgggtgctgatagggatggtcttcatgcactctcccctcccgcagaccacagctgagaaatctcctggagcctatttccttcccgagtttgcactttctcctcagggaagttttctggaagacacaacaggggagcagttcctcacttatcgctatgatgaccagacctcaagaaacactcgttcagatgaagacaaagatggcaactgggatgcttggggcgactggagtgactgctcccggacctgtgggggaggagcatcatattctctgcggagatgtttgactggaaggaattgtgaagggcagaacattcggtacaagacatgcagcaatcatgactgccctccagatgcagaagatttcagagcccagcagtgctcagcctacaatgatgtccagtatcaggggcattactatgaatggcttccacgatataatgatcctgctgccccgtgtgcactcaagtgtcatgcacaaggacaaaacttggtggtggagctggcacctaaggtactggatggaactcgttgcaacacggactccttggacatgtgtatcagtggcatctgtcaggcagtgggctgcgatcggcaactgggaagcaatgccaaggaggacaactgtggagtctgtgccggcgatggctccacctgcaggcttgtacggggacaatcaaagtcacacgtttctcctgaaaaaagagaagaaaatgtaattgctgttcctttgggaagtcgaagtgtgagaattacagtgaaaggacctgcccacctctttattgaatcaaaaacacttcaaggaagcaaaggagaacacagctttaacagccccggcgtctttctcgtagaaaacacaacagtggaatttcagaggggctccgagaggcaaacttttaagattccaggacctctgatggctgatttcatcttcaagaccaggtacactgcagccaaagacagcgtggttcagttcttcttttaccagcccatcagtcatcagtggagacaaactgacttctttccctgcactgtgacgtgtggaggaggttatcagctcaattctgctgaatgtgtggatatccgcttgaagagggtagttcctgaccattattgtcactactaccctgaaaatgtaaaaccaaaaccaaaactgaaggaatgcagcatggatccctgcccatcaagtgatggatttaaagagataatgccctatgaccacttccaacctcttcctcgctgggaacataatccttggactgcatgttccgtgtcctgtggaggagggattcagagacggagctttgtgtgtgtagaggaatccatgcatggagagatattgcaggtggaagaatggaagtgcatgtacgcacccaaacccaaggttatgcaaacttgtaatctgtttgattgccccaagtggattgccatggagtggtctcagtgcacagtgacttgtggccgagggttacggtaccgggttgttctgtgtattaaccaccgcggagagcatgttgggggctgcaatccacaactgaagttacacatcaaagaagaatgtgtcattcccatcccgtgttataaaccaaaagaaaaaagtccagtggaagcaaaattgccttggctgaaacaagcacaagaactagaagagaccagaatagcaacagaagaaccaacgttcattccagaaccctggtcagcctgcagtaccacgtgtgggccgggtgtgcaggtccgtgaggtgaagtgccgtgtgctcctcacattcacgcagactgagactgagctgcccgaggaagagtgtgaaggccccaagctgcccaccgaacggccctgcctcctggaagcatgtgatgagagcccggcctcccgagagctagacatccctctccctgaggacagtgagacgacttacgactgggagtacgctgggttcaccccttgcacagcaacatgcgtgggaggccatcaagaagccatagcagtgtgcttacatatccagacccagcagacagtcaatgacagcttgtgtgatatggtccaccgtcctccagccatgagccaggcctgtaacacagagccctgtccccccaggtggcatgtgggctcttgggggccctgctcagctacctgtggagttggaattcagacccgagatgtgtactgcctgcacccaggggagacccctgcccctcctgaggagtgccgagatgaaaagccccatgctttacaagcatgcaatcagtttgactgccctcctggctggcacattgaagaatggcagcagtgttccaggacttgtggcgggggaactcagaacagaagagtcacctgtcggcagctgctaacggatggcagctttttgaatctctcagatgaattgtgccaaggacccaaggcatcgtctcacaagtcctgtgccaggacagactgtcctccacatttagctgtgggagactggtcgaagtgttctgtcagttgtggtgttggaatccagagaagaaagcaggtgtgtcaaaggctggcagccaaaggtcggcgcatccccctcagtgagatgatgtgcagggatctaccagggctccctcttgtaagatcttgccagatgcctgagtgcagtaaaatcaaatcagagatgaagacaaaacttggtgagcagggtccgcagatcctcagtgtccagagagtctacattcagacaagggaagagaagcgtattaacctgaccattggtagcagagcctatttgctgcccaacacatccgtgattattaagtgccccgtgcgacgattccagaaatctctgatccagtgggagaaggatggccgttgcctgcagaactccaaacggcttggcatcaccaagtcaggctcactaaaaatccatggtcttgctgcccccgacatcggcgtgtaccggtgcattgcaggctctgcacaggaaacagttgtgctcaagctcattggtactgacaaccggctcatcgcacgcccagccctcagggagcctatgagggaatatcctgggatggaccacagcgaagccaatagtttgggagtcacatggcacaaaatgaggcaaatgtggaataacaaaaatgacctttatctggatgatgaccacattagtaaccagcctttcttgagagctctgttaggccactgcagcaattctgcaggaagcaccaactcctgggagttgaagaataagcagtttgaagcagcagttaaacaaggagcatatagcatggatacagcccagtttgatgagctgataagaaacatgagtcagctcatggaaaccggagaggtcagcgatgatcttgcgtcccagctgatatatcagctggtggccgaattagccaaggcacagccaacacacatgcagtggcggggcatccaggaagagacacctcctgctgctcagctcagaggggaaacagggagtgtgtcccaaagctcgcatgcaaaaaactcaggcaagctgacattcaagccgaaaggacctgttctcatgaggcaaagccaacctccctcaatttcatttaataaaacaataaattccaggattggaaatacagtatacattacaaaaaggacagaggtcatcaatatactgtgtgaccttattacccccagtgaggccacatatacatggaccaaggatggaaccttgttacagccctcagtaaaaataattttggatggaactgggaagatacagatacagaatcctacaaggaaagaacaaggcatatatgaatgttctgtagctaatcatcttggttcagatgtggaaagttcttctgtgctgtatgcagaggcacctgtcatcttgtctgttgaaagaaatatcaccaaaccagagcacaaccatctgtctgttgtggttggaggcatcgtggaggcagcccttggagcaaacgtgacaatccgatgtcctgtaaaaggtgtccctcagcctaatataacttggttgaagagaggaggatctctgagtggcaatgtttccttgcttttcaatggatccctgttgttgcagaatgtttcccttgaaaatgaaggaacctacgtctgcatagccaccaatgctcttggaaaggcagtggcaacatctgtactccacttgctggaacgaagatggccagagagtagaatcgtatttctgcaaggacataaaaagtacattctccaggcaaccaacactagaaccaacagcaatgacccaacaggagaacccccgcctcaagagcctttttgggagcctggtaactggtcacattgttctgccacctgtggtcatttgggagcccgcattcagagaccccagtgtgtgatggccaatgggcaggaagtgagtgaggccctgtgtgatcacctccagaagccactggctgggtttgagccctgtaacatccgggactgcccagcgaggtggttcacaagtgtgtggtcacagtgctctgtgtcttgcggtgaaggataccacagtcggcaggtgacgtgcaagcggacaaaagccaatggaactgtgcaggtggtgtctccaagagcatgtgcccctaaagaccggcctctgggaagaaaaccatgttttggtcatccatgtgttcagtgggaaccagggaaccggtgtcctggacgttgcatgggccgtgctgtgaggatgcagcagcgtcacacagcttgtcaacacaacagctctgactccaactgtgatgacagaaagagacccaccttaagaaggaactgcacatcaggggcctgtgatgtgtgttggcacacaggcccttggaagccctgtacagcagcctgtggcaggggtttccagtctcggaaagtcgactgtatccacacaaggagttgcaaacctgtggccaagagacactgtgtacagaaaaagaaaccaatttcctggcggcactgtcttgggccctcctgtgatagagactgcacagacacaactcactactgtatgtttgtaaaacatcttaatttgtgttctctagaccgctacaaacaaaggtgctgccagtcatgtcaagagggataaacctttggaggggtcatgatgctgctgtgaagataaaagtagaatataaaagctcttttccccatgtcgctgattcaaaaacatgtatttcttaaaagactagattctatggatcaaacagaggttgatgcaaaaacaccactgttaaggtgtaaagtgaaattttccaatggtagttttatattccaattttttaaaatgatgtattcaaggatgaacaaaatactatagcatgcatgccactgcacttgggacctcatcatgtcagttgaatcgagaaatcaccaagattatgagtgcatcctcacgtgctgcctctttcctgtgatatgtagactagcacagagtggtacatcctaaaaacttgggaaacacagcaacccatgacttcctcttctctcaagttgcaggttttcaacagttttataaggtatttgcattttagaagctctggccagtagttgttaagatgttggcattaatggcattttcatagatccttggtttagtctgtgaaaaagaaaccatctctctggataggctgtcacactgactgacctaagggttcatggaagcatggcatcttgtccttgcttttagaacacccatggaagaaaacacagagtagatattgctgtcatttatacaactacagaaatttatctatgacctaatgaggcatctcggaagtcaaagaagagggaaagttaaccttttctactgatttcgtagtatattcagagctttcttttaagagctgtgaatgaaactttttctaagcactattctattgcacacaaacagaaaaccaaagccttattagacctaatttatgcataaagtagtattcctgagaactttattttggaaaatttataagaaagtaatccaaataagaaacacgatagttgaaaataatttttatagtaaataattgttttgggctgatttttcagtaaatccaaagtgacttaggttagaagttacactaaggaccaggggttggaatcagaatttagtttaagatttgaggaaaagggtaagggttagtttcagttttaggattagagctagaattgggttaggtgagaaagaaagttaaggttaaggctagagttgtctttaagggttagggttaggaccaggttaggtcagggttggattgggtttagattggggccagtgctggtgttagtgatagtgtcaggatggaggttaggtttggagtaagcgttgttgctgaagtgagttcaggctagcattaaattgtaagttctgaagctgatttggttatggggtctttcccctgtatactaccagttgtgtctttagatggcacacaagtccaaataagtggtcatacttctttattcagggtctcagctgcctgtacacctgctgcctacatcttcttggcaacaaagttacctgccacaggctctgctgagcctagttcctggtcagtaataactgaacagtgcattttggctttggatgtgtctgtggacaagcttgctgagtttctctaccatattctgagcacacggtctcttttgttctaacttcagcttcactgacactgggttgagcactactgtatgtggagggtttggtgattgggaatggatgggggacagtgaggaggacacaccagcccattagttgttaatcatcaatcacatctgattgttgaaggttattaaattaaaagaaagatcatttgtaacatactctttgtatatatttattatatgaaaggtgcaatattttattttgtacagtatgtaataaagacatgggacatatatttttcttattaacaaaatttcatattaaattgcttcactttgtatttaaagttaaaagttactatttttcatttgctattgtactttcattgttgtcattcaattgacattcctgtgtactgtattttactactgtttttataacatgagagttaatgtttctgtttcatgatccttatgtaattcagaaataaatttactttgattattcagtggcatccttataaa

SEQ ID NO: 1034 - DNA, 4197 bp, Homo sapiens
  source 1..4197: mol_type = unassigned DNA
ccgccgcggagcgaggttgcctggagagagcgcctgggcgcagaagggttaacgggccaccgggggctcgcagagcaggagggtgctctcggacggtgtgtcccccactgcactcctgaacttggaggacagggtcgccgcgagggacgcagagagcaccctccacgcccagatgcctgcgtagtttttgtgaccagtccgctcctgcctccccctggggcagtagagggggagcgatggagaactggactggcaggccctggctgtatctgctgctgcttctgtccctccctcagctctgcttggatcaggaggtgttgtccggacactctcttcagacacctacagaggagggccagggccccgaaggtgtctggggaccttgggtccagtgggcctcttgctcccagccctgcggggtgggggtgcagcgcaggagccggacatgtcagctccctacagtgcagctccacccgagtctgcccctccctccccggcccccaagacatccagaagccctcctcccccggggccagggtcccagaccccagacttctccagaaaccctccccttgtacaggacacagtctcggggaaggggtggcccacttcgaggtcccgcttcccacctagggagagaggagacccaggagattcgagcggccaggaggtcccggcttcgagaccccatcaagccaggaatgttcggttatgggagagtgccctttgcattgccactgcaccggaaccgcaggcaccctcggagcccacccagatctgagctgtccctgatctcttctagaggggaagaggctattccgtcccctactccaagagcagagccattctccgcaaacggcagcccccaaactgagctccctcccacagaactgtctgtccacaccccatccccccaagcagaacctctaagccctgaaactgctcagacagaggtggcccccagaaccaggcctgcccccctacggcatcaccccagagcccaggcctctggcacagagcccccctcacccacgcactccttaggagaaggtggcttcttccgtgcatcccctcagccacgaaggccaagttcccagggttgggccagtccccaggtagcagggagacgccctgatccttttccttcggtccctcggggccgaggccagcagggccaagggccttggggaacgggggggactcctcacgggccccgcctggagcctgaccctcagcacccgggcgcctggctgcccctgctgagcaacggcccccatgccagctccctctggagcctctttgctcccagtagccctattccaagatgttctggggagagtgaacagctaagagcctgcagccaagcgccctgcccccctgagcagccagacccccgggccctgcagtgcgcagcctttaactcccaggaattcatgggccagctgtatcagtgggagcccttcactgaagtccagggctcccagcgctgtgaactgaactgccggccccgtggcttccgcttctatgtccgtcacactgaaaaggtccaggatgggaccctgtgtcagcctggagcccctgacatctgtgtggctggacgctgtctgagccccggctgtgatgggatccttggctctggcaggcgtcctgatggctgtggagtctgtgggggtgatgattctacctgtcgccttgtttcggggaacctcactgaccgagggggccccctgggctatcagaagatcttgtggattccagcgggagccttgcggctccagattgcccagctccggcctagctccaactacctggcacttcgtggccctgggggccggtccatcatcaatgggaactgggctgtggatccccctgggtcctacagggccggcgggaccgtctttcgatataaccgtcctcccagggaggagggcaaaggggagagtctgtcggctgaaggccccaccacccagcctgtggatgtctatatgatctttcaggaggaaaacccaggcgttttttatcagtatgtcatctcttcacctcctccaatccttgagaaccccaccccagagccccctgtcccccagcttcagccggagattctgagggtggagcccccacttgctccggcaccccgcccagcccggaccccaggcaccctccagcgtcaggtgcggatcccccagatgcccgccccgccccatcccaggacacccctggggtctccagctgcgtactggaaacgagtgggacactctgcatgctcagcgtcctgcgggaaaggtgtctggcgccccattttcctctgcatctcccgtgagtcgggagaggaactggatgaacgcagctgtgccgcgggtgccaggcccccagcctcccctgaaccctgccacggcaccccatgccccccatactgggaggctggcgagtggacatcctgcagccgctcctgtggccccggcacccagcaccgccagctgcagtgccggcaggaatttggggggggtggctcctcggtgcccccggagcgctgtggacatctcccccggcccaacatcacccagtcttgccagctgcgcctctgtggccattgggaagttggctctccttggagccagtgctccgtgcggtgcggccggggccagagaagccggcaggttcgctgtgttgggaacaatggtgatgaagtgagcgagcaggagtgtgcgtcaggccccccgcagccccccagcagagaggcctgtgacatggggccctgtactactgcctggttccacagcgactggagctccaagtgctcagccgagtgtgggacgggaatccagcggcgctctgtggtctgccttgggagtggggcagccctcgggccaggccagggggaagcaggagcaggaactgggcagagctgtccaacaggaagccggccccctgacatgcgcgcctgcagcctggggccctgtgagagaacttggcgctggtacacagggccctggggtgagtgctcctccgaatgtggctctggcacacagcgtagagacatcatctgtgtatccaaactggggacggagttcaacgtgacttctccgagcaactgttctcacctccccaggccccctgccctgcagccctgtcaagggcaggcctgccaggaccgatggttttccacgccctggagcccatgttctcgctcctgccaagggggaacgcagacacgggaggtccagtgcctgagcaccaaccagaccctcagcacccgatgccctcctcaactgcggccctccaggaagcgcccctgtaacagccaaccctgcagccagcgccctgatgatcaatgcaaggacagctctccacattgccccctggtggtacaggcccggctctgcgtctacccctactacacagccacctgttgccgctcttgcgcacatgtcctggagcggtctccccaggatccctcctgaaaggggtccggggcaccttcacggttttctgtgccaccatcggtcacccattgatcggcccactctgaaccccctggctctccagcctgtcccagtctcagcagggatgtcctccaggtgacagagggtggcaaggtgactgacacaaagtgactttcagggctgtggtcaggcccatgtggtggtgtgatgggtgtgtgcacatatgcctcaggtgtgcttttgggactgcatggatatgtgtgtgctcaaacgtgtatcacttttcaaaaagaggttacacagactgagaaggacaagacctgtttccttgagactttcctaggtggaaaggaaagcaagtctgcagttccttgctaatctgagctacttagagtgtggtctccccaccaactccagttttgtgccctaagcctcatttctcatgttcagacctcacatcttctaagccgccctgtgtctctgaccccttctcatttgcctagtatctctgcccctgcctccctaattagctagggctggggtcagccactgccaatcctgccttactcaggaaggcaggaggaaagagactgcctctccagagcaaggcccagctgggcagagggtgaaaaagagaaatgtgagcatccgctcccccaccaccccgcccagcccctagccccactccctgcctcctgaaatggttcccacccagaactaatttattttttattaaagatggtcatgacaaatg

SEQ ID NO: 1035 - DNA, 4167 bp, Homo sapiens
  source 1..4167: mol_type = unassigned DNA
gaggatcctaaagggatggaccagtttcaccccctcctccatattctctgagctgtcctcccagccccaagctctctggacactggagaggtaaccaccaggcttctgtccctgcagagagcaccctccacgcccagatgcctgcgtagtttttgtgaccagtccgctcctgcctccccctggggcagtagagggggagcgatggagaactggactggcaggccctggctgtatctgctgctgcttctgtccctccctcagctctgcttggatcaggaggtgttgtccggacactctcttcagacacctacagaggagggccagggccccgaaggtgtctggggaccttgggtccagtgggcctcttgctcccagccctgcggggtgggggtgcagcgcaggagccggacatgtcagctccctacagtgcagctccacccgagtctgcccctccctccccggcccccaagacatccagaagccctcctcccccggggccagggtcccagaccccagacttctccagaaaccctccccttgtacaggacacagtctcggggaaggggtggcccacttcgaggtcccgcttcccacctagggagagaggagacccaggagattcgagcggccaggaggtcccggcttcgagaccccatcaagccaggaatgttcggttatgggagagtgccctttgcattgccactgcaccggaaccgcaggcaccctcggagcccacccagatctgagctgtccctgatctcttctagaggggaagaggctattccgtcccctactccaagagcagagccattctccgcaaacggcagcccccaaactgagctccctcccacagaactgtctgtccacaccccatccccccaagcagaacctctaagccctgaaactgctcagacagaggtggcccccagaaccaggcctgcccccctacggcatcaccccagagcccaggcctctggcacagagcccccctcacccacgcactccttaggagaaggtggcttcttccgtgcatcccctcagccacgaaggccaagttcccagggttgggccagtccccaggtagcagggagacgccctgatccttttccttcggtccctcggggccgaggccagcagggccaagggccttggggaacgggggggactcctcacgggccccgcctggagcctgaccctcagcacccgggcgcctggctgcccctgctgagcaacggcccccatgccagctccctctggagcctctttgctcccagtagccctattccaagatgttctggggagagtgaacagctaagagcctgcagccaagcgccctgcccccctgagcagccagacccccgggccctgcagtgcgcagcctttaactcccaggaattcatgggccagctgtatcagtgggagcccttcactgaagtccagggctcccagcgctgtgaactgaactgccggccccgtggcttccgcttctatgtccgtcacactgaaaaggtccaggatgggaccctgtgtcagcctggagcccctgacatctgtgtggctggacgctgtctgagccccggctgtgatgggatccttggctctggcaggcgtcctgatggctgtggagtctgtgggggtgatgattctacctgtcgccttgtttcggggaacctcactgaccgagggggccccctgggctatcagaagatcttgtggattccagcgggagccttgcggctccagattgcccagctccggcctagctccaactacctggcacttcgtggccctgggggccggtccatcatcaatgggaactgggctgtggatccccctgggtcctacagggccggcgggaccgtctttcgatataaccgtcctcccagggaggagggcaaaggggagagtctgtcggctgaaggccccaccacccagcctgtggatgtctatatgatctttcaggaggaaaacccaggcgttttttatcagtatgtcatctcttcacctcctccaatccttgagaaccccaccccagagccccctgtcccccagcttcagccggagattctgagggtggagcccccacttgctccggcaccccgcccagcccggaccccaggcaccctccagcgtcaggtgcggatcccccagatgcccgccccgccccatcccaggacacccctggggtctccagctgcgtactggaaacgagtgggacactctgcatgctcagcgtcctgcgggaaaggtgtctggcgccccattttcctctgcatctcccgtgagtcgggagaggaactggatgaacgcagctgtgccgcgggtgccaggcccccagcctcccctgaaccctgccacggcaccccatgccccccatactgggaggctggcgagtggacatcctgcagccgctcctgtggccccggcacccagcaccgccagctgcagtgccggcaggaatttggggggggtggctcctcggtgcccccggagcgctgtggacatctcccccggcccaacatcacccagtcttgccagctgcgcctctgtggccattgggaagttggctctccttggagccagtgctccgtgcggtgcggccggggccagagaagccggcaggttcgctgtgttgggaacaatggtgatgaagtgagcgagcaggagtgtgcgtcaggccccccgcagccccccagcagagaggcctgtgacatggggccctgtactactgcctggttccacagcgactggagctccaagtgctcagccgagtgtgggacgggaatccagcggcgctctgtggtctgccttgggagtggggcagccctcgggccaggccagggggaagcaggagcaggaactgggcagagctgtccaacaggaagccggccccctgacatgcgcgcctgcagcctggggccctgtgagagaacttggcgctggtacacagggccctggggtgagtgctcctccgaatgtggctctggcacacagcgtagagacatcatctgtgtatccaaactggggacggagttcaacgtgacttctccgagcaactgttctcacctccccaggccccctgccctgcagccctgtcaagggcaggcctgccaggaccgatggttttccacgccctggagcccatgttctcgctcctgccaagggggaacgcagacacgggaggtccagtgcctgagcaccaaccagaccctcagcacccgatgccctcctcaactgcggccctccaggaagcgcccctgtaacagccaaccctgcagccagcgccctgatgatcaatgcaaggacagctctccacattgccccctggtggtacaggcccggctctgcgtctacccctactacacagccacctgttgccgctcttgcgcacatgtcctggagcggtctccccaggatccctcctgaaaggggtccggggcaccttcacggttttctgtgccaccatcggtcacccattgatcggcccactctgaaccccctggctctccagcctgtcccagtctcagcagggatgtcctccaggtgacagagggtggcaaggtgactgacacaaagtgactttcagggctgtggtcaggcccatgtggtggtgtgatgggtgtgtgcacatatgcctcaggtgtgcttttgggactgcatggatatgtgtgtgctcaaacgtgtatcacttttcaaaaagaggttacacagactgagaaggacaagacctgtttccttgagactttcctaggtggaaaggaaagcaagtctgcagttccttgctaatctgagctacttagagtgtggtctccccaccaactccagttttgtgccctaagcctcatttctcatgttcagacctcacatcttctaagccgccctgtgtctctgaccccttctcatttgcctagtatctctgcccctgcctccctaattagctagggctggggtcagccactgccaatcctgccttactcaggaaggcaggaggaaagagactgcctctccagagcaaggcccagctgggcagagggtgaaaaagagaaatgtgagcatccgctcccccaccaccccgcccagcccctagccccactccctgcctcctgaaatggttcccacccagaactaatttattttttattaaagatggtcatgacaaatgagaaa

SEQ ID NO: 1036 - DNA, 3906 bp, Homo sapiens
  source 1..3906: mol_type = unassigned DNA
gtgtgtcccccactgcactcctgaacttggaggacagggtcgccgcgagggacgcagagagcaccctccacgcccagatgcctgcgtagtttttgtgaccagtccgctcctgcctccccctggggcagtagagggggagcgatggagaactggactggcaggccctggctgtatctgctgctgcttctgtccctccctcagctctgcttggatcaggaggtgttgtccggacactctcttcagacacctacagaggagggccagggccccgaaggtgtctggggaccttgggtccagtgggcctcttgctcccagccctgcggggtgggggtgcagcgcaggagccggacatgtcagctccctacagtgcagctccacccgagtctgcccctccctccccggcccccaagacatccagaagccctcctcccccggggccagggtcccagaccccagacttctccagaaaccctccccttgtacaggacacagtctcggggaaggggtggcccacttcgaggtcccgcttcccacctagggagagaggagacccaggagattcgagcggccaggaggtcccggcttcgagaccccatcaagccaggaatgttcggttatgggagagtgccctttgcattgccactgcaccggaaccgcaggcaccctcggagcccacccagatctgagctgtccctgatctcttctagaggggaagaggctattccgtcccctactccaagagcagagccattctccgcaaacggcagcccccaaactgagctccctcccacagaactgtctgtccacaccccatccccccaagcagaacctctaagccctgaaactgctcagacagaggtggcccccagaaccaggcctgcccccctacggcatcaccccagagcccaggcctctggcacagagcccccctcacccacgcactccttaggagaaggtggcttcttccgtgcatcccctcagccacgaaggccaagttcccagggttgggccagtccccaggtagcagggagacgccctgatccttttccttcggtccctcggggccgaggccagcagggccaagggccttggggaacgggggggactcctcacgggccccgcctggagcctgaccctcagcacccgggcgcctggctgcccctgctgagcaacggcccccatgccagctccctctggagcctctttgctcccagtagccctattccaagatgttctggggagagtgaacagctaagagcctgcagccaagcgccctgcccccctgagcagccagacccccgggccctgcagtgcgcagcctttaactcccaggaattcatgggccagctgtatcagtgggagcccttcactgaagcccctctgcttcccctgcgccatgccttctttcttctccctggggctgggtcaggagacagcacaggtgtccagggctcccagcgctgtgaactgaactgccggccccgtggcttccgcttctatgtccgtcacactgaaaaggtccaggatgggaccctgtgtcagcctggagcccctgacatctgtgtggctggacgctgtctgagccccggctgtgatgggatccttggctctggcaggcgtcctgatggctgtggagtctgtgggggtgatgattctacctgtcgccttgtttcggggaacctcactgaccgagggggccccctgggctatcagaagatcttgtggattccagcgggagccttgcggctccagattgcccagctccggcctagctccaactacctggcacttcgtggccctgggggccggtccatcatcaatgggaactgggctgtggatccccctgggtcctacagggccggcgggaccgtctttcgatataaccgtcctcccagggaggagggcaaaggggagagtctgtcggctgaaggccccaccacccagcctgtggatgtctatatgatctttcaggaggaaaacccaggcgttttttatcagtatgtcatctcttcacctcctccaatccttgagaaccccaccccagagccccctgtcccccagcttcagccggagattctgagggtggagcccccacttgctccggcaccccgcccagcccggaccccaggcaccctccagcgtcaggtgcggatcccccagatgcccgccccgccccatcccaggacacccctggggtctccagctgcgtactggaaacgagtgggacactctgcatgctcagcgtcctgcgggaaaggtgtctggcgccccattttcctctgcatctcccgtgagtcgggagaggaactggatgaacgcagctgtgccgcgggtgccaggcccccagcctcccctgaaccctgccacggcaccccatgccccccatactgggaggctggcgagtggacatcctgcagccgctcctgtggccccggcacccagcaccgccagctgcagtgccggcaggaatttggggggggtggctcctcggtgcccccggagcgctgtggacatctcccccggcccaacatcacccagtcttgccagctgcgcctctgtggccattgggaagttggctctccttggagccagtgctccgtgcggtgcggccggggccagagaagccggcaggttcgctgtgttgggaacaatggtgatgaagtgagcgagcaggagtgtgcgtcaggccccccgcagccccccagcagagaggcctgtgacatggggccctgtactactgcctggttccacagcgactggagctccaagtgctcagccgagtgtgggacgggaatccagcggcgctctgtggtctgccttgggagtggggcagccctcgggccaggccagggggaagcaggagcaggaactgggcagagctgtccaacaggaagccggccccctgacatgcgcgcctgcagcctggggccctgtgagagaacttggcgctggtacacagggccctggggtgagtgctcctccgaatgtggctctggcacacagcgtagagacatcatctgtgtatccaaactggggacggagttcaacgtgacttctccgagcaactgttctcacctccccaggccccctgccctgcagccctgtcaagggcaggcctgccaggaccgatggttttccacgccctggagcccatgttctcgctcctgccaagggggaacgcagacacgggaggtccagtgcctgagcaccaaccagaccctcagcacccgatgccctcctcaactgcggccctccaggaagcgcccctgtaacagccaaccctgcagccagcgccctgatgatcaatgcaaggacagctctccacattgccccctggtggtacaggcccggctctgcgtctacccctactacacagccacctgttgccgctcttgcgcacatgtcctggagcggtctccccaggatccctcctgaaaggggtccggggcaccttcacggttttctgtgccaccatcggtcacccattgatcggcccactctgaaccccctggctctccagcctgtcccagtctcagcagggatgtcctccaggtgacagagggtggcaaggtgactgacacaaagtgactttcagggctgtggtcaggcccatgtggtggtgtgatgggtgtgtgcacatatgcctcaggtgtgcttttgggactgcatggatatgtgtgtgctcaaacgtgtatcacttttcaaaaagaggttacacagactgagaaggacaagacctgtttccttgagactttcctaggtggaaaggaaagcaagtctgcagttccttgctaatctgagctacttagagtgtggtctccccaccaactccagttttgtgccctaagcctcatttctcatgttcagacctcacatcttctaagccgccctgtgtctctgacccct

SEQ ID NO: 1037 - DNA, 2908 bp, Homo sapiens
  source 1..2908: mol_type = unassigned DNA
aggggccccagtggccgccgcggagcgaggttgcctggagagagcgcctgggcgcagaagggttaacgggccaccgggggctcgcagagcaggagggtgctctcggacggtgtgtcccccactgcactcctgaacttggaggacagggtcgccgcgagggacgcagagagcaccctccacgcccagatgcctgcgtagtttttgtgaccagtccgctcctgcctccccctggggcagtagagggggagcgatggagaactggactggcaggccctggctgtatctgctgctgcttctgtccctccctcagctctgcttggatcaggaggtgttgtccggacactctcttcagacacctacagaggagggccagggccccgaaggtgtctggggaccttgggtccagtgggcctcttgctcccagccctgcggggtgggggtgcagcgcaggagccggacatgtcagctccctacagtgcagctccacccgagtctgcccctccctccccggcccccaagacatccagaagccctcctcccccggggccagggtcccagaccccagacttctccagaaaccctccccttgtacaggacacagtctcggggaaggggtggcccacttcgaggtcccgcttcccacctagggagagaggagacccaggagattcgagcggccaggaggtcccggcttcgagaccccatcaagccaggaatgttcggttatgggagagtgccctttgcattgccactgcaccggaaccgcaggcaccctcggagcccacccagatctgagctgtccctgatctcttctagaggggaagaggctattccgtcccctactccaagagcagagccattctccgcaaacggcagcccccaaactgagctccctcccacagaactgtctgtccacaccccatccccccaagcagaacctctaagccctgaaactgctcagacagaggtggcccccagaaccaggcctgcccccctacggcatcaccccagagcccaggcctctggcacagagcccccctcacccacgcactccttaggagaaggtggcttcttccgtgcatcccctcagccacgaaggccaagttcccagggttgggccagtccccaggtagcagggagacgccctgatccttttccttcggtccctcggggccgaggccagcagggccaagggccttggggaacgggggggactcctcacgggccccgcctggagcctgaccctcagcacccgggcgcctggctgcccctgctgagcaacggcccccatgccagctccctctggagcctctttgctcccagtagccctattccaagatgttctggggagagtgaacagctaagagcctgcagccaagcgccctgcccccctgagcagccagacccccgggccctgcagtgcgcagcctttaactcccaggaattcatgggccagctgtatcagtgggagcccttcactgaagtccagggctcccagcgctgtgaactgaactgccggccccgtggcttccgcttctatgtccgtcacactgaaaaggtccaggatgggaccctgtgtcagcctggagcccctgacatctgtgtggctggacgctgtctgagccccggctgtgatgggatccttggctctggcaggcgtcctgatggctgtggagtctgtgggggtgatgattctacctgtcgccttgtttcggggaacctcactgaccgagggggccccctgggctatcagaagatcttgtggattccagcgggagccttgcggctccagattgcccagctccggcctagctccaactacctggcacttcgtggccctgggggccggtccatcatcaatgggaactgggctgtggatccccctgggtcctacagggccggcgggaccgtctttcgatataaccgtcctcccagggaggagggcaaaggggagagtctgtcggctgaaggccccaccacccagcctgtggatgtctatatgatctttcaggaggaaaacccaggcgttttttatcagtatgtcatctcttcacctcctccaatccttgagaaccccaccccagagccccctgtcccccagcttcagccggagattctgagggtggagcccccacttgctccggcaccccgcccagcccggaccccaggcaccctccagcgtcaggtgcggatcccccagatgcccgccccgccccatcccaggacacccctggggtctccagctgcgtactggaaacgagtgggacactctgcatgctcagcgtcctgcgggaaaggtgtctggcgccccattttcctctgcatctcccgtgagtcgggagaggaactggatgaacgcagctgtgccgcgggtgccaggcccccagcctcccctgaaccctgccacggcaccccatgccccccatactgggaggctggcgagtggacatcctgcagccgctcctgtggccccggcacccagcaccgccagctgcagtgccggcaggaatttggggggggtggctcctcggtgcccccggagcgctgtggacatctcccccggcccaacatcacccagtcttgccagctgcgcctctgtggccattgggaagttggctctccttggagccagtgctccgtgcggtgcggccggggccagagaagccggcaggttcgctgtgttgggaacaatggtgatgaagtgagcgagcaggagtgtgcgtcaggccccccgcagccccccagcagagaggcctgtgacatggggccctgtactactgcctggttccacagcgactggagctccaaggtgagcccggaacccccagccatatcctgcatcctgggtaaccacgcccaggacacctcagcctttccagcatagctcaataaacttgtattgatcaag

SEQ ID NO: 1038 - DNA, 4195 bp, Homo sapiens
  source 1..4195: mol_type = unassigned DNA
ccgccgcggagcgaggttgcctggagagagcgcctgggcgcagaagggttaacgggccaccgggggctcgcagagcaggagggtgctctcggacggtgtgtcccccactgcactcctgaacttggaggacagggtcgccgcgagggacgcagagagcaccctccacgcccagatgcctgcgtagtttttgtgaccagtccgctcctgcctccccctggggcagtagagggggagcgatggagaactggactggcaggccctggctgtatctgctgctgcttctgtccctccctcagctctgcttggatcaggaggtgttgtccggacactctcttcagacacctacagaggagggccagggccccgaaggtgtctggggaccttgggtccagtgggcctcttgctcccagccctgcggggtgggggtgcagcgcaggagccggacatgtcagctccctacagtgcagctccacccgagtctgcccctccctccccggcccccaagacatccagaagccctcctcccccggggccagggtcccagaccccagacttctccagaaaccctccccttgtacaggacacagtctcggggaaggggtggcccacttcgaggtcccgcttcccacctagggagagaggagacccaggagattcgagcggccaggaggtcccggcttcgagaccccatcaagccaggaatgttcggttatgggagagtgccctttgcattgccactgcaccggaaccgcaggcaccctcggagcccacccagatctgagctgtccctgatctcttctagaggggaagaggctattccgtcccctactccaagagcagagccattctccgcaaacggcagcccccaaactgagctccctcccacagaactgtctgtccacaccccatccccccaagcagaacctctaagccctgaaactgctcagacagaggtggcccccagaaccaggcctgcccccctacggcatcaccccagagcccaggcctctggcacagagcccccctcacccacgcactccttaggagaaggtggcttcttccgtgcatcccctcagccacgaaggccaagttcccagggttgggccagtccccaggtagcagggagacgccctgatccttttccttcggtccctcggggccgaggccagcagggccaagggccttggggaacgggggggactcctcacgggccccgcctggagcctgaccctcagcacccgggcgcctggctgcccctgctgagcaacggcccccatgccagctccctctggagcctctttgctcccagtagccctattccaagatgttctggggagagtgaacagctaagagcctgcagccaagcgccctgcccccctgagcagccagacccccgggccctgcagtgcgcagcctttaactcccaggaattcatgggccagctgtatcagtgggagcccttcactgaagtccagggctcccagcgctgtgaactgaactgccggccccgtggcttccgcttctatgtccgtcacactgaaaaggtccaggatgggaccctgtgtcagcctggagcccctgacatctgtgtggctggacgctgtctgagccccggctgtgatgggatccttggctctggcaggcgtcctgatggctgtggagtctgtgggggtgatgattctacctgtcgccttgtttcggggaacctcactgaccgagggggccccctgggctatcagaagatcttgtggattccagcgggagccttgcggctccagattgcccagctccggcctagctccaactacctggcacttcgtggccctggggcggtccatcatcaatgggaactgggctgtggatccccctgggtcctacagggccggcgggaccgtctttcgatataaccgtcctcccagggaggagggcaaaggggagagtctgtcggctgaaggccccaccacccagcctgtggatgtctatatgatctttcaggaggaaaacccaggcgttttttatcagtatgtcatctcttcacctcctccaatccttgagaaccccaccccagagccccctgtcccccagcttcagccggagattctgagggtggagcccccacttgctccggcaccccgcccagcccggaccccaggcaccctccagcgtcaggtgcggatcccccagatgcccgccccgccccatcccaggacacccctggggtctccagctgcgtactggaaacgagtgggacactctgcatgctcagcgtcctgcgggaaaggtgtctggcgccccattttcctctgcatctcccgtgagtcgggagaggaactggatgaacgcagctgtgccgcgggtgccaggcccccagcctcccctgaaccctgccacggcaccccatgccccccatactgggaggctggcgagtggacatcctgcagccgctcctgtggccccggcacccagcaccgccagctgcagtgccggcaggaatttggggggggtggctcctcggtgcccccggagcgctgtggacatctcccccggcccaacatcacccagtcttgccagctgcgcctctgtggccattgggaagttggctctccttggagccagtgctccgtgcggtgcggccggggccagagaagccggcaggttcgctgtgttgggaacaatggtgatgaagtgagcgagcaggagtgtgcgtcaggccccccgcagccccccagcagagaggcctgtgacatggggccctgtactactgcctggttccacagcgactggagctccaagtgctcagccgagtgtgggacgggaatccagcggcgctctgtggtctgccttgggagtggggcagccctcgggccaggccagggggaagcaggagcaggaactgggcagagctgtccaacaggaagccggccccctgacatgcgcgcctgcagcctggggccctgtgagagaacttggcgctggtacacagggccctggggtgagtgctcctccgaatgtggctctggcacacagcgtagagacatcatctgtgtatccaaactggggacggagttcaacgtgacttctccgagcaactgttctcacctccccaggccccctgccctgcagccctgtcaagggcaggcctgccaggaccgatggttttccacgccctggagcccatgttctcgctcctgccaagggggaacgcagacacgggaggtccagtgcctgagcaccaaccagaccctcagcacccgatgccctcctcaactgcggccctccaggaagcgcccctgtaacagccaaccctgcagccagcgccctgatgatcaatgcaaggacagctctccacattgccccctggtggtacaggcccggctctgcgtctacccctactacacagccacctgttgccgctcttgcgcacatgtcctggagcggtctccccaggatccctcctgaaaggggtccggggcaccttcacggttttctgtgccaccatcggtcacccattgatcggcccactctgaaccccctggctctccagcctgtcccagtctcagcagggatgtcctccaggtgacagagggtggcaaggtgactgacacaaagtgactttcagggctgtggtcaggcccatgtggtggtgtgatgggtgtgtgcacatatgcctcaggtgtgcttttgggactgcatggatatgtgtgtgctcaaacgtgtatcacttttcaaaaagaggttacacagactgagaaggacaagacctgtttccttgagactttcctaggtggaaaggaaagcaagtctgcagttccttgctaatctgagctacttagagtgtggtctccccaccaactccagttttgtgccctaagcctcatttctcatgttcagacctcacatcttctaagccgccctgtgtctctgaccccttctcatttgcctagtatctctgcccctgcctccctaattagctagggctggggtcagccactgccaatcctgccttactcaggaaggcaggaggaaagagactgcctctccagagcaaggcccagctgggcagagggtgaaaaagagaaatgtgagcatccgctcccccaccaccccgcccagcccctagccccactccctgcctcctgaaatggttcccacccagaactaatttattttttattaaagatggtcatgacaaatg

SEQ ID NO: 1039 - DNA, 6058 bp, Homo sapiens
  source 1..6058: mol_type = unassigned DNA
gctcggcgcctggagaaggctgtgcgggcggggacggctgcagcccttgccggagagggcgggccggggtcagctgcggcgggcgggccggcgcggggagctgtgggcggcagctgcgtctcctgccaccgccctccctccgccacgatgccggggatcgacaagctgcccatcgaggagacgctggaggacagcccgcagacaaggtctttactaggtgtatttgaagaagatgccacagctatttccaactatatgaaccagttgtatcaagctatgcatcggatttatgatgcacagaatgaattaagtgcagcaacacacctgacctcaaaacttttaaaagaatatgaaaaacagcgttttccattgggaggtgatgatgaagttatgagctctacattgcaacagttttcaaaagttatagatgagcttagctcttgtcatgcagtgctttcaactcaacttgctgatgccatgatgttccccattacccagtttaaagaaagagatctgaaagaaatactaacattaaaggaagtatttcagattgcaagtaatgatcatgatgctgcgattaatagatatagccgtttatcaaaaaaaagagaaaatgacaaggtgaagtatgaagtaacagaagatgtgtacacatccagaaagaaacaacaccagaccatgatgcattatttttgtgcattaaatactcttcagtacaagaagaaaatagcattgttagaacctctacttgggtacatgcaagctcagataagtttctttaagatgggttctgaaaatcttaatgaacaactggaagaatttttagctaatattggaacaagcgttcagaatgttcgcagggaaatggacagtgatatagagaccatgcaacagacaatagaggatttggaagtagccagtgatcccttatatgtgcctgacccagaccccaccaaatttcctgttaatcgaaatttaacccgaaaggctggataccttaatgctaggaataaaacaggcttggtgtcatctacctgggacagacagttttacttcacgcagggtggaaatttaatgagtcaggcccgtggggatgtagcaggaggcctggccatggacatagacaactgttcagtgatggctgtggactgtgaagacagacgatattgttttcagatcacctctttcgatggaaaaaaatcttcaattttgcaagcagagagtaaaaaagatcatgaagagtggatctgtacaataaacaacatatctaaacaaatatacttaagtgaaaatccagaggaaactgctgcacgagtaaatcaatcagctctggaagctgtcactccttccccatctttccagcagaggcacgagagcctgcggccagcagcaggacaatctcggccaccgacagctcgaaccagcagttcaggatccttaggatctgagtctacaaatttggctgccctctctctagattctcttgttgccccagacaccccaatacagtttgacataatttctcctgtgtgtgaagatcagcctggccaggcaaaagcctttggccagggaggcaggcgtacaaatccatttggagaatctggaggaagtacaaaatctgaaactgaagattctattcttcatcagttatttattgtccgattccttggttcaatggaggtgaaatcagatgaccatccagatgttgtttatgaaactatgcgccaaatcttagctgcccgggccatccataacatctttcgtatgacagaatcgcatttattagtcacttgtgactgtttaaagttaattgatccacagacacaagttacaaggctcacgtttccattaccttgtgtagttttgtatgctacacaccaggaaaataagcgcctttttggatttgttcttcggacatcaagcgggagaagtgaaagtaatctgtcatcagtctgctatatatttgagtcaaacaatgagggggaaaagatatgtgattctgttggactggcaaaacagatagctttgcatgctgaactggatcgtagggcatcagaaaaacaaaaagaaatagagagagtaaaagagaagcaacagaaagaactcaataaacaaaaacagattgaaaaggacttggaagaacaaagtcggttgatagctgcttccagtagaccaaaccaagccagtagtgaggggcagtttgttgtccttagcagtagccagtcagaagagagtgatttgggagaaggaggaaagaagagagaatcagaagcataagcttatacttttggtagatattcccccttggaatttgacagtttctatggtgaaatggcagaaggtaacaactatgttgaaatatcaaggaggagattaagctttatatttgcttatttgttgtagctacattttaaaaaaaagattgaacttgatgacttaggtttgcattgatcttttttcccccttaaacataatgtactatgtattaacatctaaaggaaacctgctcatctccctgaagcagactgctgaggaattacatttgctcaagaattttttccgtcaaattgtgaacttttaattcttgcattgtaattggctgtgtccataagaaatcatttattcttcaggcttagacattcatggatatgcttttctttcattaggaacattttgctggtgatgaggaagcatttagctgaataagtttaaagccctttatacagagaattctacaagtttgcaaatattttaacaatattaaatgtgcaatagaacttttataaaataattagaacagagattttacagttaaggtttcaaattgtggcaggtggtactgttgatctcagggtactttctgggattgctcacatttctctaatgtactgcacttgatgccagtaggaaagaagcttaagtgtcttcagttcaagattgatagagcccttggcattttattatcacattcttagttctcaggttgggacttcaattactgctgcagagcagtagtggttaaaaataagatattggaatttattaaaagatttttgttcaatacattttagattaggattgacaagtaaagatactgctatggaatgatacattgtattttctgcattgtgtgaaatagtttttattgaaagtcaagtgacatttcaaaagaagttctataacaattatgtttcatgcttaaagtaaaaattcccagagtttagtttagaaaatgtaatcttttaaatttcagactgatatattcccagtattttcataatgccatgttttgataaagtactgaatcaccactttatatccacaaaggcaaataactaatgtatgataatagaataatttgcactaattattgtaaatatgtctactcttcaaatgagtaaaaggtccaattttgtgaaagattgaaaatgaattgaatgcctagtagagtataggagaagttgaccaaggaaggatttaacctggtgccaaggttaaaataacatttctctactgcctattgtttatgttaaaccttaattttttttctgtaatcacttttaacactgctaatagaaattatgttttcatgtgtttcacatgaaaaagtatatatatacaaagttaatatagtgggtaaaatactttacatagtcacacatttacaaatttttcaagaggttagccactaagactttaataattttacaagggaaaaagcctttttttttctttgatatacagttttttcttcttagttctgcattagaaatggcatctgttttaggtctcaaaatataactcagctgtttcacactgtatatgtacattgttttctgtaggaataggataatgatatataggatcatgatattccttctatccatgtgccaaatgggtgtaatgtttatttactgatgctttatgttaccaaaacatacagtaaaaaagtagaaatttatgaaatacttttgataaaaagtttattttgtgcttaccaaaaggaatgctttcacaatagtgtatcagttcttttgttttgttaaagttggaatttattctgttgccagcatttaagtagtcatggcaagtcctgtttttaagaccttttggagactggagctttctgttccattaagtcttttgtttatactacaaattgtcacctcacttagttcagatgaaatctgttactctacaaggaaggtgttcatcattaggaggcagctttactaagctggtgctttgcatggtagcaagtgctgccctttatcagcaccctgggtcatagtgtaggctagagttaaggcactggcagacttagggatgctggacagacctgtagttcgttttaagtcatgttcacaggaatttctacaataataaacccatcatctccataggtcagatcgaagtgcattccaatgctaaatagaagttatgagtgggtttaacaattttagatgattcagcttttgttccattactgttgaactatatgaactattccattactgcagagatttaagtatctgttttaataagctctttttgttatttaaaggctgcccatgggtttctgcctagtggtaaagctgattgttaccctcctttgaaatcccttctagttctgagatgctttgagggtaactggattcgattttgggatatcttttctcacattcagacttacacttaatggtgttagaaatcaacaaaactcctttttaaaaagaaaagatattaagcctgcctacttctacaatgcattctgttacctatttgaacagtatgtttgtaactatggcaatgaagtcagtagataggaaaccagttattccttctacctttaaaaattttgagaacttgccaaccagggattaaagctattatcttgaacagagtccctaaagctagtctagtttttgccacatctgcaatgattattgtttaatttcaaaagaatcctcaggctctacaatctaggggtggtaaatgtgtttccactatacttgggaaaaggtcagtaggatgtgcatcctagggaagataaaatcgtatatggtaaaggcatttgagttaattttgcattatatctaggaaccatattatttaaaatttgaatcctattaatgctgagagatcctaagagctagtatgttgtaaaacctgccacctgaataaaatgaaaaaaaaagtgtttttttgagacagagtcttgctctgttgcccaggctggagtgcagtggtgtgatcttgggtcactgcaaactccgcctcccaggttcacgccattctcctgcctcagcctcccgagtagctgggaccacaggggcccaccaccgcgcccggctaattttttgtatttttagtagagacggggtttcaccgtgttagccaggatgttctcgatctcctgacctcatgatccgcccgcctcggcctcccaaagtgctgggattacaggcgtgagccaccgtgcccggccctaaaatgaaattattaatgttggttctgaaacagcctcttagcattcagattgtattttaaatacttaaacacaccaattgtagaaagcaaccctttatttttagcaagtttggtttactcttctcccatgagattttgtctttctacattaactagtaagacataaagatttgaaactggaactatattatactttttaaccaatctctgtggcttcactcatgaaatttacttcagttaatatgagactgggggttaagttgtaactaatatgcaaaattgctttgtatatttggtgattttgtaatgtaagtgaattgattcttatttcactgatactattaatcatgcagtgtacaattcaaaatcatgcaatgtttcactttagaattggatttgaagaactcgactttatgtgatcatggtattggtatacatgtggggtggagaacttattttttcattttgtcacaataggtatatactgacaaggcttcaggaaaaaagttgttagaagattttttaatgtataataaagtccatgatttttgtacagtgttttttaatg

SEQ ID NO: 1040 - DNA, 3239 bp, Homo sapiens
  source 1..3239: mol_type = unassigned DNA
tttccctgccgggcgcgccacacttcctgttgatccggctcggccgggggctgggccggcgggcaggcggcggcggccactggccaggcgtggacgcgcgcggggccgccgcgggcacggagtggccgccgcgtcgcctgagcccagagccggggagtgctctcggccgccgcgtctcctgccctctgtccttccaacccagccctcggctgagccgcgccgcaccatgcccgccgtggacaagctcctgctagaggaggcgttgcaggacagcccccagactcgctctttactgagcgtgtttgaagaagatgctggcaccctcacagactataccaaccagctgctccaggcaatgcagcgcgtctatggagcccagaatgagatgtgcctggccacacaacagctttctaagcaactgctggcatatgaaaaacagaactttgctcttggcaaaggtgatgaagaagtaatttcaacactccactatttttccaaagtggtggatgagcttaatcttctccatacagagctggctaaacagttggcagacacaatggttctacctatcatacaattccgagaaaaggatctcacagaagtaagcactttaaaggatctatttggactcgctagcaatgagcatgacctctcaatggcaaaatacagcaggctgcctaagaaaaaggagaatgagaaggtgaagaccgaagtcggaaaagaggtggccgcggcccggcggaagcagcacctctcctcccttcagtactactgtgccctcaacgcgctgcagtacagaaagcaaatggccatgatggagcccatgataggctttgcccatggacagattaacttttttaagaagggagcagagatgttttccaaacgtatggacagctttttatcctccgttgcagacatggttcaaagcattcaggtagaactggaagccgaggcggaaaagatgcgggtgtcccagcaagaattactttctgttgatgaatctgtttacactccagactctgatgtggccgcaccacagatcaacaggaacctcatccagaaggctggttaccttaatcttagaaacaaaacagggctggtcaccaccacctgggagaggctttatttcttcacccaaggcgggaatctcatgtgtcagcccaggggagccgtggctggaggtttgatccaggacctggacaactgctcagtgatggccgtggattgcgaagaccggcgctactgcttccagatcaccacgcccaatggaaaatcgggaataatcctccaggctgagagcagaaaggaaaatgaagagtggatatgtgcaataaacaacatctccagacagatctacctgaccgacaaccctgaggcagtcgcgatcaagttgaatcagaccgctctgcaagcagtgactcccattacaagttttggaaaaaaacaagaaagctcatgccccagccagaacctgaaaaattcagagatggaaaatgaaaatgacaagattgttcccaaagcaacagccagtctacctgaagcagaggagctgatcgcgcctggaacgccgattcaattcgatattgtgcttcctgctacagaattccttgatcagaacagagggagcaggcgtaccaacccttttggtgaaactgaggatgaatcatttccagaagcagaagattctcttttgcagcagatgtttatagttcggtttttgggatcaatggcagttaaaacagacagcactactgaagtgatttatgaagcgatgagacaagtattggctgctcgggctattcataacatcttccgcatgacagaatcccatctgatggtcaccagtcaatctttgaggttgatagatccacagactcaagtatcaagggccaattttgaacttaccagtgtcacacaatttgctgctcatcaagaaaacaagagactggttggttttgtcatccgtgttcctgaatccactggagaagaatctctgagtacatacatttttgaaagcaactcagaaggcgaaaagatatgttatgctattaatttgggaaaagaaattattgaggttcagaaggatccagaagcactggctcaattaatgctgtccataccactaaccaatgacggaaaatatgtactgttaaacgatcaaccagatgacgatgatggaaatccaaacgaacatagaggcgcagaatccgaagcataactcacttgcgcctgtgggggaagagcaaacaggaaggagagctacctcctaagggttttaacgtctctgacatacaggcacactgacctgatttccgaaggctgacaatcgtttgtggaatgtaatcttgatgccttgatactgagacttgggagggaaactaagaaatggttgacagcgttcccacccatctacaatgttattttaggtgctttgtggtaagtcttttttcttagattgcgctaaaatttcttagattgttcagcgctcagaacaaaagtttgaaaaatgcattgttcatatgaatgtcatctcttttcagtttccagtatcctttttaaaaaatggcaaaagcctagatttacaatttgatgaacactaaatatttcttattaatataatctatttttgtattttacttaatgagctttaagtgcctgtcgttctgaaaattgtgtatttataattcagcttatctcataattggacctaatagcatttctttgtgcagttaggtgatgagcactgctttgaggcccaagcactagtagagatgcgcgatacaggtctagtttcggtaactgttccagacatcaagcaataaaaaaatgaataccacaaaagatgtttgattttacagtggagccttactgaaccagcattcagaagtttaaggtcctcctaggtatgagtatttttagtagtggatcactgtggacagggtgcagctctaccagttcctgtttcttctgagccagaccctcttcagggaagggaccaattaattttaaaactcacttgaagcacagctggtcatggggcttggtataaagttcctatttccaccctgatacttccaattcctggaaccccagcccactcccccatccctcctccctatcaaactagtataatgattttgaatcggtacagtgtgtttaactgtaactaagttcaacagactattattatctttgtaataaattaacctagcaataaaaaatattctgtttctttc

SEQ ID NO: 1041 - DNA, 2190 bp, Homo sapiens
  source 1..2190: mol_type = unassigned DNA
agtgctctcggccgccgcgtctcctgccctctgtccttccaacccagccctcggctgagccgcgccgcaccatgcccgccgtggacaagctcctgctagaggaggcgttgcaggacagcccccagactcgctctttactgagcgtgtttgaagaagatgctggcaccctcacagactataccaaccagctgctccaggcaatgcagcgcgtctatggagcccagaatgagatgtgcctggccacacaacagctttctaagcaactgctggcatatgaaaaacagaactttgctcttggcaaaggtgatgaagaagtaatttcaacactccactatttttccaaagtggtggatgagcttaatcttctccatacagagctggctaaacagttggcagacacaatggttctacctatcatacaattccgagaaaaggatctcacagaagtaagcactttaaaggatctatttggactcgctagcaatgatgtctgtttatttttagagcatgacctctcaatggcaaaatacagcaggctgcctaagaaaaaggagaatgagaaggtgaagaccgaagtcggaaaagaggtggccgcggcccggcggaagcagcacctctcctcccttcagtactactgtgccctcaacgcgctgcagtacagaaagcaaatggccatgatggagcccatgataggctttgcccatggacagattaacttttttaagaagggagcagagatgttttccaaacgtatggacagctttttatcctccgttgcagacatggttcaaagcattcaggtagaactggaagccgaggcggaaaagatgcgggtgtcccagcaagaattactttctgttgatgaatctgtttacactccagactctgatgtggccgcaccacagatcaacaggaacctcatccagaaggctggttaccttaatcttagaaacaaaacagggctggtcaccaccacctgggagaggctttatttcttcacccaaggcgggaatctcatgtgtcagcccaggggagccgtggctggaggtttgatccaggacctggacaactgctcagtgatggccgtggattgcgaagaccggcgctactgcttccagatcaccacgcccaatggaaaatcgggaataatcctccaggctgagagcagaaaggaaaatgaagagtggatatgtgcaataaacaacatctccagacagatctacctgaccgacaaccctgaggcagtcgcgatcaagttgaatcagaccgctctgcaagcagtgactcccattacaagttttggaaaaaaacaagaaagctcatgccccagccagaacctgaaaaattcagagatggaaaatgaaaatgacaagattgttcccaaagcaacagccagtctacctgaagcagaggagctgatcgcgcctggaacgccgattcaattcgatattgtgcttcctgctacagaattccttgatcagaacagagggagcaggcgtaccaacccttttggtgaaactgaggatgaatcatttccagaagcagaagattctcttttgcagcagatgtttatagttcggtttttgggatcaatggcagttaaaacagacagcactactgaagtgatttatgaagcgatgagacaagtattggctgctcgggctattcataacatcttccgcatgacagaatcccatctgatggtcaccagtcaatctttgaggttgatagatccacagactcaagtatcaagggccaattttgaacttaccagtgtcacacaatttgctgctcatcaagaaaacaagagactggttggttttgtcatccgtgttcctgaatccactggagaagaatctctgagtacatacatttttgaaagcaactcagaaggcgaaaagatatgttatgctattaatttgggaaaagaaattattgaggttcagaaggatccagaagcactggctcaattaatgctgtccataccactaaccaatgacggaaaatatgtactgttaaacgatcaaccagatgacgatgatggaaatccaaacgaacatagaggcgcagaatccgaagcataactcacttgcgcctgtgggggaagagcaaacaggaaggagagctacctcctaagggttttaacgtctctgacatacaggcacactgacctgatttccgaaggctgac

SEQ ID NO: 1042 - DNA, 3903 bp, Homo sapiens
  source 1..3903: mol_type = unassigned DNA
cccgcgcgcgggcagctcacttccgcccggcaggtgacagccgcggggctccgagccgccggcagcccggacgcaccgggagagcgagaggtggaggccgcggacattttggtgccaagccgaaccgagccggggcgccgggagctattgggacctgcggaagcctggctacagataagggaccaaaatgactgactcaaaatatttcaccacgaccaagaaaggggagatcttcgagctgaaggcagagctcaacagtgacaagaaggagaagaagaaggaggcagtgaagaaagtgattgcatcgatgaccgtgggcaaagatgtcagtgccctcttccccgatgtggtcaactgcatgcagacggacaacctggagctgaagaagctagtatacctctacttgatgaattacgccaagagtcagcctgacatggccattatggccgtcaacacctttgtgaaggactgtgaggaccccaaccccctcatccgagccctggcagtgcggaccatgggctgcatccgcgttgacaagatcacagagtacctgtgcgagccactccggaagtgcctgaaggacgaggatccatatgtgcgcaagacagcagctgtgtgcgtggccaagctccacgacatcaacgcccagctggtggaggaccagggcttcctggacacccttaaagacctcatctccgactctaaccccatggtggtggccaatgcagtggcagcgctctcagaaattgccgagtctcaccccagcagcaacctgctcgatctgaacccacagtccatcaacaagctgctgacagccctcaatgagtgcaccgagtggggccagatcttcatcctggactgcctcgccaactatatgcccaaggacgaccgcgaggcccagagcatctgtgagcgggtcacccccaggctctcccatgccaactccgctgtggtgctctctgctgtgaaggtgctgatgaagttcatggagatgttgtctaaggacttggactactacggcacactgctcaagaagctggccccacccctggtcacactgctgtcagccgagccagagctgcagtatgtggccctgcgcaacatcaatctcatcgtgcagaaaaggcctgagatcctgaagcatgagatgaaggtgttcttcgtgaagtacaacgaccctatctacgtgaagctggagaagctggacatcatgatccgcctggcctctcaggccaacatcgcccaggtgttggcagagctgaaagagtacgcaacagaagtggatgtggactttgtacggaaggctgtgcgtgctattggccgctgcgccatcaaggtggagcaatctgcggagcgctgtgtgagcacgctgctcgacctcatccagaccaaggtcaactatgtggtccaggaggccatcgtggtcatcaaggacatcttccgcaagtaccccaacaagtatgagagtgtgattgccacactgtgtgagaatctggactccctggatgagcctgaggcccgggctgccatgatctggattgtgggcgagtacgcggaacggatcgacaacgcagatgagctgctggagagcttcctcgagggcttccatgacgagagcacacaggtccagctgcagctgctgacagccattgtgaaactctttctaaagaagccaacagagacccaggagctggtgcagcaggtcctcagtttggccactcaggactcagataacccagacctgcgggaccgtggctacatctactggcgcctgctgtccacggacccggtggcagccaaggaggtggtgttggctgagaagccactcatctctgaagagacggacctcatcgagcccacactgttagacgagcttatctgctacatcggcacgctggcttccgtctaccataagcctcccagtgcctttgtggaggggggccggggcgtcgtgcacaagagcctgccacctcgcacggcctcgagtgagagcgcagagagccctgagacagcccctactggagcacctcctggggagcagccagatgtcatccccgcccagggcgacctgctgggtgacctcctcaacctggacctcggccccccagtgagcggcccacccctggccacctcctcggtgcagatgggagctgtggaccttcttggcggtggccttgacagcctgattgggggcaccaacttcgtggcacctccaacagcagcagtaccagccaatcttggagcacccatcggcagtggcctgagtgacctctttgacctgaccagtggcgtgggcaccctgtcaggatcatatgtggcccccaaagcagtgggctccatctccatggacctgcagctgaccaacaaggccttgcaggtcatgaccgactttgccatccagttcaaccgcaacagctttggcctggcccccgccacccccctccaggtccacgcgccactcagccccaaccagacagtggagatctccctgcctctcagcacggtgggctcggtcatgaagatggagcctctgaacaacctccaggtggccgtgaagaacaacatcgatgtcttctacttcagcaccttgtacccactgcacatcctctttgtggaggacgggaagatggaccggcagatgttcctggccacatggaaggatattcccaatgagaatgaggcccagttccagatcagagactgccccctcaatgcagaggctgcgagcagcaagctgcagagcagcaacatcttcactgtcgccaagaggaacgtggagggccaggacatgctctaccagtccctgaagctgaccaacggcatctgggtgctggcggagctgcggatccagccgggcaaccccagctgcacgctgtccctgaagtgtcgagcaccagaggtgtcccagcacgtgtaccaggcctacgagaccatcctcaagaactgagaccccggccagcgcccaccccagccttctgcccgccccatcgaggaggcccctcgggggcagcacatcttcctcctcgcaggagggaccaggcggggctccaggccactcagtgggctccctggtcctgatggcagaacccacccgatccctggggtagggcaccaccccctcctggggtgagagcgcagtgcactcccgtgctctgggacacccctgctcctgtggctgtgatgtggggttaagtgaggtggggaccaaaggaaacagagccagagcagccacagaagctgtgcctgaagggtgagtgtggagcttgcccctccggctcacagccccggcagcccctggctccttggtctctccggttggtgttaaagggccctccactgccacctctcatgggatggaccctgccaacctggcctgggtgtgcagggaggggttccccttggtaccaggagagctgctcacttagggcctggggctcaaggagctgtaggtgccggcagaggggcagagctaggctgggaggagcccagggcctgcaccacccacttgcaaccaccaggctggtgccctgcagctgtgccagttgggccacagcctcccgagtgctgacccacatggtcaagaccaggcagaagctcccagagcccctgtctcgggctccccaccgactggcagctgcactatccccaactccccacttctgccccaagggtggtcactgcctgtgatacattcctcagtgtcgcctctgagcccaggcctcctgccacaaagactgggccgagagatggggctgggtaagcgggtgcgcctcctgtttgggtttcttcggggtttctctgtagtgtctgctgccctcctcctggcctcccaggtttcagttgtgtctgacagagcattaggttttcctgttactgctgtgtaataataaagaaagattcggc

SEQ ID NO: 1043 - DNA, 4155 bp, Homo sapiens
  source 1..4155: mol_type = unassigned DNA
cccgcgcgcgggcagctcacttccgcccggcaggtgacagccgcggggctccgagccgccggcagcccggacgcaccgggagagcgagaggtggaggccgcggacattttggtgccaagccgaaccgagccggggcgccgggagctattgggacctgcggaagcctggctacagataagggaccaaaatgactgactcaaaatatttcaccacgaccaagaaaggggagatcttcgagctgaaggcagagctcaacagtgacaagaaggagaagaagaaggaggcagtgaagaaagtgattgcatcgatgaccgtgggcaaagatgtcagtgccctcttccccgatgtggtcaactgcatgcagacggacaacctggagctgaagaagctagtatacctctacttgatgaattacgccaagagtcagcctgacatggccattatggccgtcaacacctttgtgaaggactgtgaggaccccaaccccctcatccgagccctggcagtgcggaccatgggctgcatccgcgttgacaagatcacagagtacctgtgcgagccactccggaagtgcctgaaggacgaggatccatatgtgcgcaagacagcagctgtgtgcgtggccaagctccacgacatcaacgcccagctggtggaggaccagggcttcctggacacccttaaagacctcatctccgactctaaccccatggtggtggccaatgcagtggcagcgctctcagaaattgccgagtctcaccccagcagcaacctgctcgatctgaacccacagtccatcaacaagctgctgacagccctcaatgagtgcaccgagtggggccagatcttcatcctggactgcctcgccaactatatgcccaaggacgaccgcgaggcccagagcatctgtgagcgggtcacccccaggctctcccatgccaactccgctgtggtgctctctgctgtgaaggtgctgatgaagttcatggagatgttgtctaaggacttggactactacggcacactgctcaagaagctggccccacccctggtcacactgctgtcagccgagccagagctgcagtatgtggccctgcgcaacatcaatctcatcgtgcagaaaaggcctgagatcctgaagcatgagatgaaggtgttcttcgtgaagtacaacgaccctatctacgtgaagctggagaagctggacatcatgatccgcctggcctctcaggccaacatcgcccaggtgttggcagagctgaaagagtacgcaacagaagtggatgtggactttgtacggaaggctgtgcgtgctattggccgctgcgccatcaaggtggagcaatctgcggagcgctgtgtgagcacgctgctcgacctcatccagaccaaggtcaactatgtggtccaggaggccatcgtggtcatcaaggacatcttccgcaagtaccccaacaagtatgagagtgtgattgccacactgtgtgagaatctggactccctggatgagcctgaggcccgggctgccatgatctggattgtgggcgagtacgcggaacggatcgacaacgcagatgagctgctggagagcttcctcgagggcttccatgacgagagcacacaggtccagctgcagctgctgacagccattgtgaaactctttctaaagaagccaacagagacccaggagctggtgcagcaggtcctcagtttggccactcaggactcagataacccagacctgcgggaccgtggctacatctactggcgcctgctgtccacggacccggtggcagccaaggaggtggtgttggctgagaagccactcatctctgaagagacggacctcatcgagcccacactgttagacgagcttatctgctacatcggcacgctggcttccgtctaccataagcctcccagtgcctttgtggaggggggccggggcgtcgtgcacaagagcctgccacctcgcacggcctcgagtgagagcgcagagagccctgagacagcccctactggagcacctcctggggagcagccagatgtcatccccgcccagggcgacctgctgggtgacctcctcaacctggacctcggccccccagtgagcggcccacccctggccacctcctcggtgcagatgggagctgtggaccttcttggcggtggccttgacagcctgattgggggcaccaacttcgtggcacctccaacagcagcagtaccagccaatcttggagcacccatcggcagtggcctgagtgacctctttgacctgaccagtggcgtgggcaccctgtcaggatcatatgtggcccccaaagcagtctggctcccagccatgaaggctaaggggctggagatctcaggcaccttcacccgccaggtgggctccatctccatggacctgcagctgaccaacaaggccttgcaggtcatgaccgactttgccatccagttcaaccgcaacagctttggcctggcccccgccacccccctccaggtccacgcgccactcagccccaaccagacagtggagatctccctgcctctcagcacggtgggctcggtcatgaagatggagcctctgaacaacctccaggtggccgtgaagaacaacatcgatgtcttctacttcagcaccttgtacccactgcacatcctctttgtggaggacgggaagatggaccggcagatgttcctggccacatggaaggatattcccaatgagaatgaggcccagttccagatcagagactgccccctcaatgcagaggctgcgagcagcaagctgcagagcagcaacatcttcactgtcgccaagaggaacgtggagggccaggacatgctctaccagtccctgaagctgaccaacggcatctgggtgctggcggagctgcggatccagccgggcaaccccagctgcacggacttagagctgtccctgaagtgtcgagcaccagaggtgtcccagcacgtgtaccaggcctacgagaccatcctcaagaactgagaccccggccagcgcccaccccagccttctgcccgccccatcgaggaggcccctcgggggcagcacatcttcctcctcgcaggagggaccaggcggggctccaggccactcagtgggctccctggtcctgatggcagaacccacccgatccctggggtagggcaccaccccctcctggggtgagagcgcagtgcactcccgtgctctgggacacccctgctcctgtggctgtgatgtggggttaagtgaggtggggaccaaaggaaacagagccagagcagccacagaagctgtgcctgaagggtgagtgtggagcttgcccctccggctcacagccccggcagcccctggctccttggtctctccggttggtgttaaagggccctccactgccacctctcatgggatggaccctgccaacctggcctgggtgtgcagggaggggttccccttggtaccaggagagctgctcacttagggcctggggctcaaggagctgtaggtgccggcagaggggcagagctaggctgggaggagcccagggcctgcaccacccacttgcaaccaccaggctggtgccctgcagctgtgccagttgggccacagcctcccgagtgctgacccacatggtcaagaccaggcagaagctcccagagcccctgtctcgggctccccaccgactggcagctgcactatccccaactccccacttctgccccaagggtggtcactgcctgtgatacattcctcagtgtcgcctctgagcccaggcctcctgccacaaagactgggccgagagatggggctgggtaagcgggtgcgcctcctgtttgggtttcttcggggtttctctgtagtgtctgctgccctcctcctggcctcccaggtttcagttgtgtctgacagagcattaggttttcctgttactgctgtgtaataataaagaaagattcggcttttggcaatcacggacacttttttcccctccaccgaatgtcaggattgaaagctgcctccgagtggttggggatggttttctgaccctacggtaactagatctaatatatatcatcagaaaatatatattgtatgtttactcttattttcagaaagagaaaatgaataaaaatgatgacatc

SEQ ID NO: 1044 - DNA, 4176 bp, Homo sapiens
  source 1..4176: mol_type = unassigned DNA
cccgcgcgcgggcagctcacttccgcccggcaggtgacagccgcggggctccgagccgccggcagcccggacgcaccgggagagcgagaggtggaggccgcggacattttggtgccaagccgaaccgagccggggcgccgggagctattgggacctgcggaagcctggctacagataagggaccaaaatgactgactcaaaatatttcaccacgaccaagaaaggggagatcttcgagctgaaggcagagctcaacagtgacaagaaggagaagaagaaggaggcagtgaagaaagtgattgcatcgatgaccgtgggcaaagatgtcagtgccctcttccccgatgtggtcaactgcatgcagacggacaacctggagctgaagaagctagtatacctctacttgatgaattacgccaagagtcagcctgacatggccattatggccgtcaacacctttgtgaaggactgtgaggaccccaaccccctcatccgagccctggcagtgcggaccatgggctgcatccgcgttgacaagatcacagagtacctgtgcgagccactccggaagtgcctgaaggacgaggatccatatgtgcgcaagacagcagctgtgtgcgtggccaagctccacgacatcaacgcccagctggtggaggaccagggcttcctggacacccttaaagacctcatctccgactctaaccccatggtggtggccaatgcagtggcagcgctctcagaaattgccgagtctcaccccagcagcaacctgctcgatctgaacccacagtccatcaacaagctgctgacagccctcaatgagtgcaccgagtggggccagatcttcatcctggactgcctcgccaactatatgcccaaggacgaccgcgaggcccagagcatctgtgagcgggtcacccccaggctctcccatgccaactccgctgtggtgctctctgctgtgaaggtgctgatgaagttcatggagatgttgtctaaggacttggactactacggcacactgctcaagaagctggccccacccctggtcacactgctgtcagccgagccagagctgcagtatgtggccctgcgcaacatcaatctcatcgtgcagaaaaggcctgagatcctgaagcatgagatgaaggtgttcttcgtgaagtacaacgaccctatctacgtgaagctggagaagctggacatcatgatccgcctggcctctcaggccaacatcgcccaggtgttggcagagctgaaagagtacgcaacagaagtggatgtggactttgtacggaaggctgtgcgtgctattggccgctgcgccatcaaggtggagcaatctgcggagcgctgtgtgagcacgctgctcgacctcatccagaccaaggtcaactatgtggtccaggaggccatcgtggtcatcaaggacatcttccgcaagtaccccaacaagtatgagagtgtgattgccacactgtgtgagaatctggactccctggatgagcctgaggcccgggctgccatgatctggattgtgggcgagtacgcggaacggatcgacaacgcagatgagctgctggagagcttcctcgagggcttccatgacgagagcacacaggtccagctgcagctgctgacagccattgtgaaactctttctaaagaagccaacagagacccaggagctggtgcagcaggtcctcagtttggccactcaggactcagataacccagacctgcgggaccgtggctacatctactggcgcctgctgtccacggacccggtggcagccaaggaggtggtgttggctgagaagccactcatctctgaagagacggacctcatcgagcccacactgttagacgagcttatctgctacatcggcacgctggcttccgtctaccataagcctcccagtgcctttgtggaggggggccggggcgtcgtgcacaagagcctgccacctcgcacggcctcgagtgagagcgcagagagccctgagacagcccctactggagcacctcctggggagcagccagatgtcatccccgcccagggcgacctgctgggtgacctcctcaacctggacctcggccccccagtgagcggcccacccctggccacctcctcggtgcagatgggagctgtggaccttcttggcggtggccttgacagcctgatgggggatgagcctgaagggattgggggcaccaacttcgtggcacctccaacagcagcagtaccagccaatcttggagcacccatcggcagtggcctgagtgacctctttgacctgaccagtggcgtgggcaccctgtcaggatcatatgtggcccccaaagcagtctggctcccagccatgaaggctaaggggctggagatctcaggcaccttcacccgccaggtgggctccatctccatggacctgcagctgaccaacaaggccttgcaggtcatgaccgactttgccatccagttcaaccgcaacagctttggcctggcccccgccacccccctccaggtccacgcgccactcagccccaaccagacagtggagatctccctgcctctcagcacggtgggctcggtcatgaagatggagcctctgaacaacctccaggtggccgtgaagaacaacatcgatgtcttctacttcagcaccttgtacccactgcacatcctctttgtggaggacgggaagatggaccggcagatgttcctggccacatggaaggatattcccaatgagaatgaggcccagttccagatcagagactgccccctcaatgcagaggctgcgagcagcaagctgcagagcagcaacatcttcactgtcgccaagaggaacgtggagggccaggacatgctctaccagtccctgaagctgaccaacggcatctgggtgctggcggagctgcggatccagccgggcaaccccagctgcacggacttagagctgtccctgaagtgtcgagcaccagaggtgtcccagcacgtgtaccaggcctacgagaccatcctcaagaactgagaccccggccagcgcccaccccagccttctgcccgccccatcgaggaggcccctcgggggcagcacatcttcctcctcgcaggagggaccaggcggggctccaggccactcagtgggctccctggtcctgatggcagaacccacccgatccctggggtagggcaccaccccctcctggggtgagagcgcagtgcactcccgtgctctgggacacccctgctcctgtggctgtgatgtggggttaagtgaggtggggaccaaaggaaacagagccagagcagccacagaagctgtgcctgaagggtgagtgtggagcttgcccctccggctcacagccccggcagcccctggctccttggtctctccggttggtgttaaagggccctccactgccacctctcatgggatggaccctgccaacctggcctgggtgtgcagggaggggttccccttggtaccaggagagctgctcacttagggcctggggctcaaggagctgtaggtgccggcagaggggcagagctaggctgggaggagcccagggcctgcaccacccacttgcaaccaccaggctggtgccctgcagctgtgccagttgggccacagcctcccgagtgctgacccacatggtcaagaccaggcagaagctcccagagcccctgtctcgggctccccaccgactggcagctgcactatccccaactccccacttctgccccaagggtggtcactgcctgtgatacattcctcagtgtcgcctctgagcccaggcctcctgccacaaagactgggccgagagatggggctgggtaagcgggtgcgcctcctgtttgggtttcttcggggtttctctgtagtgtctgctgccctcctcctggcctcccaggtttcagttgtgtctgacagagcattaggttttcctgttactgctgtgtaataataaagaaagattcggcttttggcaatcacggacacttttttcccctccaccgaatgtcaggattgaaagctgcctccgagtggttggggatggttttctgaccctacggtaactagatctaatatatatcatcagaaaatatatattgtatgtttactcttattttcagaaagagaaaatgaataaaaatgatgacatc

SEQ ID NO: 1045 - DNA, 2935 bp, Homo sapiens
  source 1..2935: mol_type = unassigned DNA
tgcagaagcctggctacagataagggaccaaaatgactgactcaaaatatttcaccacgaccaagaaaggggagatcttcgagctgaaggcagagctcaacagtgacaagaaggagaagaagaaggaggcagtgaagaaagtgattgcatcgatgaccgtgggcaaagatgtcagtgccctcttccccgatgtggtcaactgcatgcagacggacaacctggagctgaagaagctagtatacctctacttgatgaattacgccaagagtcagcctgacatggccattatggccgtcaacacctttgtgaaggactgtgaggaccccaaccccctcatccgagccctggcagtgcggaccatgggctgcatccgcgttgacaagatcacagagtacctgtgcgagccactccggaagtgcctgaaggacgaggatccatatgtgcgcaagacagcagctgtgtgcgtggccaagctccacgacatcaacgcccagctggtggaggaccagggcttcctggacacccttaaagacctcatctccgactctaaccccatggtggtggccaatgcagtggcagcgctctcagaaattgccgagtctcaccccagcagcaacctgctcgatctgaacccacagtccatcaacaagctgctgacagccctcaatgagtgcaccgagtggggccagatcttcatcctggactgcctcgccaactatatgcccaaggacgaccgcgaggcccagagcatctgtgagcgggtcacccccaggctctcccatgccaactccgctgtggtgctctctgctgtgaaggtgctgatgaagttcatggagatgttgtctaaggacttggactactacggcacactgctcaagaagctggccccacccctggtcacactgctgtcagccgagccagagctgcagtatgtggccctgcgcaacatcaatctcatcgtgcagaaaaggcctgagatcctgaagcatgagatgaaggtgttcttcgtgaagtacaacgaccctatctacgtgaagctggagaagctggacatcatgatccgcctggcctctcaggccaacatcgcccaggtgttggcagagctgaaagagtacgcaacagaagtggatgtggactttgtacggaaggctgtgcgtgctattggccgctgcgccatcaaggtggagcaatctgcggagcgctgtgtgagcacgctgctcgacctcatccagaccaaggtcaactatgtggtccaggaggccatcgtggtcatcaaggacatcttccgcaagtaccccaacaagtatgagagtgtgattgccacactgtgtgagaatctggactccctggatgagcctgaggcccgggctgccatgatctggattgtgggcgagtacgcggaacggatcgacaacgcagatgagctgctggagagcttcctcgagggcttccatgacgagagcacacaggtccagctgcagctgctgacagccattgtgaaactctttctaaagaagccaacagagacccaggagctggtgcagcaggtcctcagtttggccactcaggactcagataacccagacctgcgggaccgtggctacatctactggcgcctgctgtccacggacccggtggcagccaaggaggtggtgttggctgagaagccactcatctctgaagagacggacctcatcgagcccacactgttagacgagcttatctgctacatcggcacgctggcttccgtctaccataagcctcccagtgcctttgtggaggggggccggggcgtcgtgcacaagagcctgccacctcgcacggcctcgagtgagagcgcagagagccctgagacagcccctactggagcacctcctggggagcagccagatgtcatccccgcccagggcgacctgctgggtgacctcctcaacctggacctcggccccccagtgagcggcccacccctggccacctcctcggtgcagatgggagctgtggaccttcttggcggtggccttgacagcctgattgggggcaccaacttcgtggcacctccaacagcagcagtaccagccaatcttggagcacccatcggcagtggcctgagtgacctctttgacctgaccagtggcgtgggcaccctgtcaggatcatatgtggcccccaaagcagtctggctcccagccatgaaggctaaggggctggagatctcaggcaccttcacccgccaggtgggctccatctccatggacctgcagctgaccaacaaggccttgcaggtcatgaccgactttgccatccagttcaaccgcaacagctttggcctggcccccgccacccccctccaggtccacgcgccactcagccccaaccagacagtggagatctccctgcctctcagcacggtgggctcggtcatgaagatggagcctctgaacaacctccaggtggccgtgaagaacaacatcgatgtcttctacttcagcaccttgtacccactgcacatcctctttgtggaggacgggaagatggaccggcagatgttcctggccacatggaaggatattcccaatgagaatgaggcccagttccagatcagagactgccccctcaatgcagaggctgcgagcagcaagctgcagagcagcaacatcttcactgtcgccaagaggaacgtggagggccaggacatgctctaccagtccctgaagctgaccaacggcatctgggtgctggcggagctgcggatccagccgggcaaccccagctgcacgctgtccctgaagtgtcgagcaccagaggtgtcccagcacgtgtaccaggcctacgagaccatcctcaagaactgagaccccggccagcgcccaccccagccttctgcccgccccatcgaggaggcccctcgggggcagcacatcttcctcctcgcagg

SEQ ID NO: 1046 - DNA, 3838 bp, Homo sapiens
  source 1..3838: mol_type = unassigned DNA
tgcagaagcctggctacagataagggaccaaaatgactgactcaaaatatttcaccacgaccaagaaaggggagatcttcgagctgaaggcagagctcaacagtgacaagaaggagaagaagaaggaggcagtgaagaaagtgattgcatcgatgaccgtgggcaaagatgtcagtgccctcttccccgatgtggtcaactgcatgcagacggacaacctggagctgaagaagctagtatacctctacttgatgaattacgccaagagtcagcctgacatggccattatggccgtcaacacctttgtgaaggactgtgaggaccccaaccccctcatccgagccctggcagtgcggaccatgggctgcatccgcgttgacaagatcacagagtacctgtgcgagccactccggaagtgcctgaaggacgaggatccatatgtgcgcaagacagcagctgtgtgcgtggccaagctccacgacatcaacgcccagctggtggaggaccagggcttcctggacacccttaaagacctcatctccgactctaaccccatggtggtggccaatgcagtggcagcgctctcagaaattgccgagtctcaccccagcagcaacctgctcgatctgaacccacagtccatcaacaagctgctgacagccctcaatgagtgcaccgagtggggccagatcttcatcctggactgcctcgccaactatatgcccaaggacgaccgcgaggcccagagcatctgtgagcgggtcacccccaggctctcccatgccaactccgctgtggtgctctctgctgtgaaggtgctgatgaagttcatggagatgttgtctaaggacttggactactacggcacactgctcaagaagctggccccacccctggtcacactgctgtcagccgagccagagctgcagtatgtggccctgcgcaacatcaatctcatcgtgcagaaaaggcctgagatcctgaagcatgagatgaaggtgttcttcgtgaagtacaacgaccctatctacgtgaagctggagaagctggacatcatgatccgcctggcctctcaggccaacatcgcccaggtgttggcagagctgaaagagtacgcaacagaagtggatgtggactttgtacggaaggctgtgcgtgctattggccgctgcgccatcaaggtggagcaatctgcggagcgctgtgtgagcacgctgctcgacctcatccagaccaaggtcaactatgtggtccaggaggccatcgtggtcatcaaggacatcttccgcaagtaccccaacaagtatgagagtgtgattgccacactgtgtgagaatctggactccctggatgagcctgaggcccgggctgccatgatctggattgtgggcgagtacgcggaacggatcgacaacgcagatgagctgctggagagcttcctcgagggcttccatgacgagagcacacaggtccagctgcagctgctgacagccattgtgaaactctttctaaagaagccaacagagacccaggagctggtgcagcaggtcctcagtttggccactcaggactcagataacccagacctgcgggaccgtggctacatctactggcgcctgctgtccacggacccggtggcagccaaggaggtggtgttggctgagaagccactcatctctgaagagacggacctcatcgagcccacactgttagacgagcttatctgctacatcggcacgctggcttccgtctaccataagcctcccagtgcctttgtggaggggggccggggcgtcgtgcacaagagcctgccacctcgcacggcctcgagtgagagcgcagagagccctgagacagcccctactggagcacctcctggggagcagccagatgtcatccccgcccagggcgacctgctgggtgacctcctcaacctggacctcggccccccagtgagcggcccacccctggccacctcctcggtgcagatgggagctgtggaccttcttggcggtggccttgacagcctgatgggggatgagcctgaagggattgggggcaccaacttcgtggcacctccaacagcagcagtaccagccaatcttggagcacccatcggcagtggcctgagtgacctctttgacctgaccagtggcgtgggcaccctgtcaggatcatatgtggcccccaaagcagtctggctcccagccatgaaggctaaggggctggagatctcaggcaccttcacccgccaggtgggctccatctccatggacctgcagctgaccaacaaggccttgcaggtcatgaccgactttgccatccagttcaaccgcaacagctttggcctggcccccgccacccccctccaggtccacgcgccactcagccccaaccagacagtggagatctccctgcctctcagcacggtgggctcggtcatgaagatggagcctctgaacaacctccaggtggccgtgaagaacaacatcgatgtcttctacttcagcaccttgtacccactgcacatcctctttgtggaggacgggaagatggaccggcagatgttcctggccacatggaaggatattcccaatgagaatgaggcccagttccagatcagagactgccccctcaatgcagaggctgcgagcagcaagctgcagagcagcaacatcttcactgtcgccaagaggaacgtggagggccaggacatgctctaccagtccctgaagctgaccaacggcatctgggtgctggcggagctgcggatccagccgggcaaccccagctgcacggacttagagctgtccctgaagtgtcgagcaccagaggtgtcccagcacgtgtaccaggcctacgagaccatcctcaagaactgagaccccggccagcgcccaccccagccttctgcccgccccatcgaggaggcccctcgggggcagcacatcttcctcctcgcaggagggaccaggcggggctccaggccactcagtgggctccctggtcctgatggcagaacccacccgatccctggggtagggcaccaccccctcctggggtgagagcgcagtgcactcccgtgctctgggacacccctgctcctgtggctgtgatgtggggttaagtgaggtggggaccaaaggaaacagagccagagcagccacagaagctgtgcctgaagggtgagtgtggagcttgcccctccggctcacagccccggcagcccctggctccttggtctctccggttggtgttaaagggccctccactgccacctctcatgggatggaccctgccaacctggcctgggtgtgcagggaggggttccccttggtaccaggagagctgctcacttagggcctggggctcaaggagctgtaggtgccggcagaggggcagagctaggctgggaggagcccagggcctgcaccacccacttgcaaccaccaggctggtgccctgcagctgtgccagttgggccacagcctcccgagtgctgacccacatggtcaagaccaggcagaagctcccagagcccctgtctcgggctccccaccgactggcagctgcactatccccaactccccacttctgccccaagggtggtcactgcctgtgatacattcctcagtgtcgcctctgagcccaggcctcctgccacaaagactgggccgagagatggggctgggtaagcgggtgcgcctcctgtttgggtttcttcggggtttctctgtagtgtctgctgccctcctcctggcctcccaggtttcagttgtgtctgacagagcattaggttttcctgttactgctgtgtaataataaagaaagattcggc

SEQ ID NO: 1047 - DNA, 2838 bp, Homo sapiens
  source 1..2838: mol_type = unassigned DNA
tacagataagggaccaaaatgactgactcaaaatatttcaccacgaccaagaaaggggagatcttcgagctgaaggcagagctcaacagtgacaagaaggagaagaagaaggaggcagtgaagaaagtgattgcatcgatgaccgtgggcaaagatgtcagtgccctcttccccgatgtggtcaactgcatgcagacggacaacctggagctgaagaagctagtatacctctacttgatgaattacgccaagagtcagcctgacatggccattatggccgtcaacacctttgtgaaggactgtgaggaccccaaccccctcatccgagccctggcagtgcggaccatgggctgcatccgcgttgacaagatcacagagtacctgtgcgagccactccggaagtgcctgaaggacgaggatccatatgtgcgcaagacagcagctgtgtgcgtggccaagctccacgacatcaacgcccagctggtggaggaccagggcttcctggacacccttaaagacctcatctccgactctaaccccatggtggtggccaatgcagtggcagcgctctcagaaattgccgagtctcaccccagcagcaacctgctcgatctgaacccacagtccatcaacaagctgctgacagccctcaatgagtgcaccgagtggggccagatcttcatcctggactgcctcgccaactatatgcccaaggacgaccgcgaggcccagagcatctgtgagcgggtcacccccaggctctcccatgccaactccgctgtggtgctctctgctgtgaaggtgctgatgaagttcatggagatgttgtctaaggacttggactactacggcacactgctcaagaagctggccccacccctggtcacactgctgtcagccgagccagagctgcagtatgtggccctgcgcaacatcaatctcatcgtgcagaaaaggcctgagatcctgaagcatgagatgaaggtgttcttcgtgaagtacaacgaccctatctacgtgaagctggagaagctggacatcatgatccgcctggcctctcaggccaacatcgcccaggtgttggcagagctgaaagagtacgcaacagaagtggatgtggactttgtacggaaggctgtgcgtgctattggccgctgcgccatcaaggtggagcaatctgcggagcgctgtgtgagcacgctgctcgacctcatccagaccaaggtcaactatgtggtccaggaggccatcgtggtcatcaaggacatcttccgcaagtaccccaacaagtatgagagtgtgattgccacactgtgtgagaatctggactccctggatgagcctgaggcccgggctgccatgatctggattgtgggcgagtacgcggaacggatcgacaacgcagatgagctgctggagagcttcctcgagggcttccatgacgagagcacacaggtccagctgcagctgctgacagccattgtgaaactctttctaaagaagccaacagagacccaggagctggtgcagcaggtcctcagtttggccactcaggactcagataacccagacctgcgggaccgtggctacatctactggcgcctgctgtccacggacccggtggcagccaaggaggtggtgttggctgagaagccactcatctctgaagagacggacctcatcgagcccacactgttagacgagcttatctgctacatcggcacgctggcttccgtctaccataagcctcccagtgcctttgtggaggggggccggggcgtcgtgcacaagagcctgccacctcgcacggcctcgagtgagagcgcagagagccctgagacagcccctactggagcacctcctggggagcagccagatgtcatccccgcccagggcgacctgctgggtgacctcctcaacctggacctcggccccccagtgagcggcccacccctggccacctcctcggtgcagatgggagctgtggaccttcttggcggtggccttgacagcctgattgggggcaccaacttcgtggcacctccaacagcagcagtaccagccaatcttggagcacccatcggcagtggcctgagtgacctctttgacctgaccagtggcgtgggcaccctgtcaggatcatatgtggcccccaaagcagtctggctcccagccatgaaggctaaggggctggagatctcaggcaccttcacccgccaggtgggctccatctccatggacctgcagctgaccaacaaggccttgcaggtcatgaccgactttgccatccagttcaaccgcaacagctttggcctggcccccgccacccccctccaggtccacgcgccactcagccccaaccagacagtggagatctccctgcctctcagcacggtgggctcggtcatgaagatggagcctctgaacaacctccaggtggccgtgaagaacaacatcgatgtcttctacttcagcaccttgtacccactgcacatcctctttgtggaggacgggaagatggaccggcagatgttcctggccacatggaaggatattcccaatgagaatgaggcccagttccagatcagagactgccccctcaatgcagaggctgcgagcagcaagctgcagagcagcaacatcttcactgtcgccaagaggaacgtggagggccaggacatgctctaccagtccctgaagctgaccaacggcatctgggtgctggcggagctgcggatccagccgggcaaccccagctgcacgctgtccctgaagtgtcgagcaccagaggtgtcccagcacgtgtaccaggcctacgagaccatcctcaagaactga

SEQ ID NO: 1048 - DNA, 1908 bp, Homo sapiens
  source 1..1908: mol_type = unassigned DNA
cacccatctgtcaccagcaggttgcgtcctgggaatttagggccctctgatgttgtattgggcctgcaggggaggggacaggctctgacggctttttcttctggagaggcaagaaattccgagcagctctcacattagttatctaagaagcctggctacagataagggaccaaaatgactgactcaaaatatttcaccacgaccaagaaaggggagatcttcgagctgaaggcagagctcaacagtgacaagaaggagaagaagaaggaggcagtgaagaaagtgattgcatcgatgaccgtgggcaaagatgtcagtgccctcttccccgatgtggtcaactgcatgcagacggacaacctggagctgaagaagctagtatacctctacttgatgaattacgccaagagtcagcctgacatggccattatggccgtcaacacctttgtgaaggactgtgaggaccccaaccccctcatccgagccctggcagtgcggaccatgggctgcatccgcgttgacaagatcacagagtacctgtgcgagccactccggaagtgcctgaaggacgaggatccatatgtgcgcaagacagcagctgtgtgcgtggccaagctccacgacatcaacgcccagctggtggaggaccagggcttcctggacacccttaaagacctcatctccgactctaaccccatggtggtggccaatgcagtggcagcgctctcagaaattgccgagtctcaccccagcagcaacctgctcgatctgaacccacagtccatcaacaagctgctgacagccctcaatgagtgcaccgagtggggccagatcttcatcctggactgcctcgccaactatatgcccaaggacgaccgcgaggcccagagcatctgtgagcgggtcacccccaggctctcccatgccaactccgctgtggtgctctctgctgtgaaggtgctgatgaagttcatggagatgttgtctaaggacttggactactacggcacactgctcaagaagctggccccacccctggtcacactgctgtcagccgagccagagctgcagtatgtggccctgcgcaacatcaatctcatcgtgcagaaaaggcctgagatcctgaagcatgagatgaaggtgttcttcgtgaagtacaacgaccctatctacgtgaagctggagaagctggacatcatgatccgcctggcctctcaggccaacatcgcccaggtgttggcagagctgaaagagtacgcaacagaagtggatgtggactttgtacggaaggctgtgcgtgctattggccgctgcgccatcaaggtggagcaatctgcggagcgctgtgtgagcacgctgctcgacctcatccagaccaaggtcaactatgtggtccaggaggccatcgtggtcatcaaggacatcttccgcaagtaccccaacaagtatgagagtgtgattgccacactgtgtgagaatctggactccctggatgagcctgaggcccgggctgccatgatctggattgtgggcgagtacgcggaacggatcgacaacgcagatgagctgctggagagcttcctcgagggcttccatgacgagagcacacaggtccagctgcagctgctgacagccattgtgaaactctttctaaagaagccaacagagacccaggagctggtgcagcaggtcctcagtttggccactcaggactcagataacccagacctgcgggaccgtggctacatctactggcgcctgctgtccacggacccggtggcagccaaggaggtggtgttggctgagaagccactcatctctgaagagacggacctcatcgagcccacactgttagacgagcttatctgctacatcggcacgctggcttccgtctaccataagcctccc

SEQ ID NO: 1049 - DNA, 4146 bp, Homo sapiens
  source 1..4146: mol_type = unassigned DNA
cccgcgcgcgggcagctcacttccgcccggcaggtgacagccgcggggctccgagccgccggcagcccggacgcaccgggagagcgagaggtggaggccgcggacattttggtgccaagccgaaccgagccggggcgccgggagctattgggacctgcggaagcctggctacagataagggaccaaaatgactgactcaaaatatttcaccacgaccaagaaaggggagatcttcgagctgaaggcagagctcaacagtgacaagaaggagaagaagaaggaggcagtgaagaaagtgattgcatcgatgaccgtgggcaaagatgtcagtgccctcttccccgatgtggtcaactgcatgcagacggacaacctggagctgaagaagctagtatacctctacttgatgaattacgccaagagtcagcctgacatggccattatggccgtcaacacctttgtgaaggactgtgaggaccccaaccccctcatccgagccctggcagtgcggaccatgggctgcatccgcgttgacaagatcacagagtacctgtgcgagccactccggaagtgcctgaaggacgaggatccatatgtgcgcaagacagcagctgtgtgcgtggccaagctccacgacatcaacgcccagctggtggaggaccagggcttcctggacacccttaaagacctcatctccgactctaaccccatggtggtggccaatgcagtggcagcgctctcagaaattgccgagtctcaccccagcagcaacctgctcgatctgaacccacagtccatcaacaagctgctgacagccctcaatgagtgcaccgagtggggccagatcttcatcctggactgcctcgccaactatatgcccaaggacgaccgcgaggcccagagcatctgtgagcgggtcacccccaggctctcccatgccaactccgctgtggtgctctctgctgtgaaggtgctgatgaagttcatggagatgttgtctaaggacttggactactacggcacactgctcaagaagctggccccacccctggtcacactgctgtcagccgagccagagctgcagtatgtggccctgcgcaacatcaatctcatcgtgcagaaaaggcctgagatcctgaagcatgagatgaaggtgttcttcgtgaagtacaacgaccctatctacgtgaagctggagaagctggacatcatgatccgcctggcctctcaggccaacatcgcccaggtgttggcagagctgaaagagtacgcaacagaagtggatgtggactttgtacggaaggctgtgcgtgctattggccgctgcgccatcaaggtggagcaatctgcggagcgctgtgtgagcacgctgctcgacctcatccagaccaaggtcaactatgtggtccaggaggccatcgtggtcatcaaggacatcttccgcaagtaccccaacaagtatgagagtgtgattgccacactgtgtgagaatctggactccctggatgagcctgaggcccgggctgccatgatctggattgtgggcgagtacgcggaacggatcgacaacgcagatgagctgctggagagcttcctcgagggcttccatgacgagagcacacaggtccagctgcagctgctgacagccattgtgaaactctttctaaagaagccaacagagacccaggagctggtgcagcaggtcctcagtttggccactcaggactcagataacccagacctgcgggaccgtggctacatctactggcgcctgctgtccacggacccggtggcagccaaggaggtggtgttggctgagaagccactcatctctgaagagacggacctcatcgagcccacactgttagacgagcttatctgctacatcggcacgctggcttccgtctaccataagcctcccagtgcctttgtggaggggggccggggcgtcgtgcacaagagcctgccacctcgcacggcctcgagtgagagcgcagagagccctgagacagcccctactggagcacctcctggggagcagccagatgtcatccccgcccagggcgacctgctgggtgacctcctcaacctggacctcggccccccagtgagcggcccacccctggccacctcctcggtgcagatgggagctgtggaccttcttggcggtggccttgacagcctgattgggggcaccaacttcgtggcacctccaacagcagcagtaccagccaatcttggagcacccatcggcagtggcctgagtgacctctttgacctgaccagtggcgtgggcaccctgtcaggatcatatgtggcccccaaagcagtctggctcccagccatgaaggctaaggggctggagatctcaggcaccttcacccgccaggtgggctccatctccatggacctgcagctgaccaacaaggccttgcaggtcatgaccgactttgccatccagttcaaccgcaacagctttggcctggcccccgccacccccctccaggtccacgcgccactcagccccaaccagacagtggagatctccctgcctctcagcacggtgggctcggtcatgaagatggagcctctgaacaacctccaggtggccgtgaagaacaacatcgatgtcttctacttcagcaccttgtacccactgcacatcctctttgtggaggacgggaagatggaccggcagatgttcctggccacatggaaggatattcccaatgagaatgaggcccagttccagatcagagactgccccctcaatgcagaggctgcgagcagcaagctgcagagcagcaacatcttcactgtcgccaagaggaacgtggagggccaggacatgctctaccagtccctgaagctgaccaacggcatctgggtgctggcggagctgcggatccagccgggcaaccccagctgcacgctgtccctgaagtgtcgagcaccagaggtgtcccagcacgtgtaccaggcctacgagaccatcctcaagaactgagaccccggccagcgcccaccccagccttctgcccgccccatcgaggaggcccctcgggggcagcacatcttcctcctcgcaggagggaccaggcggggctccaggccactcagtgggctccctggtcctgatggcagaacccacccgatccctggggtagggcaccaccccctcctggggtgagagcgcagtgcactcccgtgctctgggacacccctgctcctgtggctgtgatgtggggttaagtgaggtggggaccaaaggaaacagagccagagcagccacagaagctgtgcctgaagggtgagtgtggagcttgcccctccggctcacagccccggcagcccctggctccttggtctctccggttggtgttaaagggccctccactgccacctctcatgggatggaccctgccaacctggcctgggtgtgcagggaggggttccccttggtaccaggagagctgctcacttagggcctggggctcaaggagctgtaggtgccggcagaggggcagagctaggctgggaggagcccagggcctgcaccacccacttgcaaccaccaggctggtgccctgcagctgtgccagttgggccacagcctcccgagtgctgacccacatggtcaagaccaggcagaagctcccagagcccctgtctcgggctccccaccgactggcagctgcactatccccaactccccacttctgccccaagggtggtcactgcctgtgatacattcctcagtgtcgcctctgagcccaggcctcctgccacaaagactgggccgagagatggggctgggtaagcgggtgcgcctcctgtttgggtttcttcggggtttctctgtagtgtctgctgccctcctcctggcctcccaggtttcagttgtgtctgacagagcattaggttttcctgttactgctgtgtaataataaagaaagattcggcttttggcaatcacggacacttttttcccctccaccgaatgtcaggattgaaagctgcctccgagtggttggggatggttttctgaccctacggtaactagatctaatatatatcatcagaaaatatatattgtatgtttactcttattttcagaaagagaaaatgaataaaaatgatgacatc

SEQ ID NO: 1050 - DNA, 6841 bp, Homo sapiens
  source 1..6841: mol_type = unassigned DNA
gctctgccaggagcagtcgcctcctccttggcaaatagtcctcggcagggtccgagttcttggataattcgagagaaaaggcacgataagttgcagtacgaggacacggaaacgaccaggagaggaggacagggagcgaagtttcctcaatagtgtgtgaagttagttaaaaactccctccttcctcaggatccctccgcctgcggtagcggtggtgaggccgagggagccgccattttggatgttcggttcctgctgccactgctgccgccgcccccggagctgctggtttcattcgaggtttcgggccgaggatgccagcccccatcagattgcgggagctgatccggaccatccggacagcccgaacccaagctgaagaacgagaaatgatccagaaagaatgtgctgcaatccggtcatcttttagagaagaagacaatacataccgatgtcggaatgtggcaaaattactgtatatgcacatgctgggctaccctgctcactttggacagttggagtgcctcaagcttattgcctctcaaaaatttacagacaaacgcattggctatttaggggcaatgctgctgttagatgaaagacaagatgtccatcttctcatgaccaactgtatcaagaatgatcttaatcatagcacgcaattcgtacaggggttagcactttgtaccctcggctgcatgggctcctcagagatgtgcagagatcttgcaggagaggtagagaagctcctgaaaacctccaactcttacttaagaaaaaaggcagcactgtgtgctgttcatgtcatcaggaaagttcctgaacttatggagatgtttttaccagcaacaaaaaatttattgaatgagaagaaccatggtgtcctccacacatctgtagtcctcctcacagaaatgtgtgagcgaagcccagacatgcttgcgcatttcagaaagcttgtgccccaattagttcgtattttaaagaacctcatcatgtccggatattcaccagaacatgatgtttctggtatcagtgacccctttttgcaggtacgaattttgcggttattaagaattttaggacgaaatgatgatgattcaagtgaagctatgaatgatatattagcacaggttgccactaatactgagactagtaaaaatgtaggaaatgctattctttatgaaacggttttgactatcatggatattaagtcagagagtggattgcgagtcctagccataaatatcctgggtcgtttcttattgaacaatgacaagaatattagatatgtggctctgacatctttgttgaagactgtacagacagatcataatgcagtacagaggcacagaagcacaattgtggactgtcttaaagatttggatgtctcaataaaacggcgtgcaatggaattgagttttgccctggtaaatgggaataatatccgaggcatgatgaaagaattactttattttctggattcgtgtgagccagaatttaaagcagactgtgcatctggaatctttcttgctgcagaaaagtatgcaccttccaaacgatggcatatagacacaattatgcgtgttttgacaacggcaggaagttatgttcgtgatgatgcagtccccaatttaatccagttaataactaatagtgtggagatgcatgcctatactgtccagcgcctgtacaaagcaattcttggtgattattctcaacaacctttggtacaagtggctgcatggtgtataggtgaatatggtgatcttcttgtatctggccagtgtgaagaggaagagcctattcaggtaacagaggatgaagtgttggatattttagaaagtgtcctaatctctaatatgtccacctctgtgacacgaggttatgccctcactgccattatgaagctttccactcgattcacttgtactgtaaaccgaattaagaaagtggtttccatctacggaagcagcattgatgtggaactccagcagagggcagtagaatataatgcacttttcaagaaatatgaccacatgaggtctgccctacttgagagaatgcctgtcatggaaaaagtgaccacaaatggccctactgagattgtgcagacaaatggagagacagaaccagctccactagagaccaaaccgccaccctctgggccacagcccaccagccaggccaatgatttattggatttgttgggaggaaatgacataacacctgttattccaactgcgcctacaagcaaaccatcttctgctggtggagaacttcttgatttgctgggagacatcaaccttacaggtgctccagctgctgctcctgcccctgcctcagtcccacagatatcccagccccccttcttgttggatgggctttcatcacagcctctcttcaatgatattgctgcaggcatcccctccatcacagcatacagtaagaatggcttgaagatagaattcacctttgaacggtcaaataccaaccccagtgtaacagtgataacgatacaggcctccaacagcacagagctagatatgacggactttgttttccaagctgcagtaccaaagacattccagctgcagctcttgtctcctagcagcagcattgtcccagcatttaacacggggaccatcacacaagtcattaaagttctgaaccctcagaagcaacagctgcgaatgcggatcaagcttacatataatcacaagggctcagcaatgcaagatctagcagaggtgaacaactttccccctcagtcctggcaatgagggtttggcaccattctcattctttatcccactcaatcaaaggaactctgggaaggaggttgtgattgctggcaagtcccccccaactgtaccacgggcatgaggagctgaagagaactgctgaggaggattttcctaaagttactgctgaccttgaagcattgttaaagactaatgtcctctcctccactgttgaggctggctgcttctggaggctactttgcactcttcctcttctcctttttccgcacttctccacccctcccacatttacagccagaatcaacattccctgggcccctgaggaaataagcagctggtctggaggagaggactgcaatccatggcgaaaaaacactcactttgtctctgcagcaaagagttgccccttctttctactgttgtttctctgtggactgggcaaggtggggtatttattcctcactagctgggttaccatcttcaggcacttttaacatctggcattcggaatggaaatgtaataatggacattagggagccctgcctttttctactggttcccccaatgtttgaaagaggcattaggctcctggtagccttttctgtgcattgctgtatacacacagacacacacatgtatgtttgttaccaagaactggtcagaccttgcgagtttatttgtaaacactggacagatggagttaaaaagagcttttgttgagatttggcatgaaggatatggtgctctatttgtaatagaaacttccaaggctcttccagctcccctttctcgccattctttagctgtagtcatgaatagtctccatgattttcaaaattgattccctttaaagtgcaaaatggtcaccttctaaaagatatattcatagttattaatgaccctattcccaccacaaattttaaagtgctcctaagcccataacttgcctgtttgaactatggtaatgggtggaagaggagttcaccagtttcaaagatcagactctgtatcaaaagtacctttgcccttaggaagagtgagtattggagtcatcttatctattactccaaacctccctttttatttcttgagcctggcttggaccttggcattccgtttgaattccttctaactggaacatttgtgttgtatctgtaacactggcactgaaataaagaccacacggttaaagaaatctttccatattgtactttatggtgttggagtgaagccttgtagcttccatacccctatgtcagaggaggtcttacggacaccatagggtaggaatagcctttcctcagtctgagaaattggtctcttttaaaagacgaatctcatgaatattcacatcaaagacttgagctttttaaactagtgagagtgccaagtgctttttagaaaggacccatatgttatcaaactttgaaattgagttgctggaatgaagtagaggtgactctctctgtggtacacattgaatgtactatgtatgttcaagtattcaggcgccatgtcttatatactgaagaaagaaaaagtgaggcccaccttgctcttacaatgtttgcaattgttactgtattgaatacagtataatgactactatggcttcaatcttaaacctggaaacaaatatccctttttttccccttcatttcaccaagcctttacttaaaatcttcagtgtcttgtcaaatctagctctgtatcagatgctggaatattcctaacatttgacaaactggagttgaactaaaggctccacgggaaagtttctggtcttactagtgtgtatgagcaagatctgctaaaacttactccactgggtaaatggttgactgagtcaagaacaggataatatctcctgcatagttttcagtaatgtaagtgtggactagtgcatatttcagacaactgctctgcctgtgcaatgaaaaatagcctttaagggtttctttgcagactgatttcattggatggatacttaatgctgtgaaacatgataggattaacataatgttggtggatttcttgaatagaatttgtcttaacattcctctttgtgtagaggctttattttctctcttatatttgtagctaaccagctcaggtttttttatttgaactgggttgaatctctgaagaaatctgttcaagaccatgctataagacactgtcagctaatggagctgggaagggtctactctgctgacagagcatttccttgggtgatcatagtttcgaggtagagtttatgatcattcatagctttgtctagaaggagtaaaatatcatggccttaacacaaagggtgctgcgtagaatatgaattgattttggaatcagaacacaagcaccatactgaaggactagcagccaaataactgcctaggatactgatggttgtgaagactgtttcaaatgattggatctttgaaagcttcagcgtgccttagtttctaggatcagaattagttttcctctcacttggccttgcagctaaatggagaaatgtttcaatttctttgaatacttgcacatttcaataattcctttcccgagtataaccactcaagggggagcaaatttggatggatttacgacttcacaggcattgtgaggaaagagcattttccaaggctgttttgataaccctggggtgataagcagtgagccctcacacacttactttgacaatttcacatgcacttgtacttcattatttccctcttcaagagtcgtttctattctagtttctgccccatcccggggaatcctaaaggagaattaattcatctaagtaatctcaaaaaactgtaggaagggtgctctccctgagaagcttctcccacagtgctttggtgctgttaccttgaggtggtttggacagtcacggaagttttaggctgtgcatagtgatcatctgttaattttaaggtctttatcatttaaagaaacattcctcagtgtaacatttgggaggggattctttcctcttgctagtttaaaggtgtgatttgtactccttgtttgtcccattcatatatgaaaatagacttttaaaactgtccaacactaatggtttatataacatgcttcccattttttttatgtcgtagaaattggaagttagggagtactgctttcaaggttcaacttcattatcttctgcattggaaaatatttgggccatgagaactaggggaaaggagtttgaatgtgtctatttttttctagtgaatgtattttaaccacagtgtcctaaactgagaaaactagagaggaaaaagtgggtgttcatgaactttgtagttgggagagtggttttacatgtctgtgtattcatgactttgggagtgggtaggatcattggagagagaattgcacagaaagtcctgaagtttaaaacacttttgaccagctttggctcgggagagtggggctgcttgtagaactggaagtgaataactttttcaagcaatatcagtgagtgggtcccatcgacagggttccaggacctggaacactttaacagaaggaaatgccgaagcagcttgcacagttgctttacagacttccaagaggctgattctggcttcaagatggagccttggagttggtttttttttttttttttttcttccctcaaagaacctgcggttgcgctttgtgtgttttgtttttgttttccatttgggggccccatgggaaagagcttctgaactctttcctttatgaactcccactgtgttcctataaaggcccttttctttcttagtgttgtaagttacattttcattatgccccatcacatcttctttactgtaaaaatattaaaaagctgtttccaagtgggacagctaatgaagctctaattattgcagacatatttttgagatgtaaaaaaaaaaatttaaagttaaatgataagtcttagaggcgagtgaggaataaaatggatgtaaacatttacatgggatgcattagaattctgctgtgtgtactgtcttttggttgaaacaaattatgaacagtgactaataataaaaagtcaatacccaatgatttaaaa

SEQ ID NO: 1051 - DNA, 4792 bp, Homo sapiens
  source 1..4792: mol_type = unassigned DNA
tagtcctcggcagggtccgagttcttggataattcgagagaaaaggcacgataagttgcagtacgaggacacggaaacgaccaggagaggaggacagggagcgaagtttcctcaatagtgtgtgaagttagttaaaaactccctccttcctcaggatccctccgcctgcggtagcggtggtgaggccgagggagccgccattttggatgttcggttcctgctgccactgctgccgccgcccccggagctgctggtttcattcgaggtttcgggccgaggatgccagcccccatcagattgcgggagctgatccggaccatccggacagcccgaacccaagctgaagaacgagaaatgatccagaaagaatgtgctgcaatccggtcatcttttagagaagaagacaatacataccgatgtcggaatgtggcaaaattactgtatatgcacatgctgggctaccctgctcactttggacagttggagtgcctcaagcttattgcctctcaaaaatttacagacaaacgcattggctatttaggggcaatgctgctgttagatgaaagacaagatgtccatcttctcatgaccaactgtatcaagaatgatcttaatcatagcacgcaattcgtacaggggttagcactttgtaccctcggctgcatgggctcctcagagatgtgcagagatcttgcaggagaggtagagaagctcctgaaaacctccaactcttacttaagaaaaaaggcagcactgtgtgctgttcatgtcatcaggaaagttcctgaacttatggagatgtttttaccagcaacaaaaaatttattgaatgagaagaaccatggtgtcctccacacatctgtagtcctcctcacagaaatgtgtgagcgaagcccagacatgcttgcgcatttcagaaagaatgaaaagcttgtgccccaattagttcgtattttaaagaacctcatcatgtccggatattcaccagaacatgatgtttctggtatcagtgacccctttttgcaggtacgaattttgcggttattaagaattttaggacgaaatgatgatgattcaagtgaagctatgaatgatatattagcacaggttgccactaatactgagactagtaaaaatgtaggaaatgctattctttatgaaacggttttgactatcatggatattaagtcagagagtggattgcgagtcctagccataaatatcctgggtcgtttcttattgaacaatgacaagaatattagatatgtggctctgacatctttgttgaagactgtacagacagatcataatgcagtacagaggcacagaagcacaattgtggactgtcttaaagatttggatgtctcaataaaacggcgtgcaatggaattgagttttgccctggtaaatgggaataatatccgaggcatgatgaaagaattactttattttctggattcgtgtgagccagaatttaaagcagactgtgcatctggaatctttcttgctgcagaaaagtatgcaccttccaaacgatggcatatagacacaattatgcgtgttttgacaacggcaggaagttatgttcgtgatgatgcagtccccaatttaatccagttaataactaatagtgtggagatgcatgcctatactgtccagcgcctgtacaaagcaattcttggtgattattctcaacaacctttggtacaagtggctgcatggtgtataggtgaatatggtgatcttcttgtatctggccagtgtgaagaggaagagcctattcaggtaacagaggatgaagtgttggatattttagaaagtgtcctaatctctaatatgtccacctctgtgacacgaggttatgccctcactgccattatgaagctttccactcgattcacttgtactgtaaaccgaattaagaaagtggtttccatctacggaagcagcattgatgtggaactccagcagagggcagtagaatataatgcacttttcaagaaatatgaccacatgaggtctgccctacttgagagaatgcctgtcatggaaaaagtgaccacaaatggccctactgagattgtgcagacaaatggagagacagaaccagctccactagagaccaaaccgccaccctctgggccacagcccaccagccaggccaatgatttattggatttgttgggaggaaatgacataacacctgttattccaactgcgcctacaagcaaaccatcttctgctggtggagaacttcttgatttgctgggagacatcaaccttacaggtgctccagctgctgctcctgcccctgcctcagtcccacagatatcccagccccccttcttgttggatgggctttcatcacagcctctcttcaatgatattgctgcaggcatcccctccatcacagcatacagtaagaatggcttgaagatagaattcacctttgaacggtcaaataccaaccccagtgtaacagtgataacgatacaggcctccaacagcacagagctagatatgacggactttgttttccaagctgcagtaccaaagacattccagctgcagctcttgtctcctagcagcagcattgtcccagcatttaacacggggaccatcacacaagtcattaaagttctgaaccctcagaagcaacagctgcgaatgcggatcaagcttacatataatcacaagggctcagcaatgcaagatctagcagaggtgaacaactttccccctcagtcctggcaatgagggtttggcaccattctcattctttatcccactcaatcaaaggaactctgggaaggaggttgtgattgctggcaagtcccccccaactgtaccacgggcatgaggagctgaagagaactgctgaggaggattttcctaaagttactgctgaccttgaagcattgttaaagactaatgtcctctcctccactgttgaggctggctgcttctggaggctactttgcactcttcctcttctcctttttccgcacttctccacccctcccacatttacagccagaatcaacattccctgggcccctgaggaaataagcagctggtctggaggagaggactgcaatccatggcgaaaaaacactcactttgtctctgcagcaaagagttgccccttctttctactgttgtttctctgtggactgggcaaggtggggtatttattcctcactagctgggttaccatcttcaggcacttttaacatctggcattcggaatggaaatgtaataatggacattagggagccctgcctttttctactggttcccccaatgtttgaaagaggcattaggctcctggtagccttttctgtgcattgctgtatacacacagacacacacatgtatgtttgttaccaagaactggtcagaccttgcgagtttatttgtaaacactggacagatggagttaaaaagagcttttgttgagatttggcatgaaggatatggtgctctatttgtaatagaaacttccaaggctcttccagctcccctttctcgccattctttagctgtagtcatgaatagtctccatgattttcaaaattgattccctttaaagtgcaaaatggtcaccttctaaaagatatattcatagttattaatgaccctattcccaccacaaattttaaagtgctcctaagcccataacttgcctgtttgaactatggtaatgggtggaagaggagttcaccagtttcaaagatcagactctgtatcaaaagtacctttgcccttaggaagagtgagtattggagtcatcttatctattactccaaacctccctttttatttcttgagcctggcttggaccttggcattccgtttgaattccttctaactggaacatttgtgttgtatctgtaacactggcactgaaataaagaccacacggttaaagaaatctttccatattgtactttatggtgttggagtgaagccttgtagcttccatacccctatgtcagaggaggtcttacggacaccatagggtaggaatagcctttcctcagtctgagaaattggtctcttttaaaagacgaatctcatgaatattcacatcaaagacttgagctttttaaactagtgagagtgccaagtgctttttagaaaggacccatatgttatcaaactttgaaattgagttgctggaatgaagtagaggtgactctctctgtggtacacattgaatgtactatgtatgttcaagtattcaggcgccatgtcttatatactgaagaaagaaaaagtgaggcccaccttgctcttacaatgtttgcaattgttactgtattgaatacagtataatgactactatggcttcaatcttaaacctggaaacaaatatccctttttttccccttcatttcaccaagcctttacttaaaatcttcagtgtcttgtcaaatctagctctgtatcagatgctggaatattcctaacatttgacaaactggagttgaactaaaggctccacgggaaagtttctggtcttactagtgtgtatgagcaagatctgctaaaacttactccactgggtaaatggttgactgagtcaagaacaggataatatctcctgcatagttttcagtaatgtaagtgtggactagtgcatatttcagacaactgctctgcctgtgcaatgaaaaatagcctttaagggtttctttgcagactgatttcattggatggatacttaatgctgtgaaacatgataggattaacataatgttggtggatttcttgaatagaatttgtctt

SEQ ID NO: 1052 - DNA, 4792 bp, Homo sapiens
  source 1..4792: mol_type = unassigned DNA
tagtcctcggcagggtccgagttcttggataattcgagagaaaaggcacgataagttgcagtacgaggacacggaaacgaccaggagaggaggacagggagcgaagtttcctcaatagtgtgtgaagttagttaaaaactccctccttcctcaggatccctccgcctgcggtagcggtggtgaggccgagggagccgccattttggatgttcggttcctgctgccactgctgccgccgcccccggagctgctggtttcattcgaggtttcgggccgaggatgccagcccccatcagattgcgggagctgatccggaccatccggacagcccgaacccaagctgaagaacgagaaatgatccagaaagaatgtgctgcaatccggtcatcttttagagaagaagacaatacataccgatgtcggaatgtggcaaaattactgtatatgcacatgctgggctaccctgctcactttggacagttggagtgcctcaagcttattgcctctcaaaaatttacagacaaacgcattggctatttaggggcaatgctgctgttagatgaaagacaagatgtccatcttctcatgaccaactgtatcaagaatgatcttaatcatagcacgcaattcgtacaggggttagcactttgtaccctcggctgcatgggctcctcagagatgtgcagagatcttgcaggagaggtagagaagctcctgaaaacctccaactcttacttaagaaaaaaggcagcactgtgtgctgttcatgtcatcaggaaagttcctgaacttatggagatgtttttaccagcaacaaaaaatttattgaatgagaagaaccatggtgtcctccacacatctgtagtcctcctcacagaaatgtgtgagcgaagcccagacatgcttgcgcatttcagaaaggaaagcaagcttgtgccccaattagttcgtattttaaagaacctcatcatgtccggatattcaccagaacatgatgtttctggtatcagtgacccctttttgcaggtacgaattttgcggttattaagaattttaggacgaaatgatgatgattcaagtgaagctatgaatgatatattagcacaggttgccactaatactgagactagtaaaaatgtaggaaatgctattctttatgaaacggttttgactatcatggatattaagtcagagagtggattgcgagtcctagccataaatatcctgggtcgtttcttattgaacaatgacaagaatattagatatgtggctctgacatctttgttgaagactgtacagacagatcataatgcagtacagaggcacagaagcacaattgtggactgtcttaaagatttggatgtctcaataaaacggcgtgcaatggaattgagttttgccctggtaaatgggaataatatccgaggcatgatgaaagaattactttattttctggattcgtgtgagccagaatttaaagcagactgtgcatctggaatctttcttgctgcagaaaagtatgcaccttccaaacgatggcatatagacacaattatgcgtgttttgacaacggcaggaagttatgttcgtgatgatgcagtccccaatttaatccagttaataactaatagtgtggagatgcatgcctatactgtccagcgcctgtacaaagcaattcttggtgattattctcaacaacctttggtacaagtggctgcatggtgtataggtgaatatggtgatcttcttgtatctggccagtgtgaagaggaagagcctattcaggtaacagaggatgaagtgttggatattttagaaagtgtcctaatctctaatatgtccacctctgtgacacgaggttatgccctcactgccattatgaagctttccactcgattcacttgtactgtaaaccgaattaagaaagtggtttccatctacggaagcagcattgatgtggaactccagcagagggcagtagaatataatgcacttttcaagaaatatgaccacatgaggtctgccctacttgagagaatgcctgtcatggaaaaagtgaccacaaatggccctactgagattgtgcagacaaatggagagacagaaccagctccactagagaccaaaccgccaccctctgggccacagcccaccagccaggccaatgatttattggatttgttgggaggaaatgacataacacctgttattccaactgcgcctacaagcaaaccatcttctgctggtggagaacttcttgatttgctgggagacatcaaccttacaggtgctccagctgctgctcctgcccctgcctcagtcccacagatatcccagccccccttcttgttggatgggctttcatcacagcctctcttcaatgatattgctgcaggcatcccctccatcacagcatacagtaagaatggcttgaagatagaattcacctttgaacggtcaaataccaaccccagtgtaacagtgataacgatacaggcctccaacagcacagagctagatatgacggactttgttttccaagctgcagtaccaaagacattccagctgcagctcttgtctcctagcagcagcattgtcccagcatttaacacggggaccatcacacaagtcattaaagttctgaaccctcagaagcaacagctgcgaatgcggatcaagcttacatataatcacaagggctcagcaatgcaagatctagcagaggtgaacaactttccccctcagtcctggcaatgagggtttggcaccattctcattctttatcccactcaatcaaaggaactctgggaaggaggttgtgattgctggcaagtcccccccaactgtaccacgggcatgaggagctgaagagaactgctgaggaggattttcctaaagttactgctgaccttgaagcattgttaaagactaatgtcctctcctccactgttgaggctggctgcttctggaggctactttgcactcttcctcttctcctttttccgcacttctccacccctcccacatttacagccagaatcaacattccctgggcccctgaggaaataagcagctggtctggaggagaggactgcaatccatggcgaaaaaacactcactttgtctctgcagcaaagagttgccccttctttctactgttgtttctctgtggactgggcaaggtggggtatttattcctcactagctgggttaccatcttcaggcacttttaacatctggcattcggaatggaaatgtaataatggacattagggagccctgcctttttctactggttcccccaatgtttgaaagaggcattaggctcctggtagccttttctgtgcattgctgtatacacacagacacacacatgtatgtttgttaccaagaactggtcagaccttgcgagtttatttgtaaacactggacagatggagttaaaaagagcttttgttgagatttggcatgaaggatatggtgctctatttgtaatagaaacttccaaggctcttccagctcccctttctcgccattctttagctgtagtcatgaatagtctccatgattttcaaaattgattccctttaaagtgcaaaatggtcaccttctaaaagatatattcatagttattaatgaccctattcccaccacaaattttaaagtgctcctaagcccataacttgcctgtttgaactatggtaatgggtggaagaggagttcaccagtttcaaagatcagactctgtatcaaaagtacctttgcccttaggaagagtgagtattggagtcatcttatctattactccaaacctccctttttatttcttgagcctggcttggaccttggcattccgtttgaattccttctaactggaacatttgtgttgtatctgtaacactggcactgaaataaagaccacacggttaaagaaatctttccatattgtactttatggtgttggagtgaagccttgtagcttccatacccctatgtcagaggaggtcttacggacaccatagggtaggaatagcctttcctcagtctgagaaattggtctcttttaaaagacgaatctcatgaatattcacatcaaagacttgagctttttaaactagtgagagtgccaagtgctttttagaaaggacccatatgttatcaaactttgaaattgagttgctggaatgaagtagaggtgactctctctgtggtacacattgaatgtactatgtatgttcaagtattcaggcgccatgtcttatatactgaagaaagaaaaagtgaggcccaccttgctcttacaatgtttgcaattgttactgtattgaatacagtataatgactactatggcttcaatcttaaacctggaaacaaatatccctttttttccccttcatttcaccaagcctttacttaaaatcttcagtgtcttgtcaaatctagctctgtatcagatgctggaatattcctaacatttgacaaactggagttgaactaaaggctccacgggaaagtttctggtcttactagtgtgtatgagcaagatctgctaaaacttactccactgggtaaatggttgactgagtcaagaacaggataatatctcctgcatagttttcagtaatgtaagtgtggactagtgcatatttcagacaactgctctgcctgtgcaatgaaaaatagcctttaagggtttctttgcagactgatttcattggatggatacttaatgctgtgaaacatgataggattaacataatgttggtggatttcttgaatagaatttgtctt

SEQ ID NO: 1053 - DNA, 2966 bp, Homo sapiens
  source 1..2966: mol_type = unassigned DNA
gtcgctctgccaggagcagtcgcctcctccttggcaaatagtcctcggcagggtccgagttcttggataattcgagagaaaaggcacgataagttgcagtacgaggacacggaaacgaccaggagaggaggacagggagcgaagtttcctcaatagtgtgtgaagttagttaaaaactccctccttcctcaggatccctccgcctgcggtagcggtggtgaggccgagggagccgccattttggatgttcggttcctgctgccactgctgccgccgcccccggagctgctggtttcattcgaggtttcgggccgtttcaggggtccagtcccaggctgtgggtgttgagaagagaagacagagaagctgggccaggagaggccgggagccccaggggctgctccgacttctggagggccgaccccgaggcctcggaccgggaggttccgcgcgccgcggcgttccgtgttgtggcgttgccccgccgaggatgccagcccccatcagattgcgggagctgatccggaccatccggacagcccgaacccaagctgaagaacgagaaatgatccagaaagaatgtgctgcaatccggtcatcttttagagaagaagacaatacataccgatgtcggaatgtggcaaaattactgtatatgcacatgctgggctaccctgctcactttggacagttggagtgcctcaagcttattgcctctcaaaaatttacagacaaacgcattggctatttaggggcaatgctgctgttagatgaaagacaagatgtccatcttctcatgaccaactgtatcaagaatgatcttaatcatagcacgcaattcgtacaggggttagcactttgtaccctcggctgcatgggctcctcagagatgtgcagagatcttgcaggagaggtagagaagctcctgaaaacctccaactcttacttaagaaaaaaggcagcactgtgtgctgttcatgtcatcaggaaagttcctgaacttatggagatgtttttaccagcaacaaaaaatttattgaatgagaagaaccatggtgtcctccacacatctgtagtcctcctcacagaaatgtgtgagcgaagcccagacatgcttgcgcatttcagaaaggaaagcaagcttgtgccccaattagttcgtattttaaagaacctcatcatgtccggatattcaccagaacatgatgtttctggtatcagtgacccctttttgcaggtacgaattttgcggttattaagaattttaggacgaaatgatgatgattcaagtgaagctatgaatgatatattagcacaggttgccactaatactgagactagtaaaaatgtaggaaatgctattctttatgaaacggttttgactatcatggatattaagtcagagagtggattgcgagtcctagccataaatatcctgggtcgtttcttattgaacaatgacaagaatattagatatgtggctctgacatctttgttgaagactgtacagacagatcataatgcagtacagaggcacagaagcacaattgtggactgtcttaaagatttggatgtctcaataaaacggcgtgcaatggaattgagttttgccctggtaaatgggaataatatccgaggcatgatgaaagaattactttattttctggattcgtgtgagccagaatttaaagcagactgtgcatctggaatctttcttgctgcagaaaagtatgcaccttccaaacgatggcatatagacacaattatgcgtgttttgacaacggcaggaagttatgttcgtgatgatgcagtccccaatttaatccagttaataactaatagtgtggagatgcatgcctatactgtccagcgcctgtacaaagcaattcttggtgattattctccaacctttggtacaagtggctgcatggtgtataggtgaatatggtgatcttcttgtatctggccagtgtgaagaggaagagcctattcaggtaacagaggatgaagtgttggatattttagaaagtgtcctaatctctaatatgtccacctctgtgacacgaggttatgccctcactgccattatgaagctttccactcgattcacttgtactgtaaaccgaattaagaaagtggtttccatctacggaagcagcattgatgtggaactccagcagagggcagtagaatataatgcacttttcaagaaatatgaccacatgaggtctgccctacttgagagaatgcctgtcatggaaaaagtgaccacaaatggccctactgagattgtgcagacaaatggagagacagaaccagctccactagagaccaaaccgccaccctctgggccacagcccaccagccaggccaatgatttattggatttgttgggaggaaatgacataacacctgttattccaactgcgcctacaagcaaaccatcttctgctggtggagaacttcttgatttgctgggagacatcaaccttacaggtgctccagctgctgctcctgcccctgcctcagtcccacagatatcccagccccccttcttgttggatgggctttcatcacagcctctcttcaatgatattgctgcaggcatcccctccatcacagcatacagtaagaatggcttgaagatagaattcacctttgaacggtcaaataccaaccccagtgtaacagtgataacgatacaggcctccaacagcacagagctagatatgacggactttgttttccaagctgcagtaccaaagacattccagctgcagctcttgtctcctagcagcagcattgtcccagcatttaacacggggaccatcacacaagtcattaaagttctgaaccctcagaagcaacagctgcgaatgcggatcaagcttacatataatcacaagggctcagcaatgcaagatctagcagaggtgaacaactttccccctcagtcctggcaatga

SEQ ID NO: 1054 - DNA, 4513 bp, Homo sapiens
  source 1..4513: mol_type = unassigned DNA
agcagtcgcctcctccttggcaaatagtcctcggcagggtccgagttcttggataattcgagagaaaaggcacgataagttgcagtacgaggacacggaaacgaccaggagaggaggacagggagcgaagtttcctcaatagtgtgtgaagttagttaaaaactccctccttcctcaggatccctccgcctgcggtagcggtggtgaggccgagggagccgccattttggatgttcggttcctgctgccactgctgccgccgcccccggagctgctggtttcattcgaggtttcgggccgtttcaggggtccagtcccaggctgtgggtgttgagaagagaagacagagaagctgggccaggagaggccgggagccccaggggctgctccgacttctggagggccgaccccgaggcctcggaccgggaggttccgcgcgccgcggcgttccgtgttgtggcgttgccccgccgctcctggccctgcggacgtcagcgtctaataattctcccggtcttcctgattgcctgaaagagtcgggacggttcggttgattgtgtttcccggttaggactcggtgtaggagatccatcgaaccactcgctcagggtaatgtttatgaagcagattatgtttatgaagcagattaaatggcttttgggaggcaagagctgtcaaatgttttctcatatgtggattccctccctgtgctgaatacttagctttttggtgcttactgacacttgtgtggtatttttttttctcccctattatatatccctgagcacggaaatctgtccatggagaaaaatattaatctgaggaactgtcaaacactgaacacctatgtaatgctcactcatttaaggatgccagcccccatcagattgcgggagctgatccggaccatccggacagcccgaacccaagctgaagaacgagaaatgatccagaaagaatgtgctgcaatccggtcatcttttagagaagaagacaatacataccgatgtcggaatgtggcaaaattactgtatatgcacatgctgggctaccctgctcactttggacagttggagtgcctcaagcttattgcctctcaaaaatttacagacaaacgcattggctatttaggggcaatgctgctgttagatgaaagacaagatgtccatcttctcatgaccaactgtatcaagaatgatcttaatcatagcacgcaattcgtacaggggttagcactttgtaccctcggctgcatgggctcctcagagatgtgcagagatcttgcaggagaggtagagaagctcctgaaaacctccaactcttacttaagaaaaaaggcagcactgtgtgctgttcatgtcatcaggaaagttcctgaacttatggagatgtttttaccagcaacaaaaaatttattgaatgagaagaaccatggtgtcctccacacatctgtagtcctcctcacagaaatgtgtgagcgaagcccagacatgcttgcgcatttcagaaagcttgtgccccaattagttcgtattttaaagaacctcatcatgtccggatattcaccagaacatgatgtttctggtatcagtgacccctttttgcaggtacgaattttgcggttattaagaattttaggacgaaatgatgatgattcaagtgaagctatgaatgatatattagcacaggttgccactaatactgagactagtaaaaatgtaggaaatgctattctttatgaaacggttttgactatcatggatattaagtcagagagtggattgcgagtcctagccataaatatcctgggtcgtttcttattgaacaatgacaagaatattagatatgtggctctgacatctttgttgaagactgtacagacagatcataatgcagtacagaggcacagaagcacaattgtggactgtcttaaagatttggatgtctcaataaaacggcgtgcaatggaattgagttttgccctggtaaatgggaataatatccgaggcatgatgaaagaattactttattttctggattcgtgtgagccagaatttaaagcagactgtgcatctggaatctttcttgctgcagaaaagtatgcaccttccaaacgatggcatatagacacaattatgcgtgttttgacaacggcaggaagttatgttcgtgatgatgcagtccccaatttaatccagttaataactaatagtgtggagatgcatgcctatactgtccagcgcctgtacaaagcaattcttggtgattattctcaacaacctttggtacaagtggctgcatggtgtataggtgaatatggtgatcttcttgtatctggccagtgtgaagaggaagagcctattcaggtaacagaggatgaagtgttggatattttagaaagtgtcctaatctctaatatgtccacctctgtgacacgaggttatgccctcactgccattatgaagctttccactcgattcacttgtactgtaaaccgaattaagaaagtggtttccatctacggaagcagcattgatgtggaactccagcagagggcagtagaatataatgcacttttcaagaaatatgaccacatgaggtctgccctacttgagagaatgcctgtcatggaaaaagtgaccacaaatggccctactgagattgtgcagacaaatggagagacagaaccagctccactagagaccaaaccgccaccctctgggccacagcccaccagccaggccaatgatttattggatttgttgggaggaaatgacataacacctgttattccaactgcgcctacaagcaaaccatcttctgctggtggagaacttcttgatttgctgggagacatcaaccttacaggtgctccagctgctgctcctgcccctgcctcagtcccacagatatcccagccccccttcttgttggatgggctttcatcacagcctctcttcaatgatattgctgcaggcatcccctccatcacagcatacagtaagaatggcttgaagatagaattcacctttgaacggtcaaataccaaccccagtgtaacagtgataacgatacaggcctccaacagcacagagctagatatgacggactttgttttccaagctgcagtaccaaagacattccagctgcagctcttgtctcctagcagcagcattgtcccagcatttaacacggggaccatcacacaagtcattaaagttctgaaccctcagaagcaacagctgcgaatgcggatcaagcttacatataatcacaagggctcagcaatgcaagatctagcagaggtgaacaactttccccctcagtcctggcaatgagggtttggcaccattctcattctttatcccactcaatcaaaggaactctgggaaggaggttgtgattgctggcaagtcccccccaactgtaccacgggcatgaggagctgaagagaactgctgaggaggattttcctaaagttactgctgaccttgaagcattgttaaagactaatgtcctctcctccactgttgaggctggctgcttctggaggctactttgcactcttcctcttctcctttttccgcacttctccacccctcccacatttacagccagaatcaacattccctgggcccctgaggaaataagcagctggtctggaggagaggactgcaatccatggcgaaaaaacactcactttgtctctgcagcaaagagttgccccttctttctactgttgtttctctgtggactgggcaaggtggggtatttattcctcactagctgggttaccatcttcaggcacttttaacatctggcattcggaatggaaatgtaataatggacattagggagccctgcctttttctactggttcccccaatgtttgaaagaggcattaggctcctggtagccttttctgtgcattgctgtatacacacagacacacacatgtatgtttgttaccaagaactggtcagaccttgcgagtttatttgtaaacactggacagatggagttaaaaagagcttttgttgagatttggcatgaaggatatggtgctctatttgtaatagaaacttccaaggctcttccagctcccctttctcgccattctttagctgtagtcatgaatagtctccatgattttcaaaattgattccctttaaagtgcaaaatggtcaccttctaaaagatatattcatagttattaatgaccctattcccaccacaaattttaaagtgctcctaagcccataacttgcctgtttgaactatggtaatgggtggaagaggagttcaccagtttcaaagatcagactctgtatcaaaagtacctttgcccttaggaagagtgagtattggagtcatcttatctattactccaaacctccctttttatttcttgagcctggcttggaccttggcattccgtttgaattccttctaactggaacatttgtgttgtatctgtaacactggcactgaaataaagaccacacggttaaag

SEQ ID NO: 1055 - DNA, 1166 bp, Homo sapiens
  source 1..1166: mol_type = unassigned DNA
atgttcggttcctgctgccactgctgccgccgcccccggagctgctggtttcattcgaggtttcgggccgaggatgccagcccccatcagattgcgggagctgatccggaccatccggacagcccgaacccaagctgaagaacgagaaatgatccagaaagaatgtgctgcaatccggtcatcttttagagaagaagacaatacataccgatgtcggaatgtggcaaaattactgtatatgcacatgctgggctaccctgctcactttggacagttggagtgcctcaagcttattgcctctcaaaaatttacagacaaacgcattggctatttaggggcaatgctgctgttagatgaaagacaagatgtccatcttctcatgaccaactgtatcaagaatgatcttaatcatagcacgcaattcgtacaggggttagcactttgtaccctcggctgcatgggctcctcagagatgtgcagagatcttgcaggagaggtagagaagctcctgaaaacctccaactcttacttaagaaaaaaggaaatgatttataaacaaacaaatgttactggatatatcctaggtggcataccaaattcctaagttatctgattctaaacagtattacagcaaggcagcactgtgtgctgttcatgtcatcaggaaagttcctgaacttatggagatgtttttaccagcaacaaaaaatttattgaatgagaagaaccatggtgtcctccacacatctgtagtcctcctcacagaaatgtgtgagcgaagcccagacatgcttgcgcatttcagaaagcttgtgccccaattagttcgtattttaaagaacctcatcatgtccggatattcaccagaacatgatgtttctggtatcagtgacccctttttgcaggtacgaattttgcggttattaagaattttaggacgaaatgatgatgattcaagtgaagctatgaatgatatattagcacaggttgccactaatactgagactagtaaaaatgtaggaaatgctattctttatgaaacggttttgactatcatggatattaagtcagagagtggattgcgagtcctagccataaatatcctgggtcgtttcttattgaacaatgacaagaatattagatatgtggctctgacatctttgttg

SEQ ID NO: 1056 - DNA, 1774 bp, Homo sapiens
  source 1..1774: mol_type = unassigned DNA
gttcggttcctgctgccactgctgccgccgcccccggagctgctggtttcattcgaggtttcgggccgaggatgccagcccccatcagattgcgggagctgatccggaccatccggacagcccgaacccaagctgaagaacgagaaatgatccagaaagaatgtgctgcaatccggtcatcttttagagaagaagacaatacataccgatgtcggaatgtggcaaaattactgtatatgcacatgctgggctaccctgctcactttggacagttggagtgcctcaagcttattgcctctcaaaaatttacagacaaacgcattggctatttaggggcaatgctgctgttagatgaaagacaagatgtgcagagatcttgcaggagaggtagagaagctcctgaaaacctccaactcttacttaagaaaaaaggcagcactgtgtgctgttcatgtcatcaggaaagttcctgaacttatggagatgtttttaccagcaacaaaaaatttattgaatgagaagaaccatggtgtcctccacacatctgtagtcctcctcacagaaatgtgtgagcgaagcccagacatgcttgcgcatttcagaaagcttgtgccccaattagttcgtattttaaagaacctcatcatgtccggatattcaccagaacatgatgtttctggtatcagtgacccctttttgcaggtacgaattttgcggttattaagaattttaggacgaaatgatgatgattcaagtgaagctatgaatgatatattagcacaggttgccactaatactgagactagtaaaaatgtaggaaatgctattctttatgaaacggttttgactatcatggatattaagtcagagagtggattgcgagtcctagccataaatatcctgggtcgtttcttattgaacaatgacaagaatattagatatgtggctctgacatctttgttgaagactgtacagacagatcataatgcagtacagaggcacagaagcacaattgtggactgtcttaaagatttggatgtctcaataaaacggcgtgcaatggaattgagttttgccctggtaaatgggaataatatccgaggcatgatgaaagaattactttattttctggattcgtgtgagccagaatttaaagcagactgtgcatctggaatctttcttgctgcagtaccaaagacattccagctgcagctcttgtctcctagcagcagcattgtcccagcatttaacacggggaccatcacacaagtcattaaagttctgaaccctcagaagcaacagctgcgaatgcggatcaagcttacatataatcacaagggctcagcaatgcaagatctagcagaggtgaacaactttccccctcagtcctggcaatgagggtttggcaccattctcattctttatcccactcaatcaaaggaactctgggaaggaggttgtgattgctggcaagtcccccccaactgtaccacgggcatgaggagctgaagagaactgctgaggaggattttcctaaagttactgctgaccttgaagcattgttaaagactaatgtcctctcctccactgttgaggctggctgcttctggaggctactttgcactcttcctcttctcctttttccgcacttctccacccctcccacatttacagccagaatcaacattccctgggcccctgaggaaataagcagctggtctggaggagaggactgcaatccatggcgaaaaaacactcactttgtctctgcagc

SEQ ID NO: 1057 - DNA, 2355 bp, Homo sapiens
  source 1..2355: mol_type = unassigned DNA
attcctgacagcacctcccggaccggacataacggtccccgcgcggctccccgaaccggaagtggaggtgagctgtcgcgggcggcgcccggccttgctcaacgcccagcagtccccaccgtcgctgccgccgccaccgccctcggccgctgccgaggcctcctgcagccatcatgtccgccagcgccgtctacgtgctggacctgaagggcaaggtgctcatctgccggaactaccgtggcgacgtggacatgtcagaggtggagcacttcatgcccatcctgatggagaaggaggaggaggggatgctgtcgcccatcctggcccacgggggggtccgtttcatgtggatcaaacacaacaacctgtatctggttgccacatccaagaagaacgcgtgcgtgtcgctggtcttttctttcctctataaggtggtgcaggtgttttccgagtacttcaaggagctggaggaggagagcatccgggacaactttgttatcatctacgagctgctggacgagctcatggacttcggctacccccagaccaccgacagcaagatcctgcaggagtacatcactcaggaaggccacaagctggaaacaggggccccgcggccaccagccaccgtcaccaacgcggtgtcctggcggtccgaaggcatcaagtatcggaagaatgaggtgttcttggacgtcatcgagtctgtcaacctcttggtcagcgccaacggcaatgtcctgcgcagcgagatcgtgggctccatcaagatgcgagtcttcctctcgggcatgcccgagctgcgcctgggcctcaacgacaaggtcctctttgacaacacgggccgcggcaaaagcaaatccgtggagctggaggatgtgaagttccaccagtgtgtgcggctatcacgcttcgagaatgaccgcaccatctccttcatcccacccgacggcgagttcgagctcatgtcctaccgtctcaacacccacgtcaagcctttgatatggatcgagtcggtgatcgagaagcactcccacagccgcatcgagtacatgatcaaggccaaaagccagttcaagcggcggtcaacagccaacaacgtggagatccacattcccgtgcccaatgatgccgactcacccaagttcaagacgacggtggggagcgttaagtgggtccccgagaacagcgagatcgtgtggtccatcaagtccttcccgggcggcaaggagtacctgatgcgggcccacttcggcctgcctagtgtggaggccgaagacaaggagggcaagcccccgatcagtgtcaagttcgagatcccttacttcactacctccggcatccaggtgcgctacctgaagatcattgagaagagtgggtaccaggccctgccctgggtgcgttatatcacgcagaatggagattaccagctccggacccagtgaggggctgtcgcagccaacaccccggcctcggggctcctggtggcagcaccaggggacacacctgccaaacccaccagatggaggggccctccctggtctctggccaccctcccagcctctgcccagggacccctgccttccccaggccatctgctctgccgtcgacactcgtctcagaagcccctttcccagaagaggctggtcttcaagaagtctcgtttctttgcccctgaagtcagtttcaggggaaggatgtgaaatttttccgtgtagaggttacagccttttatgctgttgagctcccaggtaccaaaaagcttggccaacgcttgccagccagccagctgcaggtggcatctgccacgaaggaagcgccagcctcgccaggccagcaggggcgtcgttttgttgccattttgttgaacgttatgggtttatgggtgttcctggaacttgtctttgtgcattcgttgctgtttgtgttaccctcactgtccccatgtcccacccacgtcctacggcactcaggaagcacttggtgaggacgagccctcacccttcttgtcttccttcccggcagcgcccgcagcgggccatttacacgtcgaggctggcacctggcgcgctcgggggccactgtagcgtctgcctgctccctggactcgcaggcctcgcctgtggcgccttcccagggccagcctgggtcacgagatgctgtcactcagccagatcagtattgacccaccaggggaggtggggtttggtgagagacgccagcctcagactttttcccactgagggtccagagagcggggccacgtgtcacccacgtctgcgcttggtcacccgtcctccccaccctgtgtgtgtttatgtcatagttacattaaattccattcattgaatactc

SEQ ID NO: 1058 - DNA, 1578 bp, Homo sapiens
  source 1..1578: mol_type = unassigned DNA
ggaagtggaggtgagctgtcgcgggcggcgcccggccttgctcaacgcccagcagtccccaccgtcgctgccgccgccaccgccctcggccgctgccgaggcctcctgcagccatcatgtccgccagcgccgtctacgtgctggacctgaagggcaaggtgctcatctgccggaactaccgtggcgacgtggacatgtcagaggtggagcacttcatgcccatcctgatggagaaggaggaggaggggatgctgtcgcccatcctggcccacgggggggtccgtttcatgtggatcaaacacaacaacctgtatctggttgccacatccaagaagaacgcgtgcgtgtcgctggtcttttctttcctctataaggtggtgcaggtgttttccgagtacttcaaggagctggaggaggagagcatccgggacaactttgttatcatctacgagctgctggacgagctcatggacttcggctacccccagaccaccgacagcaagatcctgcaggagtacatcactcaggaaggccacaagctggaaacaggggccccgcggccaccagccaccgtcaccaacgcggtgtcctggcggtccgaaggcatcaagtatcggaagaatgaggtgttcttggacgtcatcgagtctgtcaacctcttggtcagcgccaacggcaatgtcctgcgcagcgagatcgtgggctccatcaagatgcgagtcttcctctcgggcatgcccgagctgcgcctgggcctcaacgacaaggtcctctttgacaacacgggccgcggcaaaagcaaatccgtggagctggaggatgtgaagttccaccagtgtgtgcggctatcacgcttcgagaatgaccgcaccatctccttcatcccacccgacggcgagttcgagctcatgtcctaccgtctcaacacccacgtcaagcctttgatatggatcgagtcggtgatcgagaagcactcccacagccgcatcgagtacatgatcaagggcggcaaggagtacctgatgcgggcccacttcggcctgcctagtgtggaggccgaagacaaggagggcaagcccccgatcagtgtcaagttcgagatcccttacttcactacctccggcatccaggtgcgctacctgaagatcattgagaagagtgggtaccaggccctgccctgggtgcgttatatcacgcagaatggagattaccagctccggacccagtgaggggctgtcgcagccaacaccccggcctcggggctcctggtggcagcaccaggggacacacctgccaaacccaccagatggaggggccctccctggtctctggccaccctcccagcctctgcccagggacccctgccttccccaggccatctgctctgccgtcgacactcgtctcagaagcccctttcccagaagaggctggtcttcaagaagtctcgtttctttgcccctgaagtcagtttcaggggaaggatgtgaaatttttccgtgtagaggttacagccttttatgctgttgagctcccaggtaccaaaaagcttggccaacgcttgccagccagccagctgca

SEQ ID NO: 1059 - DNA, 2391 bp, Homo sapiens
  source 1..2391: mol_type = unassigned DNA
attcctgacagcacctcccggaccggacataacggtccccgcgcggctccccgaaccggaagtggaggtgagctgtcgcgggcggcgcccggccttgctcaacgcccagcagtccccaccgtcgctgccgccgccaccgccctcggccgctgccgaggcctcctgcagccatcatgtccgccagcgccgtctacgtgctggacctgaagggcaaggtgctcatctgccggaactaccgtggcgacgtggacatgtcagaggtggagcacttcatgcccatcctgatggagaaggaggaggaggggatgctgtcgcccatcctggcccacgggggggtccgtttcatgtggatcaaacacaacaacctgtatctggttgccacatccaagaagaacgcgtgcgtgtcgctggtcttttctttcctctataaggtggtgcaggtgttttccgagtacttcaaggagctggaggaggagagcatccgggacaactttgttatcatctacgagctgctggacgagctcatggacttcggctacccccagaccaccgacagcaagatcctgcaggagtacatcactcaggaaggccacaagctggaaacaggggccccgcggccaccagccaccgtcaccaacgcggtgtcctggcggtccgaaggcatcaagtatcggaagaatgaggtgttcttggacgtcatcgagtctgtcaacctcttgggtaaatacccaggagtgggatggctgggtcacacggtcagcgccaacggcaatgtcctgcgcagcgagatcgtgggctccatcaagatgcgagtcttcctctcgggcatgcccgagctgcgcctgggcctcaacgacaaggtcctctttgacaacacgggccgcggcaaaagcaaatccgtggagctggaggatgtgaagttccaccagtgtgtgcggctatcacgcttcgagaatgaccgcaccatctccttcatcccacccgacggcgagttcgagctcatgtcctaccgtctcaacacccacgtcaagcctttgatatggatcgagtcggtgatcgagaagcactcccacagccgcatcgagtacatgatcaaggccaaaagccagttcaagcggcggtcaacagccaacaacgtggagatccacattcccgtgcccaatgatgccgactcacccaagttcaagacgacggtggggagcgttaagtgggtccccgagaacagcgagatcgtgtggtccatcaagtccttcccgggcggcaaggagtacctgatgcgggcccacttcggcctgcctagtgtggaggccgaagacaaggagggcaagcccccgatcagtgtcaagttcgagatcccttacttcactacctccggcatccaggtgcgctacctgaagatcattgagaagagtgggtaccaggccctgccctgggtgcgttatatcacgcagaatggagattaccagctccggacccagtgaggggctgtcgcagccaacaccccggcctcggggctcctggtggcagcaccaggggacacacctgccaaacccaccagatggaggggccctccctggtctctggccaccctcccagcctctgcccagggacccctgccttccccaggccatctgctctgccgtcgacactcgtctcagaagcccctttcccagaagaggctggtcttcaagaagtctcgtttctttgcccctgaagtcagtttcaggggaaggatgtgaaatttttccgtgtagaggttacagccttttatgctgttgagctcccaggtaccaaaaagcttggccaacgcttgccagccagccagctgcaggtggcatctgccacgaaggaagcgccagcctcgccaggccagcaggggcgtcgttttgttgccattttgttgaacgttatgggtttatgggtgttcctggaacttgtctttgtgcattcgttgctgtttgtgttaccctcactgtccccatgtcccacccacgtcctacggcactcaggaagcacttggtgaggacgagccctcacccttcttgtcttccttcccggcagcgcccgcagcgggccatttacacgtcgaggctggcacctggcgcgctcgggggccactgtagcgtctgcctgctccctggactcgcaggcctcgcctgtggcgccttcccagggccagcctgggtcacgagatgctgtcactcagccagatcagtattgacccaccaggggaggtggggtttggtgagagacgccagcctcagactttttcccactgagggtccagagagcggggccacgtgtcacccacgtctgcgcttggtcacccgtcctccccaccctgtgtgtgtttatgtcatagttacattaaattccattcattgaatactc

SEQ ID NO: 1060 - DNA, 1705 bp, Homo sapiens
  source 1..1705: mol_type = unassigned DNA
attcctgacagcacctcccggaccggacataacggtccccgcgcggctccccgaaccggaagtggaggtgagctgtcgcgggcggcgcccggccttgctcaacgcccagcagtccccaccgtcgctgccgccgccaccgccctcggccgctgccgaggcctcctgcagccatcatgtccgccagcgccgtctacgtgctggacctgaagggcaaggtggtgcaggtgttttccgagtacttcaaggagctggaggaggagagcatccgggacaactttgttatcatctacgagctgctggacgagctcatggacttcggctacccccagaccaccgacagcaagatcctgcaggagtacatcactcaggaaggccacaagctggaaacaggggccccgcggccaccagccaccgtcaccaacgcggtgtcctggcggtccgaaggcatcaagtatcggaagaatgaggtgttcttggacgtcatcgagtctgtcaacctcttggtcagcgccaacggcaatgtcctgcgcagcgagatcgtgggctccatcaagatgcgagtcttcctctcgggcatgcccgagctgcgcctgggcctcaacgacaaggtcctctttgacaacacgggccgcggcaaaagcaaatccgtggagctggaggatgtgaagttccaccagtgtgtgcggctatcacgcttcgagaatgaccgcaccatctccttcatcccacccgacggcgagttcgagctcatgtcctaccgtctcaacacccacgtcaagcctttgatatggatcgagtcggtgatcgagaagcactcccacagccgcatcgagtacatgatcaaggccaaaagccagttcaagcggcggtcaacagccaacaacgtggagatccacattcccgtgcccaatgatgccgactcacccaagttcaagacgacggtggggagcgttaagtgggtccccgagaacagcgagatcgtgtggtccatcaagtccttcccgggcggcaaggagtacctgatgcgggcccacttcggcctgcctagtgtggaggccgaagacaaggagggcaagcccccgatcagtgtcaagttcgagatcccttacttcactacctccggcatccaggtgcgctacctgaagatcattgagaagagtgggtaccaggccctgccctgggtgcgttatatcacgcagaatggagattaccagctccggacccagtgaggggctgtcgcagccaacaccccggcctcggggctcctggtggcagcaccaggggacacacctgccaaacccaccagatggaggggccctccctggtctctggccaccctcccagcctctgcccagggacccctgccttccccaggccatctgctctgccgtcgacactcgtctcagaagcccctttcccagaagaggctggtcttcaagaagtctcgtttctttgcccctgaagtcagtttcaggggaaggatgtgaaatttttccgtgtagaggttacagccttttatgctgttgagctcccaggtaccaaaaagcttggccaacgcttgccagccagccagctgcaggtggcatctgccacgaaggaagcgccagcctcgccaggccagcaggggcgtcgttttgttgccattttgttgaacgttatgggtttatgggtgttcctggaacttgtctttgtgcattcgttgctg

SEQ ID NO: 1061 - DNA, 1751 bp, Homo sapiens
  source 1..1751: mol_type = unassigned DNA
aggcgcttccgcaggaagaaggaagcggcgccgccatcgcctcccggcgctccctccccgactcctaagtccttcggccgccaccatgtccgcctcggctgtcttcattctggacgttaagggcaagccattgatcagccgcaactacaagggcgatgtggccatgagcaagattgagcacttcatgcctttgctggtacagcgggaggaggaaggcgccctggccccgctgctgagccacggccaggtccacttcctatggatcaaacacagcaacctctacttggtggccaccacatcgaagaatgccaatgcctccctggtgtactccttcctgtataagacaatagaggtattctgcgaatacttcaaggagctggaggaggagagcatccgggacaactttgtcatcgtctacgagttgctggacgagctcatggactttggcttcccgcagaccaccgacagcaagatcctgcaggagtacatcactcagcagagcaacaagctggagacgggcaagtcacgggtgccacccactgtcaccaacgctgtgtcctggcgctccgagggtatcaagtataagaagaacgaggtcttcattgatgtcatagagtctgtcaacctgctggtcaatgccaacggcagcgtccttctgagcgaaatcgtcggtaccatcaagctcaaggtgtttctgtcaggaatgccagagctgcggctgggcctcaatgaccgcgtgctcttcgagctcactggccgcagcaagaacaaatcagtagagctggaggatgtaaaattccaccagtgcgtgcggctctctcgctttgacaacgaccgcaccatctccttcatcccgcctgatggtgactttgagctcatgtcataccgcctcagcacccaggtcaagccactgatctggattgagtctgtcattgagaagttctcccacagccgcgtggagatcatggtcaaggccaaggggcagtttaagaaacagtcagtggccaacggtgtggagatatctgtgcctgtacccagcgatgccgactcccccagattcaagaccagtgtgggcagcgccaagtatgtgccggagagaaacgtcgtgatttggagtattaagtctttcccggggggcaaggagtacttgatgcgagcccactttggcctccccagtgtggaaaaggaagaggtggagggccggccccccatcggggtcaagtttgagatcccctacttcaccgtctctgggatccaggtccgatacatgaagatcattgagaaaagtggttaccaggccctgccctgggttcgctacatcacccagagtggcgattaccaacttcgtaccagctagaagggagaagagatgggggcttgaacacggggcttccttacagccccggatgcagattttagagggagggcaggtgcgggctgtgtgtgtctgtgtgagggcaggtcctggacttggcagtttcttgctcccagcacccgccccttcctcacctcttccttattccataggctgggagagaaactctctctgcttccctcgcccttggagctttccccatccccctgattttatatgaagaaatagaagaggggcttgaagtcctcctcgcgagtgccttcttgcaattacctgccttagcgggtgttgcgggtccctccttcacagccgctgagcccagaggtcccgctggcccctcctctgaattttaggatgtcattaaaaagatgaatct

SEQ ID NO: 1062 - DNA, 1306 bp, Homo sapiens
  source 1..1306: mol_type = unassigned DNA
ggcgggacggggcggggcttcgggcgagagggagggcagcaggagaaaggataagaaagggagtgggactggcgcctacggtggccgaagtgggacgcgccgagccggaggctgcaggatgatgcggttcatgctattattcagccggcagggaaaactgcggctgcaaaaatggtacctggccacttcggacaaggaacggaagaagatggtgcgcgagctcatgcaggttgtcctggctcgaaagcccaagatgtgcagcttcctggagtggagggacctcaaagttgtctataagagatatgccagcctctacttctgctgcgccatcgagggccaagacaatgagctcatcacactggagctgatccaccgatacgtggagctcttagacaaatactttggcagtgtgtgcgagctggacatcatcttcaactttgagaaggcctacttcatcctggatgagtttttgatggggggggatgtccaggacacctccaagaagagtgtgctgaaagccatcgagcaggctgacctactgcaagaggaggatgagtcgccacggagtgtgctggaggagatgggtttggcatagcccctgctgggccggggtgtggcgatggggtcctggcagcgtggcgggaacggctgcttctcctctgcccagggccctgttcttggtgggactcggctgcccctcctctgctgcctcacctttcggagtgagctgtgggctcaggcccttcaaacattccctccctccaccccctacctccactttccccttttcccactgaaggttttagaagctaggaggcaggaaaatgtgacccagatgggggtgctatttggcttttattccctgcctttgcagaactgatgtcaccccagatgtccttccctccctaataactgtaaatatataaatatgtcaggttaaagggaaaaggtgttcagggcacttcttgtcctctctgtcccataacctacctccaccctccccctagccagccaggcagcttctctgcctgggaggggagcctggacccccctctttctccttggctgcagtggggcctttatccagtgccagggaggaacaacatagttaatttttttctaaccttgccactttgagggaaggaagggttgggggaagggcaagctttatgggaccctggtcctggccctggcctttcactccagttctgggtgaggcaggagctgggaggggtggggagggggagggggaagtgtctgcctttatgtcctttcttctgaaataaaagtaaaagcatttctggac

SEQ ID NO: 1063 - DNA, 741 bp, Homo sapiens
  source 1..741: mol_type = unassigned DNA
gaagtgggacgcgccgagccggaggctgcaggatgatgcggttcatgctattattcagccggcagggaaaactgcggctgcaaaaatggtacctggccacttcggacaaggaacggaagaagatggtgcgcgagctcatgcaggttgtcctggctcgaaagcccaagatgtgcagcttcctggagtggagggacctcaaagttgtctataagagatatgccagcctctacttctgctgcgccatcgagggccaagacaatgagctcatcacactggagctgatccaccgatacgtggagctcttagacaaatactttggcagtgtgtgcgagctggacatcatcttcaactttgagaaggcctacttcatcctggatgagtttttgatggggggggatgtccaggacacctccaagaagagtgtgctgaaagccatcgagcaggctgacctactgcaagaggaggatgagtcgccacggagtgtgctggaggagatgggtttggcatagcccctgctgggccggggtgtggcgatggggtcctggcagcgtggcgggaacggctgcttctcctctgcccagggccctgttcttggtgggactcggctgcccctcctctgctgcctcacctttcggaatttcatttcctgtattttatctggccaccctaccttaaacggatttttatgcccaatgcgtctccaaacgggctgcccccaactccctgagctgcctttatgga

SEQ ID NO: 1064 - DNA, 2237 bp, Homo sapiens
  source 1..2237: mol_type = unassigned DNA
gcttcccgcgcgtcgcctagcccgcccctcagctcgccgcagccccggctcctccctcgtccggcccccggggcggggtctgtcagcttgccctcccctctccgcctaagcctgccctatgccagccgggtgtcctccccacagcaccacggcttctcttcctcagcacggcgacaggggcttccccttcgccgccgccgccgccgccggccaagctccgccgcgcccgcggcccgcggccgccatgcagtttatgttgctttttagtcgtcagggaaagcttcgactgcaaaaatggtatgtcccactatcagacaaagagaagaaaaagatcacaagagaacttgttcagaccgttttagcacggaaacctaaaatgtgcagcttccttgagtggcgagatctgaagattgtttacaaaagatatgctagtctgtatttttgctgtgctattgaggatcaggacaatgaactaattaccctggaaataattcatcgttatgtggaattacttgacaagtatttcggcagtgtctgtgaactagatatcatctttaattttgagaaggcttattttattttggatgagtttcttttgggaggggaagttcaggaaacatccaagaaaaatgtccttaaagcaattgagcaggctgatctactgcaggaggaagctgaaaccccacgtagtgttcttgaagaaattggactgacataactctcctcccttgttgatgacttcttgtggcatttcacacactgtagatggtcactcccttcatgtccatgttagctcatggtgtaagatgatgtcttgtcagtattactgttttgctaagccgcttcattcatgcctacacaatttttttttaaaagggaactttagttaattaagtgataagggacttaaatatgaattagaatggtgcagaaagagataccttttctggatattttaaagtttaaaggtcagtttctcttaatctgattatgtgcacatatgaaaatggcacatcatatacatgtaaaatcaggcagtatacatttattaattactgtatttgacaaaggaaactcttaaattataatgtgaaacctggttttatgaaaccaaagactagtgcagcatttcagcatatgtaaaaaaaaaaaaaaagggaattgacatgtcacatatcaaatgaatggaaactttgttgaaactttaaaaagcaaatttactccaaagacttgtattggaaattacataccttttttttttttttttaaaggactacagattatttttaatgactaaattggagtgatacttcttacactaaaaattatttcttaggcattctgaatctgggatgagaaacaggattgtttcacaatagtaagcacataatttttaaggccaaggcacatttgactcctgagatgaattttttgtggtcataatcaaatacttagttgtttttgatgccccaaaataaagtgagaatggtaatttgccaggaattcttcataacagtatcttacaaaaaacgtgttgctctcttcacagtattatgtgtaaagtcattgtttaaagcacgaatgttccctctggggtacttgttaaagctaaatttattttgcttccctccacttagaagtgctgcacactttacagcagcttcctttctttccatggcactgcctagttaacagaagtcttataaaaatttaaaaagacacatttcttacaaaaaagagttgaatgaggtaaaatggcattagatggctctatattttttaaagctatgtaattgttcagcgtcacttttctaagtacttatacatatctaaacatgtcttcatggtttatattttcacttatatatgctgggctggattaagctttgttgtgattgtgaccaacattcaggccacgtgagcactgtcttatcacatcgccaattagttgtaataaacgttcaacgtacaaacactggagtgtgtttttatctctttccaaaagtttgtcaaactatgcagagctgctgaaggaagaatttctcatttttttttcagtaaaatgttgaaaattcccctccatttgaatatggtggttgttataagcacacacaagatacatggtggaagatctaaggagtcttcatgtacttcattaaaaaataacatggattccatactgagagcctatctacacatttattttcaatcaataaatgctgcttttaaaaccttga

SEQ ID NO: 1065 - DNA, 600 bp, Homo sapiens
  source 1..600: mol_type = unassigned DNA
cctatgccagccgggtgtcctccccacagcaccacggcttctcttcctcagcacggcgacaggggcttccccttcgccgccgccgccgccgccggccaagctccgccgcgcccgcggcccgcggccgccatgcagtttatgttgctttttagtcgtcagggaaagcttcgactgcaaaaatggtatgtcccactatcagacaaagagaagaaaaagatcacaagagaacttgttcagaccgttttagcacggaaacctaaaatgtgcagcttccttgagtggcgagatctgaagattgtttacaaaagatatgctagtctgtatttttgctgtgctattgaggatcaggacaatgaactaattaccctggaaataattcatcgttatgtggaattacttgacaagtatttcggcagtgtctgtgaactagatatcatctttaattttgagaaggcttattttattttggatgagtttcttttgggaggggaagttcaggaaacatccaagaaaaatgtccttaaagcaattgagcaggctgatctactgcaggagagccagaatgaagaatggggaggtttgtctgaggatatcttatga

SEQ ID NO: 1066 - DNA, 3492 bp, Homo sapiens
  source 1..3492: mol_type = unassigned DNA
gggtgtcctccccacagcaccacggcttctcttcctcagcacggcgacaggggcttccccttcgccgccgccgccgccgccggccaagctccgccgcgcccgcggcccgcggccgccatgcagtttatgttgctttttagtcgtcagggaaagcttcgactgcaaaaatggtatgtcccactatcagacaaagagaagaaaaagatcacaagagaacttgttcagaccgttttagcacggaaacctaaaatgtgcagcttccttgagtggcgagatctgaagattgtttacaaaagatatgctagtctgtatttttgctgtgctattgaggatcaggacaatgaactaattaccctggaaataattcatcgttatgtggaattacttgacaagtatttcggcagtgtctgtgaactagatatcatctttaattttgagaaggcttattttattttggatgagtttcttttgggaggggaagttcaggaaacatccaagaaaaatgtccttaaagcaattgagcaggctgatctactgcaggagaaaacagagactatgtatcacagcaagagtttcattgggtttaagaaagcgtactagaatacgtgctggagtactgacatgcatcaaaatgtagtaggatatataaattcagtttgtaatgacaattttgtcaagtttgttatttatattttagcattacctgaaaagtctaattacattaaatcccaagggatagtcccaattacttcattaaactggtattttcatagggaattttgcttggataatgatccattattggggcttataatttattttttacacagaatatggaaatagcttcagaggttcattgacaataaagcattcattaaatactgtgaatcactaatgccattgatacagaagaatttccctatgaaaatgagagcttctgtgagaaaatgaagtagttgggagtttaatttcttattaatatgattttaacttgctgcttcattccactatattctgagttgggggaaaagggcagctatctctttaaaatatttaggaattctttgaggattaaaatgtaactggcttttgtcctcagatacgtttgtaattaatggttgtgtaagtttagggatttgttagatatttttcttggaacagtttacatgattttgtagttcaacatttcaaagtttcaacttgaataaatattaaaatgaggatactttaaagacactcaaataagcaattttaaacttgctttctggtggggatataatccctttgagagtctgaaggatgatgggctgtcaccccaggaaaatttgcacatcattttgtttctaatttcagggaactctcagagcccctagaagtccttctgtagacactcaaatctggagagttcgttaaaatctgtcttgaggatttttaaaaaagtaatatcctcagtctcagtcaaattctttggattttttgcttttgtaggtataagtaaacggttaaaaaccttcattgctacttaaaataccagatgagtgactacttttccagtttttattgggaaagatttttctctaggttctttagtttatgtaatacaaatgaactaatgaatttaaatactggtggaaggggaatattctaattgaatttttggtcaactcagtattgaccagatgacttacactgaaaatcttttcataatattagtagtaaatatagtgttttaggattttgtaaaatttctggaggatgtctgtcatcattttgaacactgtatgtagtaaagttagaaaaaaatgaatctaaagtcttgggcattgtttagaagttaaatattcagccttaaaccaaagaatgaaagcaaacagaaacttaagttttagttatctttactgtgagctaaatgttctagaaatctgattgtgtctgtgtcagtttgtatactgtgtgtaagaatatatgcatttcttttgtagccacgtcatgaatattttaatgtccctgtgtactaaatgactactcatcgagtatgcagaatttcacagaggaaatagaatgctgatatacatatgaaagaaaatatcctcagcatggtgatttattgtcttgtataataatagtagaacattttagaactagtacttttatgattgtatttttttcctgttcacattccaaacttttctgttttattttcattctatatgtgatcttgatacagctcattcctttctgcaactgatttaatctcatcttgacaaaatatgacctagaagtgttttgagtaatattaaatcttaaacacatacatattattaatgaaccatctgtgatttatcttataagaggaaaacatgacaatcattaaaatgtttaccaaagaaaatatagctgaagtgctaggtcaaaataagcagtgccataatatatagtgtagtttggtcttcaaatatggaggttaaaaaaagaaactattttgtgtgattatcttacaatctgtatgagctaatgtgttctaatgtatcacataaaagtatatgtgaaaatattacaagaaactaaaattaatttgtaccattatataatatttaaggttaaaacattcagtattaagaaattttgtagtgccacatttattgaatcacatttgtgctatataataatatcaaacaatccctttaagaacttattagagagctatgtctgaagtctgttctgcaatatctgttgctgaataataactctttcaaagcattaatgctgagtttatatagttcaaaaattctaatattcattcagttttaatacctaaatacttatattttactagtgatggcattctaatatattaagtcctcatttaaatacttgatactttgttaactgtggcattatatttctgaattttaaaacctttaatattggtaactattgcatattcttttaataaaacatgcagcatatttttttataaaaggaaaagaattcattgtttatatctagagagcataaagcctaagttaagtaagttattaaacaataacttcacaagatgttcaaatcgatttatcactgaaagaagatctatgaaaatgtgttttgaccaaacttagtattaggcaggtacacagataagattttccattcttaacattctcactgtaatgcacgacatttgaagcacctggatgtgctatcaatcaggtgggaaatttagcattatatattggaagcattgagaaacattggtctttcatttctatttttttttcccctcctttcctcctcctgccccacaatatattattcatctggttttaatgctacataaatatgcattgtctcatgcctgtttgtgttggatgccttgtgctaagctgtaacaaaatgttgcttcttttgctgtctgtatacagctgcttgctttaaattagtagattctgaaatagctttccttgcatgtctaaaataaaagtattgcatgta

SEQ ID NO: 1067 - DNA, 1496 bp, Homo sapiens
  source 1..1496: mol_type = unassigned DNA
atgccagccgggtgtcctccccacagcaccacggcttctcttcctcagcacggcgacaggggcttccccttcgccgccgccgccgccgccggccaagctccgccgcgcccgcggcccgcggccgccatgcagtttatgttgctttttagtcgtcagggaaagcttcgactgcaaaaatggtatgtcccactatcagacaaagagaagaaaaagatcacaagagaacttgttcagaccgttttagcacggaaacctaaaatgtgcagcttccttgagtggcgagatctgaagattgtttacaaaagatatgctagtctgtatttttgctgtgctattgaggatcaggacaatgaactaattaccctggaaataattcatcgttatgtggaattacttgacaagtatttcggcagtgtctgtgaactagatatcatctttaattttgagaaggcttattttattttggatgagtttcttttgggaggggaagttcaggaaacatccaagaaaaatgtccttaaagcaattgagcaggctgatctactgcaggagaaaacagagactatgtatcacagcaagagtttcattgggtttaagaaagcgtactagaatacgtgctggagtactgacatgcatcaaaatgtagtaggatatataaattcagtttgtaatgacaattttgtcaagtttgttatttatattttagcattacctgaaaagtctaattacattaaatcccaagggatagtcccaattacttcattaaactggtattttcatagggaattttgcttggataatgatccattattggggcttataatttattttttacacagaatatggaaatagcttcagaggttcattgacaataaagcattcattaaatactgtgaatcactaatgccattgatacagaagaatttccctatgaaaatgagagcttctgtgagaaaatgaagtagttgggagtttaatttcttattaatatgattttaacttgctgcttcattccactatattctgagttgggggaaaagggcagctatctctttaaaatatttaggaattctttgaggattaaaatgtaactggcttttgtcctcagatacgtttgtaattaatggttgtgtaagtttagggatttgttagatatttttcttggaacagtttacatgattttgtagttcaacatttcaaagtttcaacttgaataaatattaaaatgaggatactttaaagacactcaaataagcaattttaaacttgctttctggtggggatataatccctttgagagtctgaaggatgatgggctgtcaccccaggaaaatttgcacatcattttgtttctaatttcagggaactctcagagcccctagaagtccttctgtagacactcaaatctggagagttcgttaaaatctgtcttgaggatttttaaaaaagtaatatcctcagtctcagtcaaattctttggattttttgcttttgta

SEQ ID NO: 1068 - DNA, 530 bp, Homo sapiens
  source 1..530: mol_type = unassigned DNA
gtcgtcagggaaagcttcgactgcaaaaatggtatgtcccactatcagacaaagagaagaaaaagatcacaagagaacttgttcagaccgttttagcacggaaacctaaaatgtgcagcttccttgagtggcgagatctgaagattgtttacaaaagatatgctagtctgtatttttgctgtgctattgaggatcaggacaatgaactaattaccctggaaataattcatcgttatgtggaattacttgacaagtatttcggcagtgtctgtgaactagatatcatctttaattttgagaaggcttattttattttggatgagtttcttttgggaggggaagttcaggaaacatccaagaaaaatgtccttaaagcaattgagcaggctgatctactgcaggagccacgtcatgaatattttaatgtccctgtgtactaaatgactactcatcgagtatgcagaatttcacagaggaaatagaatgctgatatacatatgaaagaaaatatcctcagcatggtgatttat

SEQ ID NO: 1069 - DNA, 991 bp, Homo sapiens
  source 1..991: mol_type = unassigned DNA
gttgctttttagtcgtcagggaaagcttcgactgcaaaaatggtatgtcccactatcagacaaagagaagaaaaagatcacaagagaacttgttcagaccgttttagcacggaaacctaaaatgtgcagcttccttgagtggcgagatctgaagattgtttacaaaagatatgctagtctgtatttttgctgtgctattgaggatcaggacaatgaactaattaccctggaaataattcatcgttatgtggaattacttgacaagtatttcggcagtgtctgtgaactagatatcatctttaattttgagaaggcttattttattttggatgagtttcttttgggaggggaagttcaggaaacatccaagaaaaatgtccttaaagcaattgagcaggctgatctactgcaggagagccagaatgaagaatggggaggtttgtctgaggatatcttatgataaagagcagtctaaggctttagtccctttgatccccaacttatttattggaagctgaaaccccacgtagtgttcttgaagaaattggactgacataactctcctcccttgttgatgacttcttgtggcatttcacacactgtagatggtcactcccttcatgtccatgttagctcatggtgtaagatgatgtcttgtcagtattactgttttgctaagccgcttcattcatgcctacacaatttttttttaaaagggaactttagttaattaagtgataagggacttaaatatgaattagaatggtgcagaaagagataccttttctggatattttaaagtttaaaggtcagtttctcttaatctgattatgtgcacatatgaaaatggcacatcatatacatgtaaaatcaggcagtatacatttattaattactgtatttgacaaaggaaactcttaaattataatgtgaaacctggttttatgaaaccaaagactagtgcagcatttcagcatatgtaaaaaaaaaa

SEQ ID NO: 1070 - DNA, 919 bp, Homo sapiens
  source 1..919: mol_type = unassigned DNA
atgccagccgggtgtcctccccacagcaccacggcttctcttcctcagcacggcgacaggggcttccccttcgccgccgccgccgccgccggccaagctccgccgcgcccgcggcccgcggccgccatgcagtttatgttgctttttagtcgtcagggaaagcttcgactgcaaaaatggtatgtcccactatcagacaaagagaagaaaaagatcacaagagaacttgttcagaccgttttagcacggaaacctaaaatgtgcagcttccttgagtggcgagatctgaagattgtttacaaaagatatgctagtctgtatttttgctgtgctattgaggatcaggacaatgaactaattaccctggaaataattcatcgttatgtggaattacttgacaagtatttcggcagtgtctgtgaactagatatcatctttaattttgagaaggcttattttattttggatgagtttcttttgggaggggaagttcaggaaacatccaagaaaaatgtccttaaagcaattgagcaggctgatctactgcaggagccacgtcatgaatattttaatgtccctgtgtactaaatgactactcatcgagtatgcagaatttcacagaggaaatagaatgctgatatacatatgaaagaaaatatcctcagcatggtgatttattgtcttgtataataatagtagaacattttagaactagtacttttatgattgtatttttttcctgttcacattccaaacttttctgttttattttcattctatatgtgatcttgatacagctcattcctttctgcaactgatttaatctcatcttgacaaaatatgacctagaagtgttttgagtaatattaaatcttaaacacatacatattattaatgaaccatctgtgatttatcttat

SEQ ID NO: 1071 - DNA, 315 bp, Homo sapiens
  source 1..315: mol_type = unassigned DNA
atgatccgctttatcctcatccagaaccgggcaggcaagacgcgcctggccaagtggtacatgcagtttgatgatgatgagaaacagaagctgatcgaggaggtgcatgccgtggtcaccgtccgagacgccaaacacaccaactttgtggaggtcttaaacgaatatttccacaatgtctgtgaactggacctggtgttcaacttctacaaggtttacacggtcgtggacgagatgttcctggctggcgaaatccgagagaccagccagacgaaggtgctgaaacagctgctgatgctacagtccctggagtga

SEQ ID NO: 1072 - DNA, 3433 bp, Homo sapiens
  source 1..3433: mol_type = unassigned DNA
cggctcagagctccggaccgcgggcggaggggaggggcagggggcggtgccacggcctgccagcccgcccgcccgcccgccagccagccctccccgcggccggctcggctccttggcgctgcctggggtcctttccgcccggtccccgcttgccagcccccgctgctctgtgccctgtccggccaggcctggagccgacaccaccgccatcatgccggccgtgtccaagggcgatgggatgcgggggctcgcggtgttcatctccgacatccggaactgtaagagcaaagaggcggaaattaagagaatcaacaaggaactggccaacatccgctccaagttcaaaggagacaaagccttggatggctacagtaagaaaaaatatgtgtgtaaactgcttttcatcttcctgcttggccatgacattgactttgggcacatggaggctgtgaatctgttgagttccaataaatacacagagaagcaaataggttacctgttcatttctgtgctggtgaactcgaactcggagctgatccgcctcatcaacaacgccatcaagaatgacctggccagccgcaaccccaccttcatgtgcctggccctgcactgcatcgccaacgtgggcagccgggagatgggcgaggcctttgccgctgacatcccccgcatcctggtggccggggacagcatggacagtgtcaagcagagtgcggccctgtgcctccttcgactgtacaaggcctcgcctgacctggtgcccatgggcgagtggacggcgcgtgtggtacacctgctcaatgaccagcacatgggtgtggtcacggccgccgtcagcctcatcacctgtctctgcaagaagaacccagatgacttcaagacgtgcgtctctctggctgtgtcgcgcctgagccggatcgtctcctctgcctccaccgacctccaggactacacctactacttcgtcccagcaccctggctctcggtgaagctcctgcggctgctgcagtgctacccgcctccagaggatgcggctgtgaaggggcggctggtggaatgtctggagactgtgctcaacaaggcccaggagccccccaaatccaagaaggtgcagcattccaacgccaagaacgccatcctcttcgagaccatcagcctcatcatccactatgacagtgagcccaacctcctggttcgggcctgcaaccagctgggccagttcctgcagcaccgggagaccaacctgcgctacctggccctggagagcatgtgcacgctggccagctccgagttctcccatgaagccgtcaagacgcacattgacaccgtcatcaatgccctcaagacggagcgggacgtcagcgtgcggcagcgggcggctgacctcctctacgccatgtgtgaccggagcaatgccaagcagatcgtgtcggagatgctgcggtacctggagacggcagactacgccatccgcgaggagatcgtcctgaaggtggccatcctggccgagaagtacgccgtggactacagctggtacgtggacaccatcctcaacctcatccgcattgcgggcgactacgtgagtgaggaggtgtggtaccgtgtgctacagatcgtcaccaaccgtgatgacgtccagggctatgccgccaagaccgtctttgaggcgctccaggcccctgcctgtcacgagaacatggtgaaggttggcggctacatccttggggagtttgggaacctgattgctggggacccccgctccagccccccagtgcagttctccctgctccactccaagttccatctgtgcagcgtggccacgcgggcgctgctgctgtccacctacatcaagttcatcaacctcttccccgagaccaaggccaccatccagggcgtcctgcgggccggctcccagctgcgcaatgctgacgtggagctgcagcagcgagccgtggagtacctcaccctcagctcagtggccagcaccgacgtcctggccacggtgctggaggagatgccgcccttccccgagcgcgagtcgtccatcctggccaagctgaaacgcaagaaggggccaggggccggcagcgccctggacgatggccggagggaccccagcagcaacgacatcaacgggggcatggagcccacccccagcactgtgtcgacgccctcgccctccgccgacctcctggggctgcgggcagcccctcccccggcagcacccccggcttctgcaggagcagggaaccttctggtggacgtcttcgatggcccggccgcccagcccagcctggggcccacccccgaggaggccttcctcagcccaggtcctgaggacatcggccctcccattccggaagccgatgagttgctgaataagtttgtgtgtaagaacaacggggtcctgttcgagaaccagctgctgcagatcggagtcaagtcagagttccgacagaacctgggccgcatgtatctcttctatggcaacaagacctcggtgcagttccagaatttctcacccactgtggttcacccgggagacctccagactcagctggctgtgcagaccaagcgcgtggcggcgcaggtggacggcggcgcgcaggtgcagcaggtgctcaatatcgagtgcctgcgggacttcctgacgcccccgctgctgtccgtgcgcttccggtacggtggcgccccccaggccctcaccctgaagctcccagtgaccatcaacaagttcttccagcccaccgagatggcggcccaggatttcttccagcgctggaagcagctgagcctccctcaacaggaggcgcagaaaatcttcaaagccaaccaccccatggacgcagaagttactaaggccaagcttctggggtttggctctgctctcctggacaatgtggaccccaaccctgagaacttcgtgggggcggggatcatccagactaaagccctgcaggtgggctgtctgcttcggctggagcccaatgcccaggcccagatgtaccggctgaccctgcgcaccagcaaggagcccgtctcccgtcacctgtgtgagctgctggcacagcagttctgagccctggactctgccccgggggatgtggccggcactgggcagccccttggactgaggcagttttggtggatgggggacctccactggtgacagagaagacaccagggtttgggggatgcctgggactttcctccggccttttgtatttttatttttgttcatctgctgctgtttacattctggggggttagggggagtccccctccctccctttcccccccaagcacagaggggagaggggccagggaagtggatgtctcctcccctcccaccccaccctgttgtagcccctcctaccccctccccatccaggggctgtgtattattgtgagcgaataaacagagagacgctaa

SEQ ID NO: 1073 - DNA, 3499 bp, Homo sapiens
  source 1..3499: mol_type = unassigned DNA
cggctcagagctccggaccgcgggcggaggggaggggcagggggcggtgccacggcctgccagcccgcccgcccgcccgccagccagccctccccgcggccggctcggctccttggcgctgcctggggtcctttccgcccggtccccgcttgccagcccccgctgctctgtgccctgtccggccaggcctggagccgacaccaccgccatcatgccggccgtgtccaagggcgatgggatgcgggggctcgcggtgttcatctccgacatccggaactgtaagagcaaagaggcggaaattaagagaatcaacaaggaactggccaacatccgctccaagttcaaaggagacaaagccttggatggctacagtaagaaaaaatatgtgtgtaaactgcttttcatcttcctgcttggccatgacattgactttgggcacatggaggctgtgaatctgttgagttccaataaatacacagagaagcaaataggttacctgttcatttctgtgctggtgaactcgaactcggagctgatccgcctcatcaacaacgccatcaagaatgacctggccagccgcaaccccaccttcatgtgcctggccctgcactgcatcgccaacgtgggcagccgggagatgggcgaggcctttgccgctgacatcccccgcatcctggtggccggggacagcatggacagtgtcaagcagagtgcggccctgtgcctccttcgactgtacaaggcctcgcctgacctggtgcccatgggcgagtggacggcgcgtgtggtacacctgctcaatgaccagcacatgggtgtggtcacggccgccgtcagcctcatcacctgtctctgcaagaagaacccagatgacttcaagacgtgcgtctctctggctgtgtcgcgcctgagccggatcgtctcctctgcctccaccgacctccaggactacacctactacttcgtcccagcaccctggctctcggtgaagctcctgcggctgctgcagtgctacccgcctccagaggatgcggctgtgaaggggcggctggtggaatgtctggagactgtgctcaacaaggcccaggagccccccaaatccaagaaggtgcagcattccaacgccaagaacgccatcctcttcgagaccatcagcctcatcatccactatgacagtgagcccaacctcctggttcgggcctgcaaccagctgggccagttcctgcagcaccgggagaccaacctgcgctacctggccctggagagcatgtgcacgctggccagctccgagttctcccatgaagccgtcaagacgcacattgacaccgtcatcaatgccctcaagacggagcgggacgtcagcgtgcggcagcgggcggctgacctcctctacgccatgtgtgaccggagcaatgccaagcagatcgtgtcggagatgctgcggtacctggagacggcagactacgccatccgcgaggagatcgtcctgaaggtggccatcctggccgagaagtacgccgtggactacagctggtacgtggacaccatcctcaacctcatccgcattgcgggcgactacgtgagtgaggaggtgtggtaccgtgtgctacagatcgtcaccaaccgtgatgacgtccagggctatgccgccaagaccgtctttgaggcgctccaggcccctgcctgtcacgagaacatggtgaaggttggcggctacatccttggggagtttgggaacctgattgctggggacccccgctccagccccccagtgcagttctccctgctccactccaagttccatctgtgcagcgtggccacgcgggcgctgctgctgtccacctacatcaagttcatcaacctcttccccgagaccaaggccaccatccagggcgtcctgcgggccggctcccagctgcgcaatgctgacgtggagctgcagcagcgagccgtggagtacctcaccctcagctcagtggccagcaccgacgtcctggccacggtgctggaggagatgccgcccttccccgagcgcgagtcgtccatcctggccaagctgaaacgcaagaaggggccaggggccggcagcgccctggacgatggccggagggaccccagcagcaacgacatcaacgggggcatggagcccacccccagcactgtgtcgacgccctcgccctccgccgacctcctggggctgcgggcagcccctcccccggcagcacccccggcttctgcaggagcagggaaccttctggtggacgtcttcgatggcccggccgcccagcccagcctggggcccacccccgaggaggccttcctcagcgagctggagccgcctgcccccgagagccccatggctttgctggctgacccagctccagctgctgacccaggtcctgaggacatcggccctcccattccggaagccgatgagttgctgaataagtttgtgtgtaagaacaacggggtcctgttcgagaaccagctgctgcagatcggagtcaagtcagagttccgacagaacctgggccgcatgtatctcttctatggcaacaagacctcggtgcagttccagaatttctcacccactgtggttcacccgggagacctccagactcagctggctgtgcagaccaagcgcgtggcggcgcaggtggacggcggcgcgcaggtgcagcaggtgctcaatatcgagtgcctgcgggacttcctgacgcccccgctgctgtccgtgcgcttccggtacggtggcgccccccaggccctcaccctgaagctcccagtgaccatcaacaagttcttccagcccaccgagatggcggcccaggatttcttccagcgctggaagcagctgagcctccctcaacaggaggcgcagaaaatcttcaaagccaaccaccccatggacgcagaagttactaaggccaagcttctggggtttggctctgctctcctggacaatgtggaccccaaccctgagaacttcgtgggggcggggatcatccagactaaagccctgcaggtgggctgtctgcttcggctggagcccaatgcccaggcccagatgtaccggctgaccctgcgcaccagcaaggagcccgtctcccgtcacctgtgtgagctgctggcacagcagttctgagccctggactctgccccgggggatgtggccggcactgggcagccccttggactgaggcagttttggtggatgggggacctccactggtgacagagaagacaccagggtttgggggatgcctgggactttcctccggccttttgtatttttatttttgttcatctgctgctgtttacattctggggggttagggggagtccccctccctccctttcccccccaagcacagaggggagaggggccagggaagtggatgtctcctcccctcccaccccaccctgttgtagcccctcctaccccctccccatccaggggctgtgtattattgtgagcgaataaacagagagacgctaa

SEQ ID NO: 1074 - DNA, 1980 bp, Homo sapiens
  source 1..1980: mol_type = unassigned DNA
tcaaacagtgagctgatccgcctgatcaacaacgccatcaagaatgacctggccagccgcaaccccaccttcatgggcctggccctgcactgcatcgccagcgtgggcagccgggagatggccgaggccttcgccggggagatccctaaggtcctcgtagccggagacactatggacagcgtgaagcagagcgcggccctgtgcttgctgcgcctgtacaggacgtcccccgatcttgtccccatgggcgactggacatcccgagtggtgcacctgctcaatgaccagcacttgggtgtggtaactgcagccacaagtctgatcaccactttagcacagaagaacccagaagagtttaaaacctccgtgtctctggctgtctctaggctaagcagaatcgtgacgtctgcatccacagatctccaggattacacttactattttgtcccggctccctggctgtctgtcaaactgctgagactgctgcagtgctacccacccccagaccctgcagtgcgaggccgcctgactgagtgcctggagaccatcctgaacaaagcccaagaaccgcccaagtcgaagaaggtccagcactccaacgcgaagaatgccgtgctcttcgaggccatcagcttaatcattcaccatgacagtgagccgaacctgctcgtccgtgcctgcaaccagttgggccagtttctgcagcaccgcgagaccaacctgcgctacctggccctggagagcatgtgcacgctggccagctctgagttctcccatgaggctgtcaagacgcacatcgagacggtcatcaacgccctgaagactgagcgggacgtgagcgtgctgccgcccaccccgcctcggagcctctgggagcagcagtgccactgtgcatggcgtgggctgagccttggtgtgtggccgtcctggtggctgcacacctggcgtcgtcctgggcccttgggaggagcacagctgaccctggttttgctgcagtcccagctggactgttttcccaggcaggattttaatctagaatttagaaacatttgtatttgtaatgacttctggcaaaagcacgtgtcctggccggatgtaactgttctcctttcccagctcctgtttgtgaagggcgtctgttatgctcctgcagtcgccgaggccttggatgtgcagccaggggaggagcgtcctgccggccccgcagggcccccaggactccagggtaaagtgtgggccggtggcgcaagactcagaggtgtgctcgtctctttcctgtcagagtgggcgtccccaggccacggtgcaggcctgagtccttccaccggccccgtccagtcgtccctggaggggctgtggaggagggacgcctctgtgtggtcaggaagtgaaggggccattggccgcatgccatgtgccacctgcggcttgtgtctcacctgtcatctggactcagcacccaggctgcacgtctgacacctgagaggcgagagagtggggccggcctaggagccaaggctggggccttgcgctctgtccccaggatggtggccttgtttgtcctaaacacacccagcacagggtctccacagctcccctgcagtgtgtgcaccccacaatgtctgcggctcttcttccggcgtgtcgggctttgatcacagcatagccacgtcagtggcgtgcgcctctcgcacaggccattctgggtctggtggtgccaggtgccgtgacacgccgtgctgggcttgtgctgcagctgggtggtgtggccctcattctcatgttccagctgctgggcagtgctctgcctgtgtgctgcgcctgcaggctgcgtgtgctgccgtggatctcctgcatcccttgacccctcccgccatcagaggaaaggctgctccccgaggcaccgcttccctgtgcggcgctgcagaggggccctcagtgtggcactcctcgtcaaagaaaaataaaggctagaactgc

SEQ ID NO: 1075 - DNA, 3256 bp, Homo sapiens
  source 1..3256: mol_type = unassigned DNA
ctgggaccctgaggcggccgtggttaggcggctccccggcggctcctccgcggcggtgacggcgaccgcactccccgcttcccgctccccgcgctcctccgcccgggtccgccagccgaggccgctcccgagcgtcggaagatgccggccgtgtccaagggggacgggatgcggggcctggcggtcttcatctcggatatccgcaactgtaaaagtaaagaagcagaaataaaaaggataaacaaggaactggcaaatatcagatcaaaatttaaaggtgacaaggctcttgatggctatagtaaaaaaaagtacgtctgcaagttgctcttcatctttctccttggtcatgacattgactttggacacatggaggctgtgaacctgctgagttcaaacagatacacggaaaagcagatcggctaccttttcatctctgtgttggtgaactcaaacagtgagctgatccgcctgatcaacaacgccatcaagaatgacctggccagccgcaaccccaccttcatgggcctggccctgcactgcatcgccagcgtgggcagccgggagatggccgaggccttcgccggggagatccctaaggtcctcgtagccggagacactatggacagcgtgaagcagagcgcggccctgtgcttgctgcgcctgtacaggacgtcccccgatcttgtccccatgggcgactggacatcccgagtggtgcacctgctcaatgaccagcacttgggtgtggtaactgcagccacaagtctgatcaccactttagcacagaagaacccagaagagtttaaaacctccgtgtctctggctgtctctaggctaagcagaatcgtgacgtctgcatccacagatctccaggattacacttactattttgtcccggctccctggctgtctgtcaaactgctgagactgctgcagtgctacccacccccagaagaccctgcagtgcgaggccgcctgactgagtgcctggagaccatcctgaacaaagcccaagaaccgcccaagtcgaagaaggtccagcactccaacgcgaagaatgccgtgctcttcgaggccatcagcttaatcattcaccatgacagtgagccgaacctgctcgtccgtgcctgcaaccagttgggccagtttctgcagcaccgcgagaccaacctgcgctacctggccctggagagcatgtgcacgctggccagctctgagttctcccatgaggctgtcaagacgcacatcgagacggtcatcaacgccctgaagactgagcgggacgtgagcgtgcggcagcgggccgtggacctcctctacgccatgtgcgaccgcagcaacgccccacagatcgtggccgagatgctgagctatctggagacagctgactactccatccgagaagagattgtgctgaaggtcgccatcctggctgagaagtacgcggtggactacacctggtatgtggataccatcttgaacttgatccgaattgctggtgattacgtgagtgaagaggtgtggtaccgagtcattcagatcgtcatcaaccgggacgacgtgcagggctacgcggccaagactgtgttcgaggctcttcaggctcccgcgtgccacgagaacctggtcaaagtgggcggctacatcctgggggagtttggaaacttgatagctggagacccgagatccagcccgctgatccagttccacctgctgcactccaagttccacctgtgcagcgtccccacccgcgcgctgctcctgtccacctacatcaagttcgtgaacctcttcccggaggtgaagcccaccatccaggacgtgctgcgcagcgacagccagctcaggaacgcagacgtggagctgcagcagcgtgctgtggagtacctgcggctcagcaccgtggccagcaccgacattctggcgaccgtgctggaggagatgcccccattcccggagcgggagtcctccatcttggcaaagctcaagaagaagaagggccccagcacggtgacagacctggaggacaccaagcgggacaggagtgtggacgtgaacgggggtcctgagcctgccccagccagtaccagcgccgtgtctacgccttctccgtcggcagacctgctgggtctcggggctgccccccctgcccccgcgggccccccaccctcctccggcggcagcgggctgctcgtggacgtgttctcagactcggcctctgtggtcgcgcctctcgctcctggctccgaagacaactttgccaggtttgtttgtaaaaacaatggtgtgttgtttgaaaaccagctgcttcaaattggacttaagtctgaatttcggcagaatttaggtcggatgtttatcttttatggtaataagacctccacgcagttcctaaactttaccccaacactaatctgttcagacgaccttcagcctaatctgaacctgcagaccaagcccgtggacccgaccgtggaggggggcgcgcaggtgcagcaggtggtcaacatagagtgcgtgtccgacttcacggaggcgccagtcctcaacattcagttcaggtatgggggcaccttccagaacgtgtctgtgcagctgcccatcactctcaacaaattcttccagccgacagaaatggcttctcaggatttctttcaacgttggaagcagttgagcaatccacagcaggaagtgcagaacatcttcaaagcaaagcacccaatggacacagaagtcaccaaagccaagatcattggatttggttctgcacttcttgaagaagttgatcctaatcctgcgaatttcgtgggagctggaatcatccacacgaaaaccacccagattggatgcctgctgcgcttggagccgaacctgcaagcccagatgtaccggctcacgctgcgcacaagtaaggaagccgtttctcagagattatgtgaattgctctcagcgcagttttagtcctgaggatggaagaccaggctcgtgtgtcttgtgttgtcttcgtctgtgccgtttgtcttcgtggccatcctgcagatgagcaccgtgtccagtgccacagcacaaggcgcctccccgccccgccgccccacacctctcccctttgggctggacgggaacacacgtgtgtggctcaggaggaaaagctcagcctggactgtggcagccacggcagaaggtggatcttgggatcaatttttataaaaatcgagacagttctgtggttaaatctacaaattaaagggaaatt

SEQ ID NO: 1076 - DNA, 1498 bp, Homo sapiens
  source 1..1498: mol_type = unassigned DNA
gctgggaccctgaggcggccgtggttaggcggctccccggcggctcctccgcggcggtgacggcgaccgcactccccgcttcccgctccccgcgctcctccgcccgggtccgccagccgaggccgctcccgagcgtcggaagatgccggccgtgtccaagggggacgggatgcggggcctggcggtcttcatctcggatatccgcaactgtaaaagtaaagaagcagaaataaaaaggataaacaaggaactggcaaatatcagatcaaaatttaaaggtgacaaggctcttgatggctatagtaaaaaaaagtacgtctgcaagttgctcttcatctttctccttggtcatgacattgactttggacacatggaggctgtgaacctgctgagttcaaacagatacacggaaaagcagatcggctaccttttcatctctgtgttggtgaactcaaacagtgagctgatccgcctgatcaacaacgccatcaagaatgacctggccagccgcaaccccaccttcatgggcctggccctgcactgcatcgccagcgtgggcagccgggagatggccgaggccttcgccggggagatccctaaggtcctcgtagccggagacactatggacagcgtgaagcagagcgcggccctgtgcttgctgcgcctgtacaggacgtcccccgatcttgtccccatgggcgactggacatcccgagtggtgcacctgctcaatgaccagcacttgggtgtggtaactgcagccacaagtctgatcaccactttagcacagaagaacccagaagagtttaaaacctccgtgtctctggctgtctctaggctaagcagaatcgtgacgtctgcatccacagatctccaggattacacttactattttgtcccggctccctggctgtctgtcaaactgctgagactgctgcagtgctacccacccccagaccctgcagtgcgaggccgcctgactgagtgcctggagaccatcctgaacaaagcccaagaaccgcccaagtcgaagaaggtccagcactccaacgcgaagaatgccgtgctcttcgaggccatcagcttaatcattcaccatgacagggagccgaacctgcaagcccagatgtaccggctcacgctgcgcacaagtaaggaagccgtttctcagagattatgtgaattgctctcagcgcagttttagtcctgaggatggaagaccaggctcgtgtgtcttgtgttgtcttcgtctgtgccgtttgtcttcgtggccatcctgcagatgagcaccgtgtccagtgccacagcacaaggcgcctccccgccccgccgccccacacctctcccctttgggctggacgggaacacacgtgtgtggctcaggaggaaaagctcagcctggactgtggcagccacggcagaaggtggatcttgggatcaatttttataaaaatcgagacagttctgtggttaaatctacaaattaaagggaaattag

SEQ ID NO: 1077 - DNA, 2109 bp, Homo sapiens
  source 1..2109: mol_type = unassigned DNA
ctgggaccctgaggcggccgtggttaggcggctccccggcggctcctccgcggcggtgacggcgaccgcactccccgcttcccgctccccgcgctcctccgcccgggtccgccagccgaggccgctcccgagcgtcggaagatgccggccgtgtccaagggggacgggatgcggggcctggcggtcttcatctcggatatccgcaactgtaaaagtaaagaagcagaaataaaaaggataaacaaggaactggcaaatatcagatcaaaatttaaaggtgacaaggctcttgatggctatagtaaaaaaaagtacgtctgcaagttgctcttcatctttctccttggtcatgacattgactttggacacatggaggctgtgaacctgctgagttcaaacagatacacggaaaagcagatcggctaccttttcatctctgtgttggtgaactcaaacagtgagctgatccgcctgatcaacaacgccatcaagaatgacctggccagccgcaaccccaccttcatgggcctggccctgcactgcatcgccagcgtgggcagccgggagatggccgaggccttcgccggggagatccctaaggtcctcgtagccggagacactatggacagcgtgaagcagagcgcggccctgtgcttgctgcgcctgtacaggacgtcccccgatcttgtccccatgggcgactggacatcccgagtggtgcacctgctcaatgaccagcacttgggtgtggtaactgcagccacaagtctgatcaccactttagcacagaagaacccagaagagtttaaaacctccgtgtctctggctgtctctaggctaagcagaatcgtgacgtctgcatccacagatctccaggattacacttactattttgtcccggctccctggctgtctgtcaaactgctgagactgctgcagtgctacccacccccagaagaccctgcagtgcgaggccgcctgactgagtgcctggagaccatcctgaacaaagcccaagaaccgcccaagtcgaagaaggtccagcactccaacgcgaagaatgccgtgctcttcgaggccatcagcttaatcattcaccatgacagtgagccgaacctgctcgtccgtgcctgcaaccagttgggccagtttctgcagcaccgcgagaccaacctgcgctacctggccctggagagcatgtgcacgctggccagctctgagttctcccatgaggctgtcaagacgcacatcgagacggtcatcaacgccctgaagactgagcgggacgtgagcgtgcggcagcgggccgtggacctcctctacgccatgtgcgaccgcagcaacgccccacagatcgtggccgagatgctgagctatctggagacagctgactactccatccgagaagagattgtgctgaaggtcgccatcctggctgagaagtacgcggtggactacacctggtatgtggataccatcttgaacttgatccgaattgctggtgattacgtgagtgaagaggtgtggtaccgagtcattcagatcgtcatcaaccgggacgacgtgcagggctacgcggccaagactgtgttcgaggctcttcaggctcccgcgtgccacgagaacctggtcaaagtgggcggctacatcctgggggagtttggaaacttgatagctggagacccgagatccagcccgctgatccagttccacctgctgcactccaagttccacctgtgcagcgtccccacccgcgcgctgctcctgtccacctacatcaagttcgtgaacctcttcccggaggtgaagcccaccatccaggacgtgctgcgcagcgacagccagctcaggaacgcagacgtggagctgcagcagcgtgctgtggagtacctgcggctcagcaccgtggccagcaccgacattctggcgaccgtgctggaggagatgcccccattcccggagcgggagtcctccatcttggcaaagctcaagaagaagaagggccccagcacggtgacagacctggaggacaccaagcgggacaggagtgtggacgtgaacgggggtcctgagcctgccccagccagtaccagcgccgtgctctgcttg

SEQ ID NO: 1078 - DNA, 4575 bp, Homo sapiens
  source 1..4575: mol_type = unassigned DNA
ctgggaccctgaggcggccgtggttaggcggctccccggcggctcctccgcggcggtgacggcgaccgcactccccgcttcccgctccccgcgctcctccgcccgggtccgccagccgaggccgctcccgagcgtcggaagatgccggccgtgtccaagggggacgggatgcggggcctggcggtcttcatctcggatatccgcaactgtaaaagtaaagaagcagaaataaaaaggataaacaaggaactggcaaatatcagatcaaaatttaaaggtgacaaggctcttgatggctatagtaaaaaaaagtacgtctgcaagttgctcttcatctttctccttggtcatgacattgactttggacacatggaggctgtgaacctgctgagttcaaacagatacacggaaaagcagatcggctaccttttcatctctgtgttggtgaactcaaacagtgagctgatccgcctgatcaacaacgccatcaagaatgacctggccagccgcaaccccaccttcatgggcctggccctgcactgcatcgccagcgtgggcagccgggagatggccgaggccttcgccggggagatccctaaggtcctcgtagccggagacactatggacagcgtgaagcagagcgcggccctgtgcttgctgcgcctgtacaggacgtcccccgatcttgtccccatgggcgactggacatcccgagtggtgcacctgctcaatgaccagcacttgggtgtggtaactgcagccacaagtctgatcaccactttagcacagaagaacccagaagagtttaaaacctccgtgtctctggctgtctctaggctaagcagaatcgtgacgtctgcatccacagatctccaggattacacttactattttgtcccggctccctggctgtctgtcaaactgctgagactgctgcagtgctacccacccccagaccctgcagtgcgaggccgcctgactgagtgcctggagaccatcctgaacaaagcccaagaaccgcccaagtcgaagaaggtccagcactccaacgcgaagaatgccgtgctcttcgaggccatcagcttaatcattcaccatgacagtgagccgaacctgctcgtccgtgcctgcaaccagttgggccagtttctgcagcaccgcgagaccaacctgcgctacctggccctggagagcatgtgcacgctggccagctctgagttctcccatgaggctgtcaagacgcacatcgagacggtcatcaacgccctgaagactgagcgggacgtgagcgtgcggcagcgggccgtggacctcctctacgccatgtgcgaccgcagcaacgccccacagatcgtggccgagatgctgagctatctggagacagctgactactccatccgagaagagattgtgctgaaggtcgccatcctggctgagaagtacgcggtggactacacctggtatgtggataccatcttgaacttgatccgaattgctggtgattacgtgagtgaagaggtgtggtaccgagtcattcagatcgtcatcaaccgggacgacgtgcagggctacgcggccaagactgtgttcgaggctcttcaggctcccgcgtgccacgagaacctggtcaaagtgggcggctacatcctgggggagtttggaaacttgatagctggagacccgagatccagcccgctgatccagttccacctgctgcactccaagttccacctgtgcagcgtccccacccgcgcgctgctcctgtccacctacatcaagttcgtgaacctcttcccggaggtgaagcccaccatccaggacgtgctgcgcagcgacagccagctcaggaacgcagacgtggagctgcagcagcgtgctgtggagtacctgcggctcagcaccgtggccagcaccgacattctggcgaccgtgctggaggagatgcccccattcccggagcgggagtcctccatcttggcaaagctcaagaagaagaagggccccagcacggtgacagacctggaggacaccaagcgggacaggagtgtggacgtgaacgggggtcctgagcctgccccagccagtaccagcgccgtgtctacgccttctccgtcggcagacctgctgggtctcggggctgccccccctgcccccgcgggccccccaccctcctccggcggcagcgggctgctcgtggacgtgttctcagactcggcctctgtggtcgcgcctctcgctcctggctccgaagacaactttgccaggtttgtttgtaaaaacaatggtgtgttgtttgaaaaccagctgcttcaaattggacttaagtctgaatttcggcagaatttaggtcggatgtttatcttttatggtaataagacctccacgcagttcctaaactttaccccaacactaatctgttcagacgaccttcagcctaacctgaacctgcagaccaagcccgtggacccgaccgtggaggggggcgcgcaggtgcagcaggtggtcaacatagagtgcgtgtccgacttcacggaggcgccagtcctcaacattcagttcaggtatgggggcaccttccagaacgtgtctgtgcagctgcccatcactctcaacaaattcttccagccgacagaaatggcttctcaggatttctttcaacgttggaagcagttgagcaatccacagcaggaagtgcagaacatcttcaaagcaaagcacccaatggacacagaagtcaccaaagccaagatcattggatttggttctgcacttcttgaagaagttgatcctaatcctgcgaatttcgtgggagctggaatcatccacacgaaaaccacccagattggatgcctgctgcgcttggagccgaacctgcaagcccagatgtaccggctcacgctgcgcacaagtaaggaagccgtttctcagagattatgtgaattgctctcagcgcagttttagtcctgaggatggaagaccaggctcgtgtgtcttgtgttgtcttcgtctgtgccgtttgtcttcgtggccatcctgcagatgagcaccgtgtccagtgccacagcacaaggcgcctccccgccccgccgccccacacctctcccctttgggctggacgggaacacacgtgtgtggctcaggaggaaaagctcagcctggactgtggcagccacggcagaaggtggatcttgggatcaatttttataaaaatcgagacagttctgtggttaaatctacaaattaaagggaaattagaagttggcgtgaacgtggcgtttgtgggagtgtcactgagatggcccgtgctgccgcccaccccgcctcggagcctctgggagcagcagtgccactgtgcatggcgtgggctgagccttggtgtgtggccgtcctggtggctgcacacctggcgtcgtcctgggcccttgggaggagcacagctgaccctggttttgctgcagtcccagctggactgttttcccaggcaggattttaatctagaatttagaaacatttgtatttgtaatgacttctggcaaaagcacgtgtcctggccggatgtaactgttctcctttcccagctcctgtttgtgaagggcgtctgttatgctcctgcagtcgccgaggccttggatgtgcagccaggggaggagcgtcctgccggccccgcagggcccccaggactccagggtaaagtgtgggccggtggcgcaagactcagaggtgtgctcgtctctttcctgtcagagtgggcgtccccaggccacggtgcaggcctgagtccttccaccggccccgtccagtcgtccctggaggggctgtggaggagggacgcctctgtgtggtcaggaagtgaaggggccattggccgcatgccatgtgccacctgcggcttgtgtctcacctgtcatctggactcagcacccaggctgcacgtctgacacctgagaggcgagagagtggggccggcctaggagccaaggctggggccttgcgctctgtccccaggatggtggccttgtttgtcctaaacacacccagcacaggttctggcttcctgacatgctgtggaggcagggagggtgggtggccacatgtgcttgagggttttcaccctggccctcagttgcctgctgtgcgggtccctggggcagctgcaggggctcatggacccatcagggtctccacagctcccctgcagtgtgtgcaccccacaatgtctgcggctcttcttccggcgtgtcgggctttgatcacagcatagccacgtcagtggcgtgcgcctctcgcacaggccattctgggtctggtggtgccaggtgccgtgacacgccgtgctgggcttgtgctgcagctgggtggtgtggccctcattctcatgttccagctgctgggcagtgctctgcctgtgtgctgcgcctgcaggctgcgtgtgctgccgtggatctcctgcatcccttgacccctcccgccatcagaggaaaggctgctccccgaggcaccgcttccctgtgcggcgctgcagaggggccctcagtgtggcactcctcgtcaaagaaaaataaaggctagaactgc

SEQ ID NO: 1079 - DNA, 2184 bp, Homo sapiens
  source 1..2184: mol_type = unassigned DNA
actccccgcttcccgctccccgcgctcctccgcccgggtccgccagccgaggccgctcccgagcgtcggaagatgccggccgtgtccaagggggacgggatgcggggcctggcggtcttcatctcggatatccgcaactgtaaaagtaaagaagcagaaataaaaaggataaacaaggaactggcaaatatcagatcaaaatttaaaggtgacaaggctcttgatggctatagtaaaaaaaagtacgtctgcaagttgctcttcatctttctccttggtcatgacattgactttggacacatggaggctgtgaacctgctgagttcaaacagatacacggaaaagcagatcggctaccttttcatctctgtgttggtgaactcaaacagtgagctgatccgcctgatcaacaacgccatcaagactgagcgggacgtgagcgtgcggcagcgggccgtggacctcctctacgccatgtgcgaccgcagcaacgccccacagatcgtggccgagatgctgagctatctggagacagctgactactccatccgagaagagattgtgctgaaggtcgccatcctggctgagaagtacgcggtggactacacctggtatgtggataccatcttgaacttgatccgaattgctggtgattacgtgagtgaagaggtgtggtaccgagtcattcagatcgtcatcaaccgggacgacgtgcagggctacgcggccaagactgtgttcgaggctcttcaggctcccgcgtgccacgagaacctggtcaaagtgggcggctacatcctgggggagtttggaaacttgatagctggagacccgagatccagcccgctgatccagttccacctgctgcactccaagttccacctgtgcagcgtccccacccgcgcgctgctcctgtccacctacatcaagttcgtgaacctcttcccggaggtgaagcccaccatccaggacgtgctgcgcagcgacagccagctcaggaacgcagacgtggagctgcagcagcgtgctgtggagtacctgcggctcagcaccgtggccagcaccgacattctggcgaccgtgctggaggagatgcccccattcccggagcgggagtcctccatcttggcaaagctcaagaagaagaagggccccagcacggtgacagacctggaggacaccaagcgggacaggagtgtggacgtgaacgggggtcctgagcctgccccagccagtaccagcgccgtgtctacgccttctccgtcggcagacctgctgggtctcggggctgccccccctgcccccgcgggccccccaccctcctccggcggcagcgggctgctcgtggacgtgttctcagactcggcctctgtggtcgcgcctctcgctcctggctccgaagacaactttgccaggtttgtttgtaaaaacaatggtgtgttgtttgaaaaccagctgcttcaaattggacttaagtctgaatttcggcagaatttaggtcggatgtttatcttttatggtaataagacctccacgcagttcctaaactttaccccaacactaatctgttcagacgaccttcagcctaacctgaacctgcagaccaagcccgtggacccgaccgtggaggggggcgcgcaggtgcagcaggtggtcaacatagagtgcgtgtccgacttcacggaggcgccagtcctcaacattcagttcaggtatgggggcaccttccagaacgtgtctgtgcagctgcccatcactctcaacaaattcttccagccgacagaaatggcttctcaggatttctttcaacgttggaagcagttgagcaatccacagcaggaagtgcagaacatcttcaaagcaaagcacccaatggacacagaagtcaccaaagccaagatcattggatttggttctgcacttcttgaagaagttgatcctaatcctgcgaatttcgtgggagctggaatcatccacacgaaaaccacccagattggatgcctgctgcgcttggagccgaacctgcaagcccagatgtaccggctcacgctgcgcacaagtaaggaagccgtttctcagagattatgtgaattgctctcagcgcagttttagtcctgaggatggaagaccaggctcgtgtgtcttgtgttgtcttcgtctgtgccgtttgtcttcgtggccatc

SEQ ID NO: 1080 - DNA, 2175 bp, Homo sapiens
  source 1..2175: mol_type = unassigned DNA
actccccgcttcccgctccccgcgctcctccgcccgggtccgccagccgaggccgctcccgagcgtcggaagatgccggccgtgtccaagggggacgggatgcggggcctggcggtcttcatctcggatatccgcaactgtaaaagtaaagaagcagaaataaaaaggataaacaaggaactggcaaatatcagatcaaaatttaaaggtgacaaggctcttgatggctatagtaaaaaaaagtacgtctgcaagttgctcttcatctttctccttggtcatgacattgactttggacacatggaggctgtgaacctgctgagttcaaacagatacacggaaaagcagatcggctaccttttcatctctgtgttggtgaactcaaacagtgagctgatccgcctgatcaacaacactgagcgggacgtgagcgtgcggcagcgggccgtggacctcctctacgccatgtgcgaccgcagcaacgccccacagatcgtggccgagatgctgagctatctggagacagctgactactccatccgagaagagattgtgctgaaggtcgccatcctggctgagaagtacgcggtggactacacctggtatgtggataccatcttgaacttgatccgaattgctggtgattacgtgagtgaagaggtgtggtaccgagtcattcagatcgtcatcaaccgggacgacgtgcagggctacgcggccaagactgtgttcgaggctcttcaggctcccgcgtgccacgagaacctggtcaaagtgggcggctacatcctgggggagtttggaaacttgatagctggagacccgagatccagcccgctgatccagttccacctgctgcactccaagttccacctgtgcagcgtccccacccgcgcgctgctcctgtccacctacatcaagttcgtgaacctcttcccggaggtgaagcccaccatccaggacgtgctgcgcagcgacagccagctcaggaacgcagacgtggagctgcagcagcgtgctgtggagtacctgcggctcagcaccgtggccagcaccgacattctggcgaccgtgctggaggagatgcccccattcccggagcgggagtcctccatcttggcaaagctcaagaagaagaagggccccagcacggtgacagacctggaggacaccaagcgggacaggagtgtggacgtgaacgggggtcctgagcctgccccagccagtaccagcgccgtgtctacgccttctccgtcggcagacctgctgggtctcggggctgccccccctgcccccgcgggccccccaccctcctccggcggcagcgggctgctcgtggacgtgttctcagactcggcctctgtggtcgcgcctctcgctcctggctccgaagacaactttgccaggtttgtttgtaaaaacaatggtgtgttgtttgaaaaccagctgcttcaaattggacttaagtctgaatttcggcagaatttaggtcggatgtttatcttttatggtaataagacctccacgcagttcctaaactttaccccaacactaatctgttcagacgaccttcagcctaacctgaacctgcagaccaagcccgtggacccgaccgtggaggggggcgcgcaggtgcagcaggtggtcaacatagagtgcgtgtccgacttcacggaggcgccagtcctcaacattcagttcaggtatgggggcaccttccagaacgtgtctgtgcagctgcccatcactctcaacaaattcttccagccgacagaaatggcttctcaggatttctttcaacgttggaagcagttgagcaatccacagcaggaagtgcagaacatcttcaaagcaaagcacccaatggacacagaagtcaccaaagccaagatcattggatttggttctgcacttcttgaagaagttgatcctaatcctgcgaatttcgtgggagctggaatcatccacacgaaaaccacccagattggatgcctgctgcgcttggagccgaacctgcaagcccagatgtaccggctcacgctgcgcacaagtaaggaagccgtttctcagagattatgtgaattgctctcagcgcagttttagtcctgaggatggaagaccaggctcgtgtgtcttgtgttgtcttcgtctgtgccgtttgtcttcgtggccatc

SEQ ID NO: 1081 - DNA, 5719 bp, Homo sapiens
  source 1..5719: mol_type = unassigned DNA
gtcagagtttcctgcccaccatctttgtccctggcaaagtgggttttgcgcagtggcttagacctagaaaagaatcgtgacgggcaggaaaccattacaccaccacctgggctgtgctctccggctcccgccgccacccccgccctcgccttcgcctccgcctccggtgcacattaaagatccaaagtcatgactgactccaagtatttcacaaccaataaaaaaggagaaatatttgaactaaaagctgaactcaacaatgaaaagaaagaaaagagaaaggaggctgtgaagaaagtgattgctgctatgaccgtggggaaggatgttagttctctctttccagacgtagtgaactgtatgcagactgacaatctggaactaaagaagcttgtgtatctctacttgatgaactacgccaagagtcagccagacatggccatcatggctgtaaacagctttgtgaaggactgtgaagatcctaatcctttgattcgagccttggcagtcagaaccatggggtgcatccgggtagacaaaattacagaatatctctgtgagccgctccgcaagtgcttgaaggatgaggatccctatgttcggaaaacagcagcagtctgcgtggcaaaactccatgatatcaatgcccaaatggtggaagatcagggatttctggattctctacgggatctcatagcagattcaaatccaatggtggtggctaatgccgtagcggcattatctgaaatcagtgagtctcacccaaacagcaacttacttgatctgaacccacagaacattaataagctgctgacagccctgaatgaatgcactgaatggggccagattttcatcctggactgcctgtctaattacaaccctaaagatgatcgggaggctcagagcatctgtgagcgggtaactccccggctatcccatgccaactcagcagtggtgctttcagcggtaaaagtcctaatgaagtttctagaattgttacctaaggattctgactactacaatatgctgctgaagaagttagcccctccacttgtcactttgctgtctggggagccagaagtgcagtatgtcgccctgaggaacatcaacttaattgtccagaaaaggcctgaaatcttgaagcaggaaatcaaagtcttctttgtgaagtacaatgatcccatctatgttaaactagagaagttggacatcatgattcgtttggcatctcaagccaacattgctcaggttctggcagaactgaaagaatatgctacagaggtggatgttgactttgttcgaaaagctgtgcgggccattggacggtgtgccatcaaggtggagcaatctgcagagcgctgtgtaagcacattgcttgatctaatccagaccaaagtgaattatgtggtccaagaagcaattgttgtcatcagggacatcttccgcaaataccccaacaagtatgaaagtatcatcgccactctgtgtgagaacttagactcgctggatgagccagatgctcgagcagctatgatttggattgtgggagaatatgctgaaagaattgacaatgcagatgagttactagaaagcttcctggagggttttcacgatgaaagcacccaggtgcagctcactctgcttactgccatagtgaagctgtttctcaagaaaccatcagaaacacaggagctagtccagcaggtcttgagtttggcaacacaggattctgataatcctgaccttcgagaccggggctatatttattggcgccttctctcaactgaccctgttacagctaaagaagtagtcttgtctgagaagccactgatctctgaggagacggaccttattgagccaactctgctggatgagctaatctgccacattggttctttggcctctgtgtatcataagcctcccaatgcttttgtggaaggaagtcatggaattcatcgtaaacacttgccaattcatcatgggagcactgatgcaggtgacagccctgttggcactaccactgcaacgaacctggaacagcctcaggttatcccctctcaaggtgatcttctaggggatcttttaaaccttgacctcggtcccccagtcaatgtgccacaggtgtcctccatgcagatgggagcagtggatctcctaggaggaggactagatagtctggtgggacaatccttcatcccatcatcggtgcctgcaacctttgctccttcacctacacctgctgtggtcagcagtggactgaatgacctgtttgaactctccacagggataggcatggcacctggtggatatgtggctcctaaggctgtctggctacctgcagtaaaggctaaaggcttggagatttccggaacatttactcaccgccaagggcacatctatatggaaatgaacttcaccaataaagctctgcagcacatgacagattttgcaatccagtttaacaaaaatagctttggtgtcatccccagcactcctctggccatccatacaccactgatgccaaaccagagcattgatgtctccctgcctctcaataccttgggcccagtcatgaagatggaacctctgaataacctccaggtggctgtgaaaaacaatatcgatgtcttctacttcagctgcctcatcccactcaatgtgctttttgtagaagatggcaaaatggagcgccaggtcttccttgcaacatggaaggatattcccaatgaaaatgaacttcagtttcagattaaggaatgtcatttaaatgctgacactgtttccagcaagttgcaaaacaacaatgtttatactattgccaagaggaatgtggaagggcaggacatgctgtaccaatccctgaagctcactaatggcatttggattttggccgaactacgtatccagccaggaaaccccaattacacgctgtcactgaagtgtagagctcctgaagtctctcaatacatctatcaggtctacgacagcattttgaaaaactaacaagactggtccagtacccttcaaccatgctgtgatcggtgcaagtcaagaactcttaactggaagaaattgtattgctgcgtagaatctgaacacactgaggccacctagcaaggtagtaactagtctaacctgtgctaacattagggcacaacctgttggatagttttagcttcctgtgaacatttgtaaccactgcttcagtcacctcccacctcttgccacctgctgctgctatctgtccttacttgtgggcttctccatgctgtgccaatggctggctttttctacaccctcttttgagtgtagtttggtattttgtaattgagagctcatttcaaaagcagaaaaagacaacaaatattaaagcaaggaaaagtgtaactgaaacactgcactttactgttttatacttttgtacatatgagaaatcaagggattagtgcaaccagtagaaagcattgaaatgactgtcattaaccacacagtcctggaggcagagatgcagttacctaccctagcttttgatgggttctcttacctgtagtagccttatccctggtcatttggattttcagtttgcttttttctttttttcccctccaaactccttttccttggccaagccttcatgcttccccctttccatattataatctcatttgattgctctgcagttgggaacggtgatcttcttgaatgatgtttcagtgtgcaaaaactatagagcctgtcagcaccaaagctgacagaagttataccttactcctttcctttcccctgaacaaacctgctaatcccactaattcaggaatttgagtagagatggggaacaagaacccagatgctgtcccctcaccccctctcctgtatttctcaggtccagttcaaatctaaaattctacttttagagttgaaacagagtaataacttatctaaccctcttttcctacaaaggagaaagataaaaggcacaaaggttaccgccaaggcccgtcagctgtgtagtggcaaagccgagaccgagtctcctaagtccccgtcagtgtggttttcaccacaggactgtctcttgtcgttttcccctaatgccttctcctgccttttctgtgcctagtttttggctcttcacatattccatattgattttgacgctctgtatattggcatcaggtggcagctgaatatcttttgaattactcgaaggtaaagccagatgccagaatgaaggtgtagccagtgtttcccatatgcccctggagccccacttattgaggccagcagaataggtgcagagatgaagtgagcttagagatgttgcaaatgctctttatcccttcagctctctgatctgctctttcttcatgatacttagtctgcagggcatattaagatcatcccagaggttcaggcagttcctgtcatctctgaaaagactgggggatatgaaatcttccccctaccccacttaatgcgttggatatgatttttcaaagaatgcttcatgcccaaaataccagcctgtttagcagtgttacactgtttgatctgcgggcacttgttgcattgcctggcacccaatattcagggtccatgactaagactggtcttctcagatgccctgcttaaatcaggggcacttcaggctccacaggcgtcatgttggactgagacctaactcactggactcagaggaggaatcgtggaaaacaagagcaaaactaccccacacccctatttcatgtctgaaataaccctgtttcataccagttgcaaagcttgtggggagcggtcccacaaagcactttcttaaaccttgagaatctccaagagaaaaatatttggggaaggagggaggaaatatgtcccttgcacaccacccctgaagcacatggcagtaggaaacagcataggattgtatgtgggaggtggataggtcggtgatgtgtggagcggaaaagcaggttggtaaagttcccttcttgggacttattcctggagtcagtggatacaagtagtgcagaaggttcacactgcaaatagtgttctcatctcaaagcaaactatcattccagaaggaaaagtgtgtcagggcaagcagacaacacaatttcctatcagaatatgtccctcaacccccgaaacaaggcttctctcagcctccccaccagtgatggataacagctcctattctcagctgacctgactgagccaacccatgaactcttcactccttggggaagccacctcccatcacacccctgagcagagttagggaggaattctacttcccataaaaggacctctcctgagaggcaaaacctgttgcctccaccacggcttccctcttggctcattccaagcttggccaaattggggaagtgggatggaggttgccctgcatcccccctcctctgcctgagtgtgtctttgtaatgtcagctggcatcatacaaagagcaggagaagcaaacacccagaactcttttgctggtcagagattccctgagtgtctgtcctcacccaagcctgctctgtgtctgtgttgtgaagcttgagactctggaaagaaatggggagggggggcaggggaaatgttgccctaagaatgcttctcattcctctgttcttattgggtcctgtttttcgggagggtgggggttgggggaagcttgaccttgtgtcttcgtcaataaactcacatttacacaaaatg

SEQ ID NO: 1082 - DNA, 5761 bp, Homo sapiens
  source 1..5761: mol_type = unassigned DNA
gtcagagtttcctgcccaccatctttgtccctggcaaagtgggttttgcgcagtggcttagacctagaaaagaatcgtgacgggcaggaaaccattacaccaccacctgggctgtgctctccggctcccgccgccacccccgccctcgccttcgcctccgcctccggtgcacattaaagatccaaagtcatgactgactccaagtatttcacaaccaataaaaaaggagaaatatttgaactaaaagctgaactcaacaatgaaaagaaagaaaagagaaaggaggctgtgaagaaagtgattgctgctatgaccgtggggaaggatgttagttctctctttccagacgtagtgaactgtatgcagactgacaatctggaactaaagaagcttgtgtatctctacttgatgaactacgccaagagtcagccagacatggccatcatggctgtaaacagctttgtgaaggactgtgaagatcctaatcctttgattcgagccttggcagtcagaaccatggggtgcatccgggtagacaaaattacagaatatctctgtgagccgctccgcaagtgcttgaaggatgaggatccctatgttcggaaaacagcagcagtctgcgtggcaaaactccatgatatcaatgcccaaatggtggaagatcagggatttctggattctctacgggatctcatagcagattcaaatccaatggtggtggctaatgccgtagcggcattatctgaaatcagtgagtctcacccaaacagcaacttacttgatctgaacccacagaacattaataagctgctgacagccctgaatgaatgcactgaatggggccagattttcatcctggactgcctgtctaattacaaccctaaagatgatcgggaggctcagagcatctgtgagcgggtaactccccggctatcccatgccaactcagcagtggtgctttcagcggtaaaagtcctaatgaagtttctagaattgttacctaaggattctgactactacaatatgctgctgaagaagttagcccctccacttgtcactttgctgtctggggagccagaagtgcagtatgtcgccctgaggaacatcaacttaattgtccagaaaaggcctgaaatcttgaagcaggaaatcaaagtcttctttgtgaagtacaatgatcccatctatgttaaactagagaagttggacatcatgattcgtttggcatctcaagccaacattgctcaggttctggcagaactgaaagaatatgctacagaggtggatgttgactttgttcgaaaagctgtgcgggccattggacggtgtgccatcaaggtggagcaatctgcagagcgctgtgtaagcacattgcttgatctaatccagaccaaagtgaattatgtggtccaagaagcaattgttgtcatcagggacatcttccgcaaataccccaacaagtatgaaagtatcatcgccactctgtgtgagaacttagactcgctggatgagccagatgctcgagcagctatgatttggattgtgggagaatatgctgaaagaattgacaatgcagatgagttactagaaagcttcctggagggttttcacgatgaaagcacccaggtgcagctcactctgcttactgccatagtgaagctgtttctcaagaaaccatcagaaacacaggagctagtccagcaggtcttgagtttggcaacacaggattctgataatcctgaccttcgagaccggggctatatttattggcgccttctctcaactgaccctgttacagctaaagaagtagtcttgtctgagaagccactgatctctgaggagacggaccttattgagccaactctgctggatgagctaatctgccacattggttctttggcctctgtgtatcataagcctcccaatgcttttgtggaaggaagtcatggaattcatcgtaaacacttgccaattcatcatgggagcactgatgcaggtgacagccctgttggcactaccactgcaacgaacctggaacagcctcaggttatcccctctcaaggtgatcttctaggggatcttttaaaccttgacctcggtcccccagtcaatgtgccacaggtgtcctccatgcagatgggagcagtggatctcctaggaggaggactagatagtctgcttggcagtgaccttggcgggggcattggaggaagtccggcagtgggacaatccttcatcccatcatcggtgcctgcaacctttgctccttcacctacacctgctgtggtcagcagtggactgaatgacctgtttgaactctccacagggataggcatggcacctggtggatatgtggctcctaaggctgtctggctacctgcagtaaaggctaaaggcttggagatttccggaacatttactcaccgccaagggcacatctatatggaaatgaacttcaccaataaagctctgcagcacatgacagattttgcaatccagtttaacaaaaatagctttggtgtcatccccagcactcctctggccatccatacaccactgatgccaaaccagagcattgatgtctccctgcctctcaataccttgggcccagtcatgaagatggaacctctgaataacctccaggtggctgtgaaaaacaatatcgatgtcttctacttcagctgcctcatcccactcaatgtgctttttgtagaagatggcaaaatggagcgccaggtcttccttgcaacatggaaggatattcccaatgaaaatgaacttcagtttcagattaaggaatgtcatttaaatgctgacactgtttccagcaagttgcaaaacaacaatgtttatactattgccaagaggaatgtggaagggcaggacatgctgtaccaatccctgaagctcactaatggcatttggattttggccgaactacgtatccagccaggaaaccccaattacacgctgtcactgaagtgtagagctcctgaagtctctcaatacatctatcaggtctacgacagcattttgaaaaactaacaagactggtccagtacccttcaaccatgctgtgatcggtgcaagtcaagaactcttaactggaagaaattgtattgctgcgtagaatctgaacacactgaggccacctagcaaggtagtaactagtctaacctgtgctaacattagggcacaacctgttggatagttttagcttcctgtgaacatttgtaaccactgcttcagtcacctcccacctcttgccacctgctgctgctatctgtccttacttgtgggcttctccatgctgtgccaatggctggctttttctacaccctcttttgagtgtagtttggtattttgtaattgagagctcatttcaaaagcagaaaaagacaacaaatattaaagcaaggaaaagtgtaactgaaacactgcactttactgttttatacttttgtacatatgagaaatcaagggattagtgcaaccagtagaaagcattgaaatgactgtcattaaccacacagtcctggaggcagagatgcagttacctaccctagcttttgatgggttctcttacctgtagtagccttatccctggtcatttggattttcagtttgcttttttctttttttcccctccaaactccttttccttggccaagccttcatgcttccccctttccatattataatctcatttgattgctctgcagttgggaacggtgatcttcttgaatgatgtttcagtgtgcaaaaactatagagcctgtcagcaccaaagctgacagaagttataccttactcctttcctttcccctgaacaaacctgctaatcccactaattcaggaatttgagtagagatggggaacaagaacccagatgctgtcccctcaccccctctcctgtatttctcaggtccagttcaaatctaaaattctacttttagagttgaaacagagtaataacttatctaaccctcttttcctacaaaggagaaagataaaaggcacaaaggttaccgccaaggcccgtcagctgtgtagtggcaaagccgagaccgagtctcctaagtccccgtcagtgtggttttcaccacaggactgtctcttgtcgttttcccctaatgccttctcctgccttttctgtgcctagtttttggctcttcacatattccatattgattttgacgctctgtatattggcatcaggtggcagctgaatatcttttgaattactcgaaggtaaagccagatgccagaatgaaggtgtagccagtgtttcccatatgcccctggagccccacttattgaggccagcagaataggtgcagagatgaagtgagcttagagatgttgcaaatgctctttatcccttcagctctctgatctgctctttcttcatgatacttagtctgcagggcatattaagatcatcccagaggttcaggcagttcctgtcatctctgaaaagactgggggatatgaaatcttccccctaccccacttaatgcgttggatatgatttttcaaagaatgcttcatgcccaaaataccagcctgtttagcagtgttacactgtttgatctgcgggcacttgttgcattgcctggcacccaatattcagggtccatgactaagactggtcttctcagatgccctgcttaaatcaggggcacttcaggctccacaggcgtcatgttggactgagacctaactcactggactcagaggaggaatcgtggaaaacaagagcaaaactaccccacacccctatttcatgtctgaaataaccctgtttcataccagttgcaaagcttgtggggagcggtcccacaaagcactttcttaaaccttgagaatctccaagagaaaaatatttggggaaggagggaggaaatatgtcccttgcacaccacccctgaagcacatggcagtaggaaacagcataggattgtatgtgggaggtggataggtcggtgatgtgtggagcggaaaagcaggttggtaaagttcccttcttgggacttattcctggagtcagtggatacaagtagtgcagaaggttcacactgcaaatagtgttctcatctcaaagcaaactatcattccagaaggaaaagtgtgtcagggcaagcagacaacacaatttcctatcagaatatgtccctcaacccccgaaacaaggcttctctcagcctccccaccagtgatggataacagctcctattctcagctgacctgactgagccaacccatgaactcttcactccttggggaagccacctcccatcacacccctgagcagagttagggaggaattctacttcccataaaaggacctctcctgagaggcaaaacctgttgcctccaccacggcttccctcttggctcattccaagcttggccaaattggggaagtgggatggaggttgccctgcatcccccctcctctgcctgagtgtgtctttgtaatgtcagctggcatcatacaaagagcaggagaagcaaacacccagaactcttttgctggtcagagattccctgagtgtctgtcctcacccaagcctgctctgtgtctgtgttgtgaagcttgagactctggaaagaaatggggagggggggcaggggaaatgttgccctaagaatgcttctcattcctctgttcttattgggtcctgtttttcgggagggtgggggttgggggaagcttgaccttgtgtcttcgtcaataaactcacatttacacaaaatg

SEQ ID NO: 1083 - DNA, 3415 bp, Homo sapiens
  source 1..3415: mol_type = unassigned DNA
gaccggcggaggcgaggaaatcctaagagcgtgaccgttgatgatgcagggaaccgtcgggtgtgaccattgagagggaaaaggttggagaaagggtctctaccatgatgcctgtggtgcggtgagggaatcctcgggtgtggcagcaggtgcacattaaagatccaaagtcatgactgactccaagtatttcacaaccaataaaaaaggagaaatatttgaactaaaagctgaactcaacaatgaaaagaaagaaaagagaaaggaggctgtgaagaaagtgattgctgctatgaccgtggggaaggatgttagttctctctttccagacgtagtgaactgtatgcagactgacaatctggaactaaagaagcttgtgtatctctacttgatgaactacgccaagagtcagccagacatggccatcatggctgtaaacagctttgtgaaggactgtgaagatcctaatcctttgattcgagccttggcagtcagaaccatggggtgcatccgggtagacaaaattacagaatatctctgtgagccgctccgcaagtgcttgaaggatgaggatccctatgttcggaaaacagcagcagtctgcgtggcaaaactccatgatatcaatgcccaaatggtggaagatcagggatttctggattctctacgggatctcatagcagattcaaatccaatggtggtggctaatgccgtagcggcattatctgaaatcagtgagtctcacccaaacagcaacttacttgatctgaacccacagaacattaataagctgctgacagccctgaatgaatgcactgaatggggccagattttcatcctggactgcctgtctaattacaaccctaaagatgatcgggaggctcagagcatctgtgagcgggtaactccccggctatcccatgccaactcagcagtggtgctttcagcggtaaaagtcctaatgaagtttctagaattgttacctaaggattctgactactacaatatgctgctgaagaagttagcccctccacttgtcactttgctgtctggggagccagaagtgcagtatgtcgccctgaggaacatcaacttaattgtccagaaaaggcctgaaatcttgaagcaggaaatcaaagtcttctttgtgaagtacaatgatcccatctatgttaaactagagaagttggacatcatgattcgtttggcatctcaagccaacattgctcaggttctggcagaactgaaagaatatgctacagaggtggatgttgactttgttcgaaaagctgtgcgggccattggacggtgtgccatcaaggtggagcaatctgcagagcgctgtgtaagcacattgcttgatctaatccagaccaaagtgaattatgtggtccaagaagcaattgttgtcatcagggacatcttccgcaaataccccaacaagtatgaaagtatcatcgccactctgtgtgagaacttagactcgctggatgagccagatgctcgagcagctatgatttggattgtgggagaatatgctgaaagaattgacaatgcagatgagttactagaaagcttcctggagggttttcacgatgaaagcacccaggtgcagctcactctgcttactgccatagtgaagctgtttctcaagaaaccatcagaaacacaggagctagtccagcaggtcttgagtttggcaacacaggattctgataatcctgaccttcgagaccggggctatatttattggcgccttctctcaactgaccctgttacagctaaagaagtagtcttgtctgagaagccactgatctctgaggagacggaccttattgagccaactctgctggatgagctaatctgccacattggttctttggcctctgtgtatcataagcctcccaatgcttttgtggaaggaagtcatggaattcatcgtaaacacttgccaattcatcatgggagcactgatgcaggtgacagccctgttggcactaccactgcaacgaacctggaacagcctcaggttatcccctctcaaggtgatcttctaggggatcttttaaaccttgacctcggtcccccagtcaatgtgccacaggtgtcctccatgcagatgggagcagtggatctcctaggaggaggactagatagtctgcttggcagtgaccttggcgggggcattggaggaagtccggcagtgggacaatccttcatcccatcatcggtgcctgcaacctttgctccttcacctacacctgctgtggtcagcagtggactgaatgacctgtttgaactctccacagggataggcatggcacctggtggatatgtggctcctaaggctgtctggctacctgcagtaaaggctaaaggcttggagatttccggaacatttactcaccgccaagggcacatctatatggaaatgaacttcaccaataaagctctgcagcacatgacagattttgcaatccagtttaacaaaaatagctttggtgtcatccccagcactcctctggccatccatacaccactgatgccaaaccagagcattgatgtctccctgcctctcaataccttgggcccagtcatgaagatggaacctctgaataacctccaggtggctgtgaaaaacaatatcgatgtcttctacttcagctgcctcatcccactcaatgtgctttttgtagaagatggcaaaatggagcgccaggtcttccttgcaacatggaaggatattcccaatgaaaatgaacttcagtttcagattaaggaatgtcatttaaatgctgacactgtttccagcaagttgcaaaacaacaatgtttatactattgccaagaggaatgtggaagggcaggacatgctgtaccaatccctgaagctcactaatggcatttggattttggccgaactacgtatccagccaggaaaccccaattacacgctgtcactgaagtgtagagctcctgaagtctctcaatacatctatcaggtctacgacagcattttgaaaaactaacaagactggtccagtacccttcaaccatgctgtgatcggtgcaagtcaagaactcttaactggaagaaattgtattgctgcgtagaatctgaacacactgaggccacctagcaaggtagtaactagtctaacctgtgctaacattagggcacaacctgttggatagttttagcttcctgtgaacatttgtaaccactgcttcagtcacctcccacctcttgccacctgctgctgctatctgtccttacttgtgggcttctccatgctgtgccaatggctggctttttctacaccctcttttgagtgtagtttggtattttgtaattgagagctcatttcaaaagcagaaaaagacaacaaatattaaagcaaggaaaagtgtaactg

SEQ ID NO: 1084 - DNA, 3425 bp, Homo sapiens
  source 1..3425: mol_type = unassigned DNA
agtggcttagacctagaaaagaatcgtgacgggcaggaaaccattacaccaccacctgggctgtgctctccggctcccgccgccacccccgccctcgccttcgcctccgcctccggtgcacattaaagatccaaagtcatgactgactccaagtatttcacaaccaataaaaaaggagaaatatttgaactaaaagctgaactcaacaatgaaaagaaagaaaagagaaaggaggctgtgaagaaagtgattgctgctatgaccgtggggaaggatgttagcacataaagcacatttggtttttaaattgctgtcctgtgaccatctatctaaggagttggcaaacgtttttgtaaaggacaaaatattctctctttccagacgtagtgaactgtatgcagactgacaatctggaactaaagaagcttgtgtatctctacttgatgaactacgccaagagtcagccagacatggccatcatggctgtaaacagctttgtgaaggactgtgaagatcctaatcctttgattcgagccttggcagtcagaaccatggggtgcatccgggtagacaaaattacagaatatctctgtgagccgctccgcaagtgcttgaaggatgaggatccctatgttcggaaaacagcagcagtctgcgtggcaaaactccatgatatcaatgcccaaatggtggaagatcagggatttctggattctctacgggatctcatagcagattcaaatccaatggtggtggctaatgccgtagcggcattatctgaaatcagtgagtctcacccaaacagcaacttacttgatctgaacccacagaacattaataagctgctgacagccctgaatgaatgcactgaatggggccagattttcatcctggactgcctgtctaattacaaccctaaagatgatcgggaggctcagagcatctgtgagcgggtaactccccggctatcccatgccaactcagcagtggtgctttcagcggtaaaagtcctaatgaagtttctagaattgttacctaaggattctgactactacaatatgctgctgaagaagttagcccctccacttgtcactttgctgtctggggagccagaagtgcagtatgtcgccctgaggaacatcaacttaattgtccagaaaaggcctgaaatcttgaagcaggaaatcaaagtcttctttgtgaagtacaatgatcccatctatgttaaactagagaagttggacatcatgattcgtttggcatctcaagccaacattgctcaggttctggcagaactgaaagaatatgctacagaggtggatgttgactttgttcgaaaagctgtgcgggccattggacggtgtgccatcaaggtggagcaatctgcagagcgctgtgtaagcacattgcttgatctaatccagaccaaagtgaattatgtggtccaagaagcaattgttgtcatcagggacatcttccgcaaataccccaacaagtatgaaagtatcatcgccactctgtgtgagaacttagactcgctggatgagccagatgctcgagcagctatgatttggattgtgggagaatatgctgaaagaattgacaatgcagatgagttactagaaagcttcctggagggttttcacgatgaaagcacccaggtgcagctcactctgcttactgccatagtgaagctgtttctcaagaaaccatcagaaacacaggagctagtccagcaggtcttgagtttggcaacacaggattctgataatcctgaccttcgagaccggggctatatttattggcgccttctctcaactgaccctgttacagctaaagaagtagtcttgtctgagaagccactgatctctgaggagacggaccttattgagccaactctgctggatgagctaatctgccacattggttctttggcctctgtgtatcataagcctcccaatgcttttgtggaaggaagtcatggaattcatcgtaaacacttgccaattcatcatgggagcactgatgcaggtgacagccctgttggcactaccactgcaacgaacctggaacagcctcaggttatcccctctcaaggtgatcttctaggggatcttttaaaccttgacctcggtcccccagtcaatgtgccacaggtgtcctccatgcagatgggagcagtggatctcctaggaggaggactagatagtctggtgggacaatccttcatcccatcatcggtgcctgcaacctttgctccttcacctacacctgctgtggtcagcagtggactgaatgacctgtttgaactctccacagggataggcatggcacctggtggatatgtggctcctaaggctgtctggctacctgcagtaaaggctaaaggcttggagatttccggaacatttactcaccgccaagggcacatctatatggaaatgaacttcaccaataaagctctgcagcacatgacagattttgcaatccagtttaacaaaaatagctttggtgtcatccccagcactcctctggccatccatacaccactgatgccaaaccagagcattgatgtctccctgcctctcaataccttgggcccagtcatgaagatggaacctctgaataacctccaggtggctgtgaaaaacaatatcgatgtcttctacttcagctgcctcatcccactcaatgtgctttttgtagaagatggcaaaatggagcgccaggtcttccttgcaacatggaaggatattcccaatgaaaatgaacttcagtttcagattaaggaatgtcatttaaatgctgacactgtttccagcaagttgcaaaacaacaatgtttatactattgccaagaggaatgtggaagggcaggacatgctgtaccaatccctgaagctcactaatggcatttggattttggccgaactacgtatccagccaggaaaccccaattacacgctgtcactgaagtgtagagctcctgaagtctctcaatacatctatcaggtctacgacagcattttgaaaaactaacaagactggtccagtacccttcaaccatgctgtgatcggtgcaagtcaagaactcttaactggaagaaattgtattgctgcgtagaatctgaacacactgaggccacctagcaaggtagtaactagtctaacctgtgctaacattagggcacaacctgttggatagttttagcttcctgtgaacatttgtaaccactgcttcagtcacctcccacctcttgccacctgctgctgctatctgtccttacttgtgggcttctccatgctgtgccaatggctggctttttctacaccctcttttgagtgtagtttggtattttgtaattgagagctcatttcaaaagcagaaaaagacaacaaatattaaagcaaggaaaagtgtaactg

SEQ ID NO: 1085 - DNA, 2621 bp, Homo sapiens
  source 1..2621: mol_type = unassigned DNA
attttaagttttcattgaagagtgagagaaactcggcttacggaccaggaaaactgagagtgctgcctggtggtggctaatgccgtagcggcattatctgaaatcagtgagtctcacccaaacagcaacttacttgatctgaacccacagaacattaataagctgctgacagccctgaatgaatgcactgaatggggccagattttcatcctggactgcctgtctaattacaaccctaaagatgatcgggaggctcagagcatctgtgagcgggtaactccccggctatcccatgccaactcagcagtggtgctttcagcggtaaaagtcctaatgaagtttctagaattgttacctaaggattctgactactacaatatgctgctgaagaagttagcccctccacttgtcactttgctgtctggggagccagaagtgcagtatgtcgccctgaggaacatcaacttaattgtccagaaaaggcctgaaatcttgaagcaggaaatcaaagtcttctttgtgaagtacaatgatcccatctatgttaaactagagaagttggacatcatgattcgtttggcatctcaagccaacattgctcaggttctggcagaactgaaagaatatgctacagaggtggatgttgactttgttcgaaaagctgtgcgggccattggacggtgtgccatcaaggtggagcaatctgcagagcgctgtgtaagcacattgcttgatctaatccagaccaaagtgaattatgtggtccaagaagcaattgttgtcatcagggacatcttccgcaaataccccaacaagtatgaaagtatcatcgccactctgtgtgagaacttagactcgctggatgagccagatgctcgagcagctatgatttggattgtgggagaatatgctgaaagaattgacaatgcagatgagttactagaaagcttcctggagggttttcacgatgaaagcacccaggtgcagctcactctgcttactgccatagtgaagctgtttctcaagaaaccatcagaaacacaggagctagtccagcaggtcttgagtttggcaacacaggattctgataatcctgaccttcgagaccggggctatatttattggcgccttctctcaactgaccctgttacagctaaagaagtagtcttgtctgagaagccactgatctctgaggagacggaccttattgagccaactctgctggatgagctaatctgccacattggttctttggcctctgtgtatcataagcctcccaatgcttttgtggaaggaagtcatggaattcatcgtaaacacttgccaattcatcatgggagcactgatgcaggtgacagccctgttggcactaccactgcaacgaacctggaacagcctcaggttatcccctctcaaggtgatcttctaggggatcttttaaaccttgacctcggtcccccagtcaatgtgccacaggtgtcctccatgcagatgggagcagtggatctcctaggaggaggactagatagtctgcttggcagtgaccttggcgggggcattggaggaagtccggcagtgggacaatccttcatcccatcatcggtgcctgcaacctttgctccttcacctacacctgctgtggtcagcagtggactgaatgacctgtttgaactctccacagggataggcatggcacctggtggatatgtggctcctaaggctgtctggctacctgcagtaaaggctaaaggcttggagatttccggaacatttactcaccgccaagggcacatctatatggaaatgaacttcaccaataaagctctgcagcacatgacagattttgcaatccagtttaacaaaaatagctttggtgtcatccccagcactcctctggccatccatacaccactgatgccaaaccagagcattgatgtctccctgcctctcaataccttgggcccagtcatgaagatggaacctctgaataacctccaggtggctgtgaaaaacaatatcgatgtcttctacttcagctgcctcatcccactcaatgtgctttttgtagaagatggcaaaatggagcgccaggtcttccttgcaacatggaaggatattcccaatgaaaatgaacttcagtttcagattaaggaatgtcatttaaatgctgacactgtttccagcaagttgcaaaacaacaatgtttatactattgccaagaggaatgtggaagggcaggacatgctgtaccaatccctgaagctcactaatggcatttggattttggccgaactacgtatccagccaggaaaccccaattacacgctgtcactgaagtgtagagctcctgaagtctctcaatacatctatcaggtctacgacagcattttgaaaaactaacaagactggtccagtacccttcaaccatgctgtgatcggtgcaagtcaagaactcttaactggaagaaattgtattgctgcgtagaatctgaacacactgaggccacctagcaaggtagtaactagtctaacctgtgctaacattagggcacaacctgttggatagttttagcttcctgtgaacatttgtaaccactgcttcagtcacctcccacctcttg

SEQ ID NO: 1086 - DNA, 1931 bp, Homo sapiens
  source 1..1931: mol_type = unassigned DNA
actgcggtgaaagccgaggcagcgggcagacgagcagggggcgggcggacatcttgggatccggagagtggccgggccggcagagcagggggccgaggacaccaggtctgttctcagagcgatgggccgcggagactgatctgccgccatgattggaggcttattcatctataatcacaagggggaggtgctcatctcccgagtctaccgagatgacatcgggaggaacgcagtggatgcctttcgggtcaatgttatccatgcccggcagcaggtgcgcagccccgtcaccaacattgctcgcaccagcttcttccacgttaagcggtccaacatttggctggcagcagtcaccaagcagaatgtcaacgctgccatggtcttcgaattcctctataagatgtgtgacgtgatggctgcctactttggcaagatcagcgaggaaaacatcaagaacaattttgtgctcatatatgagctgctggatgagattctagactttggctacccacagaattccgagacaggcgcgctgaaaaccttcatcacgcagcagggcatcaagagtcagcatcagacaaaagaagagcagtcacagatcaccagccaggtaactgggcagattggctggcggcgagagggtatcaagtatcgtcggaatgagctcttcctggatgtgctggagagtgtgaacctgctcatgtccccacaagggcaggtgctgagtgcccatgtgtcgggccgggtggtgatgaagagctacctgagtggcatgcctgaatgcaagtttgggatgaatgacaagattgttattgaaaagcagggcaaaggcacagctgatgaaacaagcaagagcgggaagcaatcaattgccattgatgactgcaccttccaccagtgtgtgcgactcagcaagtttgactctgaacgcagcatcagctttatcccgccagatggagagtttgagcttatgaggtatcgcacaaccaaggacatcatccttcccttccgggtgatcccgctagtgcgagaagtgggacgcaccaaactggaggtcaaggtggtcatcaagtccaactttaaaccctcactgctggctcagaagatcgaggtgaggatcccaaccccactgaacacaagcggggtgcaggtgatctgcatgaaggggaaggccaagtacaaggccagcgagaatgccatcgtgtggaagatcaagcgcatggcaggcatgaaggaatcgcagatcagcgcagagattgagcttctgcctaccaacgacaagaagaaatgggctcgaccccccatttccatgaactttgaggtgccattcgcgccctctggcctcaaggtgcgctacttgaaggtgtttgaaccgaagctgaactacagcgaccatgatgtcatcaaatgggtgcgctacattggccgcagtggcatttatgaaactcgctgctagctgccactaggcagctagcccacctccccagccaccctcctccacaggtccaggtgccgctccctcccccaccacacatcagtgtctcctccctcctgctttgctgccttccctttgcaccagcccgagtctaggtctgggccaagcacattacaagtgggaccggtggagcagcccctgggctccctgggcaggggagttctgaggctcctgctctcccatccacctgtctgtcctggcctaatgccaggctctgagttctgtgaccaaagccaggtgggttccctttccttcccacccctgtggccacagctctggagtgggagggttggttgcccctcacctcagagctcccccaaaggccagtaatggatccccggcctcagtccctactctgctttgggatagtgtgagcttcattttgtacacgtgtgacttcgtccagttacaaacccaataaactctgtagagtgga

SEQ ID NO: 1087 - DNA, 2091 bp, Homo sapiens
  source 1..2091: mol_type = unassigned DNA
cttcctgaggcgggggcggtttctcgaaggcagtcggtagttgtagttttgctaaacctagagcgcttcaaattgcaagcaaggaggccgcgaggcctgacgggatttgtagtcggcgctagacgccggcgcgcacgcgcagccggggccggggcggggcggcggcactgcggtgaaagccgaggcagcgggcagacgagcagggggcgggcggacatcttgggatccggagagtggccgggccggcagagcagggggccgaggacaccaggtctgttctcagagcgatgggccgcggagactgatctgccgccatgattggaggcttattcatctataatcacaagggggaggtgctcatctcccgagtctaccgagatgacatcgggaggaacgcagtggatgcctttcgggtcaatgttatccatgcccggcagcaggtgcgcagccccgtcaccaacattgctcgcaccagcttcttccacgttaagcggtccaacatttggctggcagcagtcaccaagcagaatgtcaacgctgccatggtcttcgaattcctctataagatgtgtgacgtgatggctgcctactttggcaagatcagcgaggaaaacatcaagaacaattttgtgctcatatatgagctgctggatgagattctagactttggctacccacagaattccgagacaggcgcgctgaaaaccttcatcacgcagcagggcatcaagagtcagacaaaagaagagcagtcacagatcaccagccaggtaactgggcagattggctggcggcgagagggtatcaagtatcgtcggaatgagctcttcctggatgtgctggagagtgtgaacctgctcatgtccccacaagggcaggtgctgagtgcccatgtgtcgggccgggtggtgatgaagagctacctgagtggcatgcctgaatgcaagtttgggatgaatgacaagattgttattgaaaagcagggcaaaggcacagctgatgaaacaagcaagagcgggaagcaatcaattgccattgatgactgcaccttccaccagtgtgtgcgactcagcaagtttgactctgaacgcagcatcagctttatcccgccagatggagagtttgagcttatgaggtatcgcacaaccaaggacatcatccttcccttccgggtgatcccgctagtgcgagaagtgggacgcaccaaactggaggtcaaggtggtcatcaagtccaactttaaaccctcactgctggctcagaagatcgaggtgaggatcccaaccccactgaacacaagcggggtgcaggtgatctgcatgaaggggaaggccaagtacaaggccagcgagaatgccatcgtgtggaagatcaagcgcatggcaggcatgaaggaatcgcagatcagcgcagagattgagcttctgcctaccaacgacaagaagaaatgggctcgaccccccatttccatgaactttgaggtgccattcgcgccctctggcctcaaggtgcgctacttgaaggtgtttgaaccgaagctgaactacagcgaccatgatgtcatcaaatgggtgcgctacattggccgcagtggcatttatgaaactcgctgctagctgccactaggcagctagcccacctccccagccaccctcctccacaggtccaggtgccgctccctcccccaccacacatcagtgtctcctccctcctgctttgctgccttccctttgcaccagcccgagtctaggtctgggccaagcacattacaagtgggaccggtggagcagcccctgggctccctgggcaggggagttctgaggctcctgctctcccatccacctgtctgtcctggcctaatgccaggctctgagttctgtgaccaaagccaggtgggttccctttccttcccacccctgtggccacagctctggagtgggagggttggttgcccctcacctcagagctcccccaaaggccagtaatggatccccggcctcagtccctactctgctttgggatagtgtgagcttcattttgtacacgtgtgacttcgtccagttacaaacccaataaactctgtagagtgga

SEQ ID NO: 1088 - DNA, 1950 bp, Homo sapiens
  source 1..1950: mol_type = unassigned DNA
ggaataaacaggaactggagcctggctgaggggaggggcatgtctgggagggctgcagggtcacttactaaagggttgagtcaggaaagaagctccagtgacctgcacagctccacaggggatgttggcagcgattctgaggtcttcttttaccctgcccccgcctgtcctaggtctgttctcagagcgatgggccgcggagactgatctgccgccatgattggaggcttattcatctataatcacaagggggaggtgctcatctcccgagtctaccgagatgacatcgggaggaacgcagtggatgcctttcgggtcaatgttatccatgcccggcagcaggtgcgcagccccgtcaccaacattgctcgcaccagcttcttccacgttaagcggtccaacatttggctggcagcagtcaccaagcagaatgtcaacgctgccatggtcttcgaattcctctataagatgtgtgacgtgatggctgcctactttggcaagatcagcgaggaaaacatcaagaacaattttgtgctcatatatgagctgctggatgagattctagactttggctacccacagaattccgagacaggcgcgctgaaaaccttcatcacgcagcagggcatcaagagtcagacaaaagaagagcagtcacagatcaccagccaggtaactgggcagattggctggcggcgagagggtatcaagtatcgtcggaatgagctcttcctggatgtgctggagagtgtgaacctgctcatgtccccacaagggcaggtgctgagtgcccatgtgtcgggccgggtggtgatgaagagctacctgagtggcatgcctgaatgcaagtttgggatgaatgacaagattgttattgaaaagcagggcaaaggcacagctgatgaaacaagcaagagcgggaagcaatcaattgccattgatgactgcaccttccaccagtgtgtgcgactcagcaagtttgactctgaacgcagcatcagctttatcccgccagatggagagtttgagcttatgaggtatcgcacaaccaaggacatcatccttcccttccgggtgatcccgctagtgcgagaagtgggacgcaccaaactggaggtcaaggtggtcatcaagtccaactttaaaccctcactgctggctcagaagatcgaggtgaggatcccaaccccactgaacacaagcggggtgcaggtgatctgcatgaaggggaaggccaagtacaaggccagcgagaatgccatcgtgtggaagatcaagcgcatggcaggcatgaaggaatcgcagatcagcgcagagattgagcttctgcctaccaacgacaagaagaaatgggctcgaccccccatttccatgaactttgaggtgccattcgcgccctctggcctcaaggtgcgctacttgaaggtgtttgaaccgaagctgaactacagcgaccatgatgtcatcaaatgggtgcgctacattggccgcagtggcatttatgaaactcgctgctagctgccactaggcagctagcccacctccccagccaccctcctccacaggtccaggtgccgctccctcccccaccacacatcagtgtctcctccctcctgctttgctgccttccctttgcaccagcccgagtctaggtctgggccaagcacattacaagtgggaccggtggagcagcccctgggctccctgggcaggggagttctgaggctcctgctctcccatccacctgtctgtcctggcctaatgccaggctctgagttctgtgaccaaagccaggtgggttccctttccttcccacccctgtggccacagctctggagtgggagggttggttgcccctcacctcagagctcccccaaaggccagtaatggatccccggcctcagtccctactctgctttgggatagtgtgagcttcattttgtacacgtg

SEQ ID NO: 1089 - DNA, 545 bp, Homo sapiens
  source 1..545: mol_type = unassigned DNA
gaggacaccaggtgagccggggatctggccttatggcgtggaggaggacgctgcgggtcgtctgcctcgccgcgcagctttgtcctgccctgcactgagctggcggaaagctgcccacacccgggagtggcttcagccttcggacccgggagctagctgacggtctgttctcagagcgatgggccgcggagactgatctgccgccatgattggaggcttattcatctataatcacaagggggaggtgctcatctcccgagtctaccgagatgacatcgggaggaacgcagtggatgcctttcgggtcaatgttatccatgcccggcagcaggtgcgcagccccgtcaccaacattgctcgcaccagcttcttccacgttaagcggtccaacatttggctggcagcagtcaccaagcagaatgtcaacgctgccatggtcttcgaattcctctataagatgtgtgacgtgatggctgcctactttggcaagatcagcgaggaaaacatcaagaacaattttgtgctcatatatgagctgctggatg

SEQ ID NO: 1090 - DNA, 1720 bp, Homo sapiens
  source 1..1720: mol_type = unassigned DNA
agcgggcagacgagcagggggcgggcggacatcttgggatccggagagtggccgggccggcagagcagggggccgaggacaccaggtctgttctcagagcgatgggccgcggagactgatctgccgccatgattggaggcttattcatctataatcacaagggggaggtgctcatctcccgagtctaccgagatgacatcgggaggaacgcagtggatgcctttcgggtcaatgttatccatgcccggcagcaggtgcgcagccccgtcaccaacatttggctggcagcagtcaccaagcagaatgtcaacgctgccatggtcttcgaattcctctataagatgtgtgacgtgatggctgcctactttggcaagatcagcgaggaaaacatcaagaacaattttgtgctcatatatgagctgctggatgagattctagactttggctacccacagaattccgagacaggcgcgctgaaaaccttcatcacgcagcagggcatcaagagtcagacaaaagaagagcagtcacagatcaccagccaggtaactgggcagattggctggcggcgagagggtatcaagtatcgtcggaatgagctcttcctggatgtgctggagagtgtgaacctgctcatgtccccacaagggcaggtgctgagtgcccatgtgtcgggccgggtggtgatgaagagctacctgagtggcatgcctgaatgcaagtttgggatgaatgacaagattgttattgaaaagcagggcaaaggcacagctgatgaaacaagcaagagcgggaagcaatcaattgccattgatgactgcaccttccaccagtgtgtgcgactcagcaagtttgactctgaacgcagcatcagctttatcccgccagatggagagtttgagcttatgaggtatcgcacaaccaaggacatcatccttcccttccgggtgatcccgctagtgcgagaagtgggacgcaccaaactggaggtcaaggtggtcatcaagtccaactttaaaccctcactgctggctcagaagatcgaggtgaggatcccaaccccactgaacacaagcggggtgcaggtgatctgcatgaaggggaaggccaagtacaaggccagcgagaatgccatcgtgtggaagatcaagcgcatggcaggcatgaaggaatcgcagatcagcgcagagattgagcttctgcctaccaacgacaagaagaaatgggctcgaccccccatttccatgaactttgaggtgccattcgcgccctctggcctcaaggtgcgctacttgaaggtgtttgaaccgaagctgaactacagcgaccatgatgtcatcaaatgggtgcgctacattggccgcagtggcatttatgaaactcgctgctagctgccactaggcagctagcccacctccccagccaccctcctccacaggtccaggtgccgctccctcccccaccacacatcagtgtctcctccctcctgctttgctgccttccctttgcaccagcccgagtctaggtctgggccaagcacattacaagtgggaccggtggagcagcccctgggctccctgggcaggggagttctgaggctcctgctctcccatccacctgtctgtcctggcctaatgccaggctctgagttctgtgaccaaagccaggtgggttccctttccttcccacccctgtggccacagctctggagtgggagggt

SEQ ID NO: 1091 - DNA, 1750 bp, Homo sapiens
  source 1..1750: mol_type = unassigned DNA
actgcggtgaaagccgaggcagcgggcagacgagcagggggcgggcggacatcttgggatccggagagtggccgggccggcagagcagggggccgaggacaccaggtctgttctcagagcgatgggccgcggagactgatctgccgccatgattggaggcttattcatctataatcacaagggggaggtgctcatctcccgagtctaccgagatgacatcgggaggaacgcagtggctgcctactttggcaagatcagcgaggaaaacatcaagaacaattttgtgctcatatatgagctgctggatgagattctagactttggctacccacagaattccgagacaggcgcgctgaaaaccttcatcacgcagcagggcatcaagagtcagcatcagacaaaagaagagcagtcacagatcaccagccaggtaactgggcagattggctggcggcgagagggtatcaagtatcgtcggaatgagctcttcctggatgtgctggagagtgtgaacctgctcatgtccccacaagggcaggtgctgagtgcccatgtgtcgggccgggtggtgatgaagagctacctgagtggcatgcctgaatgcaagtttgggatgaatgacaagattgttattgaaaagcagggcaaaggcacagctgatgaaacaagcaagagcgggaagcaatcaattgccattgatgactgcaccttccaccagtgtgtgcgactcagcaagtttgactctgaacgcagcatcagctttatcccgccagatggagagtttgagcttatgaggtatcgcacaaccaaggacatcatccttcccttccgggtgatcccgctagtgcgagaagtgggacgcaccaaactggaggtcaaggtggtcatcaagtccaactttaaaccctcactgctggctcagaagatcgaggtgaggatcccaaccccactgaacacaagcggggtgcaggtgatctgcatgaaggggaaggccaagtacaaggccagcgagaatgccatcgtgtggaagatcaagcgcatggcaggcatgaaggaatcgcagatcagcgcagagattgagcttctgcctaccaacgacaagaagaaatgggctcgaccccccatttccatgaactttgaggtgccattcgcgccctctggcctcaaggtgcgctacttgaaggtgtttgaaccgaagctgaactacagcgaccatgatgtcatcaaatgggtgcgctacattggccgcagtggcatttatgaaactcgctgctagctgccactaggcagctagcccacctccccagccaccctcctccacaggtccaggtgccgctccctcccccaccacacatcagtgtctcctccctcctgctttgctgccttccctttgcaccagcccgagtctaggtctgggccaagcacattacaagtgggaccggtggagcagcccctgggctccctgggcaggggagttctgaggctcctgctctcccatccacctgtctgtcctggcctaatgccaggctctgagttctgtgaccaaagccaggtgggttccctttccttcccacccctgtggccacagctctggagtgggagggttggttgcccctcacctcagagctcccccaaaggccagtaatggatccccggcctcagtccctactctgctttgggatagtgtgagcttcattttgtacacgtgtgacttcgtccagttacaaacccaataaactctgtagagtgg

SEQ ID NO: 1092 - DNA, 890 bp, Homo sapiens
  source 1..890: mol_type = unassigned DNA
atcttcacccaggctggcccctttggtgaaactacaactcccaggggtctgtgcgcgagaaggcaggcgggtttttctaccggaagtccgctctagctctgggccctacaactgcaccctgagccggagctgcccagtcgccgcgggaccggggccgctggggtctggacgggggtcgccatgatccgctttatcctcatccagaaccgggcaggcaagacgcgcctggccaagtggtacatgcagtttgatgatgatgagaaacagaagctgatcgaggaggtgcatgccgtggtcaccgtccgagacgccaaacacaccaactttgtggagttccggaactttaagatcatttaccgccgctatgctggcctctacttctgcatctgtgtggatgtcaatgacaacaacctggcttacctggaggccattcacaacttcgtggaggtcttaaacgaatatttccacaatgtctgtgaactggacctggtgttcaacttctacaaggtttacacggtcgtggacgagatgttcctggctggcgaaatccgagagaccagccagacgaaggtgctgaaacagctgctgatgctacagtccctggagtgagggcaggcgagccccaccccggccccggcccctcctggactcgcctgctcgcttccccttcccaggcccgtggccaacccagcagtccttccctcagctgcctaggaggaagggacccagctgggtctgggccacaagggaggagactgcaccccactgcctctgggccctggctgtgggcagaggccaccgtgtgtgtcccgagtaaccgtgccgttgtcgtgtgatgccataagcgtctgtgcgtggagtccccaataaacctgtggtcctgcctggcc

SEQ ID NO: 1093 - DNA, 776 bp, Homo sapiens
  source 1..776: mol_type = unassigned DNA
atcttcacccaggctggcccctttggtgaaactacaactcccaggggtctgtgcgcgagaaggcaggcgggtttttctaccggaagtccgctctagctctgggccctacaactgcaccctgagccggagctgcccagtcgccgcgggaccggggccgctggggtctggacgggggtcgccatgatccgctttatcctcatccagaaccgggcaggcaagacgcgcctggccaagtggtacatgcagtttgatgatgatgagaaacagaagctgatcgaggaggtgcatgccgtggtcaccgtccgagacgccaaacacaccaactttgtggaggtcttaaacgaatatttccacaatgtctgtgaactggacctggtgttcaacttctacaaggtttacacggtcgtggacgagatgttcctggctggcgaaatccgagagaccagccagacgaaggtgctgaaacagctgctgatgctacagtccctggagtgagggcaggcgagccccaccccggccccggcccctcctggactcgcctgctcgcttccccttcccaggcccgtggccaacccagcagtccttccctcagctgcctaggaggaagggacccagctgggtctgggccacaagggaggagactgcaccccactgcctctgggccctggctgtgggcagaggccaccgtgtgtgtcccgagtaaccgtgccgttgtcgtgtgatgccataagcgtctgtgcgtggagtccccaataaacctgtggtcctgcctggcc

SEQ ID NO: 1094 - DNA, 5838 bp, Homo sapiens
  source 1..5838: mol_type = unassigned DNA
actgcgcatgcgcagggggtggactgccaggtcggctcagggagccgtgacgagtccggaagcgcctgcgcgcgctcctccgtacgagaactagttttgttccgtgccctctggactggaaccttttggagagaacccccggcaggaccaaccccgcacccgccagcaccgcggcaatgtccagcaatagttttccttacaatgagcagtccggaggaggggaggcgacggagctgggtcaggaggcgacctcaaccatttccccctcgggggccttcggcctctttagcagcgatttgaagaagaatgaagatctaaagcaaatgttagagagcaacaaagattctgctaaactggatgctatgaagcggattgttgggatgattgcaaaagggaaaaatgcatctgaactgtttcctgctgttgtgaagaatgtggccagtaaaaatattgagatcaagaagttggtatatgtttacctggttcgatatgctgaagaacagcaggatcttgcactcctgtccataagcacttttcagcgagctctgaaggacccaaaccaactaattcgtgcaagcgctttgagagttctgtcaagtattagagtgccaattattgtacctatcatgatgcttgctattaaggaagcttctgctgacttatcaccatatgttaggaagaatgcagcccatgcaatacaaaaattatacagccttgatccagagcagaaggaaatgttaattgaagtaattgaaaaacttctgaaagataaaagcacattggtagctggcagtgttgtgatggcttttgaagaagtatgcccggacagaatagatctgattcataaaaattaccgcaagctatgtaacttactagtggatgttgaagagtgggggcaggttgtcataatccacatgctaactcgatatgctcggacacagtttgtcagcccttggaaagagggtgatgaattagaagacaatggaaagaatttctacgaatctgatgatgatcagaaggaaaagactgacaaaaagaagaagccgtatactatggatccagatcatagactcttaattagaaatacaaagcctttgcttcagagcaggaatgctgcggtggttatggcagttgctcagctgtattggcacatatcaccaaaatctgaagctggcataatttctaaatcactagtgcgtttacttcgtagcaatagggaggtgcagtatattgtcctacaaaatatagcaactatgtcaattcaaagaaaggggatgtttgaaccttatctgaagagtttctatgttaggtcaactgatccaactatgatcaagacactgaagcttgaaattttgacaaacttggcaaatgaagccaacatatcaactcttcttcgagaatttcagacctatgtgaaaagccaggataaacaatttgcagcagccactattcagactataggcagatgtgcaaccaacatcttggaagtcactgacacgtgcctcaatggcttggtctgtctgctgtccaacagggatgaaatagttgttgctgaaagtgtggttgttataaagaaattactgcaaatgcaacctgcacaacatggtgaaattattaaacatatggccaaactcctggacagtatcactgttcctgttgctagagcaagtattctttggctaattggagaaaactgtgaacgagttcctaaaattgcccctgatgttttgaggaagatggctaaaagcttcactagtgaagatgatctggtaaaactgcagatattaaatctgggagcaaaattgtatttaaccaactccaaacagacaaaattgcttacccagtacatattaaatctcggcaagtatgatcaaaactacgacatcagagaccgtacaagatttattaggcagcttattgttccgaatgtaaagagtggagctttaagtaaatatgccaaaaaaatattcctagcacaaaagcctgcaccactgcttgagtctccttttaaagatagagatcatttccagcttggcaccttatctcatactctcaacattaaagctactgggtacctggaattatctaattggccagaggtggcgcccgacccatcagttcgaaatgtagaagtaatagagttggcaaaagaatggaccccagcaggaaaagcaaagcaagagaattctgctaagaagttttattctgaatctgaggaagaggaggactcttctgatagtagcagtgacagtgagagtgaatctggaagtgaaagtggagaacaaggcgaaagtggggaggaaggagacagcaatgaggacagcagtgaggactcctccagtgagcaggacagtgagagtggacgggagtcaggcctagaaaacaaaagaacagccaagaggaactcaaaagccaaaggaaaaagtgattctgaagatggggagaaggaaaatgaaaaatctaaaacttcagattcttcaaatgacgaatctagttcaatagaagacagttcttccgattctgaatcagagtcagaacctgaaagtgaatctgaatccagaagagtcactaaggagaaagaaaagaaaacaaagcaagatagaactcctcttaccaaagatgtttcacttctagatctggatgattttaacccagtatccactccagttgcacttcccacaccagctctttctccaagtttgatggctgatcttgaaggtttacacttgtcaacttcctcttcagtcatcagtgtcagtactcctgcatttgtaccaacgaaaactcacgtgctgcttcatcgaatgagtggaaaaggactagctgcccattatttctttccaagacagccttgcatttttggtgataagatggtctctatacaaataacactgaataacactactgatcgaaagatagaaaatatccacataggggaaaaaaaacttcctataggcatgaaaatgcatgtttttaatccaatagactctcttgagcctgagggatccattacagtttcaatgggtattgacttttgtgattctactcagactgccagtttccagttgtgtaccaaggatgattgcttcaatgttaatattcagccacctgttggagaactgcttttacctgtggccatgtcagagaaagattttaagaaagagcaaggagtgctaacaggaatgaatgaaacttctgctgtaatcattgctgcaccacagaatttcactccctctgtgatctttcagaaggttgtaaatgtagccaatgtaggtgcagtcccttctggccaggataatatacacaggtttgcagctaaaactgtgcacagtgggtcattgatgctagtcacagtggaactgaaggaaggctctacagcccagcttatcataaacactgagaaaactgtgattggctctgttctgctgcgggaactgaagcctgtcctgtctcaggggtaacctgcttacatctggactttagaatctggcacacaacaaaagtgcctggcatccactactgctgcctttcatttataataatagcccttccatctggcagtgggggtagaatacactcttgacattcttgtctcctgctttagaatgctagtgtgtatctatcatgtatgcaatactttccccctttttgctttgctaaccaaagagcatatattttactgtcagttgtctcaactcttgaatccatgtggcgttttctctgtcctgctgcttcttttggcctcctcgttttccttctctttttcgacaatggtagacatgaatgagatatttaaagttcattggaaatcttcttccctacagcagtaagcaaaaattagcaaagagatagtctaaatggcctctcagcttggtatgtgaaaatgagatcacatactttttaaatccaaatacaaaagcatagtctctgcaagattttgttctttgaatttcttgatattgtaattgattattgataactgtcatcatgaaattatctctcaataataagataaataaactagcatatgaatcatatttgtctttgcatttttaatgagaaactattaataatcctgaagttcatatgctaaagttttcttattttaaagcaagtattttgagtgttacattatgcagagaagcaatgtggtttagttagcgaaagaaaaaccacttccaaaccaagtaaattttctacttatagtttactccaaggaaaaaaaattggtgtatttaataacaaaaacaaaaatcttcatattgcaaaataaacatcttctaggtagttttgatctattagtagatatctgattatgtggcctgctgaataaattctttgaatctcatttttccttatgcccaactttggaaactaactagcataaacttatagaaatgtttaaaactagttatatgatcaacctattagcatcttttcctagagtatttgttttatttgctaccttaagttactgttttcaaggttgttctataatcagagaacttttctaatactttcgtacctttttaaaaccagctgaaattttacttcctttttgaagcaaggtaatggactttcaggtagtataagctactcagttctttttgtatagagccacatacataatgatttttaaaaagtaaaaaggaagtgactgtacattgcttgaagcattataggaaggctgaaaagaaaagaatggaattttcttggaacatacatattgaaaagaacaaaacagagtcgaaaaattatttaaattttcaagctggtgggatgacaagagtaaacaaaattgttaaattttcctgctccagaaagaaatatagccctgaatctccgggaagagaatgtacagaagtgcaatgtacagaagccacgtgtacattttgtgccaattccgtaccatgtgtacattctgtaccattctgtaccaatgtatggaagccacgagttccacttccctctggagcctgggcgctgtggtaacacacccaaaagcccctttgtaatcgcaggtcgttggcatttccatattagccttattgctcagagcttcataactttgaattttaagtcaataactttttgaaatgtcagacagaatttgacaggtttaatacctgttttctgaggaagaaaaaaaaattatatccatgctgtcttcaggcagagggaaagtgcatgttgtgattgagaaaggtcttatttttccttaaattaggacactcatctttaaaagatagttcacacatttgtatttttttaaactaaggaaatttaattagggctttacttttgactaagttatttttggctgctaacttttaaaattatggtaaatcaataatataatgtagtatgaatcagtgaacagtatgtatcgattgtaatgtgcgctaccagttgaaaccattttaacactagtagcttaatatcattaaaatgtttttcacgtaaaacagaaaaacgaccaaagccccaagttaaaggtttggttttttttcttttgtggtgtggtgattcagagttccttgcctcatatttcctttaactttgtcataatccatgattatctttaaattgttccattgagtcgagttagtcaatgttgaattcttaattctagctatattttttcattttaatgttcacttaatgggacattttatgtacaccaatcttgaagaatggctctcatagtatatttcagactaagcctcatttttgatatcacaatacatttgctttatttattatgagagtttttttattctaaagagactgtaacaatgcatttctcaaattaaaatactgtatacttgtccttctcga

SEQ ID NO: 1095 - DNA, 1822 bp, Homo sapiens
  source 1..1822: mol_type = unassigned DNA
acgagtccggaagcgcctgcgcgcgctcctccgtacgagaactagttttgttccgtgccctctggactggaaccttttggagagaacccccggcaggaccaaccccgcacccgccagcaccgcggcaatgtccagcaatagttttccttacaatgagcagtccggaggaggggaggcgacggagctgggtcaggaggcgacctcaaccatttccccctcgggggccttcggcctctttagcagcgatttgaagaagaatgaagatctaaagcaaatgttagagagcaacaaagattctgctattaaggaagcttctgctgacttatcaccatatgttaggaagaatgcagcccatgcaatacaaaaattatacagccttgatccagagcagaaggaaatgttaattgaagtaattgaaaaacttctgaaagataaaagcacattggtagctggcagtgttgtgatggcttttgaagaagtatgcccggacagaatagatctgattcataaaaattaccgcaagctatgtaacttactagtggatgttgaagagtgggggcaggttgtcataatccacatgctaactcgatatgctcggacacagtttgtcagcccttggaaagagggtgatgaattagaagacaatggaaagaatttctacgaatctgatgatgatcagaaggaaaagactgacaaaaagaagaagccgtatactatggatccagatcatagactcttaattagaaatacaaagcctttgcttcagagcaggaatgctgcggtggttatggcagttgctcagctgtattggcacatatcaccaaaatctgaagctggcataatttctaaatcactagtgcgtttacttcgtagcaatagggaggtgcagtatattgtcctacaaaatatagcaactatgtcaattcaaagaaaggggatgtttgaaccttatctgaagagtttctatgttaggtcaactgatccaactatgatcaagacactgaagcttgaaattttgacaaacttggcaaatgaagccaacatatcaactcttcttcgagaatttcagacctatgtgaaaagccaggataaacaatttgcagcagccactattcagactataggcagatgtgcaaccaacatcttggaagtcactgacacgtgcctcaatggcttggtctgtctgctgtccaacagggatgaaatagttgttgctgaaagtgtggttgttataaagaaattactgcaaatgcaacctgcacaacatggtgaaattattaaacatatggccaaactcctggacagtatcactgttcctgttgctagagcaagtattctttggctaattggagaaaactgtgaacgagttcctaaaattgcccctgatgttttgaggaagatggctaaaagcttcactagtgaagatgatctggtaaaactgcagatattaaatctgggagcaaaattgtatttaaccaactccaaacagacaaaattgcttacccagtacatattaaatctcggcaagtatgatcaaaactacgacatcagagaccgtacaagatttattaggcagcttattgttccgaatgtaaagagtggagctttaagtaaatatgccaaaaaaatattcctagcacaaaagcctgcaccactgcttgagtctccttttaaagatagagatcatttccagcttggcaccttatctcatactctcaacattaaagctactgggtacctggaattatctaattggccagaggtggcgcccgacccatcagttcgaaatgtagaagtaatagagttggtagttttaagtgaa

SEQ ID NO: 1096 - DNA, 2527 bp, Homo sapiens
  source 1..2527: mol_type = unassigned DNA
acgagtccggaagcgcctgcgcgcgctcctccgtacgagaactagttttgttccgtgccctctggactggaaccttttggagagaacccccggcaggaccaaccccgcacccgccagcaccgcggcaatgtccagcaatagttttccttacaatgagcagtccggaggaggggaggcgacggagctgggtcaggaggcgacctcaaccatttccccctcgggggccttcggcctctttagcagcgatttgaagaagaatgaagatctaaagcaaatgttagagagcaacaaagattctgctaaactggatgctatgaagcggattgttgggatgattgcaaaagggaaaaatgcatctgaactgtttcctgctgttgtgaagaatgtggccagtaaaaatattgagatcaagaagttggtatatgtttacctggttcgatatgctgaagaacagcaggatcttgcactcctgtccataagcacttttcagcgagctctgaaggacccaaaccaactaattcgtgcaagcgctttgagagttctgtcaagtattagagtgccaattattgtacctatcatgatgcttgctattaaggaagcttctgctgacttatcaccatatgttaggaagaatgcagcccatgcaatacaaaaattatacagccttgatccagagcagaaggaaatgttaattgaagtaattgaaaaacttctgaaagataaaagcacattggtagctggcagtgttgtgatggcttttgaagaagtatgcccggacagaatagatctgattcataaaaattaccgcaagctatgtaacttactagtggatgttgaagagtgggggcaggttgtcataatccacatgctaactcgatatgctcggacacagtttgtcagcccttggaaagagggtgatgaattagaagacaatggaaagaatttctacgaatctgatgatgatcagaaggaaaagactgacaaaaagaagaagccgtatactatggatccagatcatagactcttaattagaaatacaaagcctttgcttcagagcaggaatgctgcggtggttatggcagttgctcagctgtattggcacatatcaccaaaatctgaagctggcataatttctaaatcactagtgcgtttacttcgtagcaatagggaggtgcagtatattgtcctacaaaatatagcaactatgtcaattcaaagaaaggggatgtttgaaccttatctgaagagtttctatgttaggtcaactgatccaactatgatcaagacactgaagcttgaaattttgacaaacttggcaaatgaagccaacatatcaactcttcttcgagaatttcagacctatgtgaaaagccaggataaacaatttgcagcagccactattcagactataggcagatgtgcaaccaacatcttggaagtcactgacacgtgcctcaatggcttggtctgtctgctgtccaacagggatgaaatagttgttgctgaaagtgtggttgttataaagaaattactgcaaatgcaacctgcacaacatggtgaaattattaaacatatggccaaactcctggacagtatcactgttcctgttgctagagcaagtattctttggctaattggagaaaactgtgaacgagttcctaaaattgcccctgatgttttgaggaagatggctaaaagcttcactagtgaagatgatctggtaaaactgcagatattaaatctgggagcaaaattgtatttaaccaactccaaacagacaaaattgcttacccagtacatattaaatctcggcaagtatgatcaaaactacgacatcagagaccgtacaagatttattaggcagcttattgttccgaatgtaaagagtggagctttaagtaaatatgccaaaaaaatattcctagcacaaaagcctgcaccactgcttgagtctccttttaaagatagagatcatttccagcttggcaccttatctcatactctcaacattaaagctactgggtacctggaattatctaattggccagaggtggcgcccgacccatcagttcgaaatgtagaagtaatagagttggcaaaagaatggaccccagcaggaaaagcaaagcaagagaattctgctaagaagttttattctgaatctgaggaagaggaggactcttctgatagtagcagtgacagtgagagtgaatctggaagtgaaagtggagaacaaggcgaaagtggggaggaaggagacagcaatgaggacagcagtgaggactcctccagtgagcaggacagtgagagtggacgggagtcaggcctagaaaacaaaagaacagccaagaggaactcaaaagccaaaggaaaaagtgattctgaagatggggagaaggaaaatgaaaaatctaaaacttcagattcttcaaatgacgaatctagttcaatagaagacagttcttccgattctgaatcagagtcagaacctgaaagtgaatctgaatccagaagagtcactaaggaa

SEQ ID NO: 1097 - DNA, 1730 bp, Homo sapiens
  source 1..1730: mol_type = unassigned DNA
atccgtaagtccttcccctccagcagcaattgaagtaggaagctgcaacacagactgcggctcctccgccatcttgcttggagacactcgagagcggaagtagcgactgagcgcgtgcagtgggcgtgcttttctccagggagcgtcgcaaaggaggcgccggagtagggggacgcaattacacagtgaaacttggtgttcccggctagtcattcaaatcgaagctgtcgcagacctctgaacgttagtaacgcaacatgtgtttctccgcgactacagacctcgggagaggagcggtgggcaacgtgtctgtgctcggtcgaatgcgcacactccagttaggccgctggctcggacctagaaatgtttccgctttccttagtgcctgccccgcccaggccccgccccttgggccccgcccgacggctcgggagcgcgcgcggtcgcgtgcgggagggggcgggtggggaaggatcgcaggcgagattacgaggcgaggctcgcgcgcccgcccccgccctggcccccagtgcccacccggtcggcccggcacagccatgatcaaggcgatcctaatcttcaacaaccacgggaagccgcggctctccaagttctaccagccctacagtgaagatacacaacagcaaatcatcagggagactttccatttggtatctaagagagatgaaaatgtttgtaatttcctagaaggaggattattaattggaggatctgacaacaaactgatttatagacattatgcaacgttatattttgtcttctgtgtggattcttcagaaagtgaacttggcattttagatctaattcaagtatttgtggaaacattagacaaatgttttgaaaatgtctgtgagctggatttgattttccatgtagacaaggttcacaatattcttgcagaaatggtgatggggggaatggtattggagacaaatatgaatgagattgttacacaaattgatgcacaaaataagctggaaaaatctgaggctggcttagcaggagctccagcccgtgctgtatcagctgtaaagaatatgaatcttcctgagatcccaagaaatattaacattggtgacatcagtataaaagtgccaaacctgccctcttttaaataaaaatgtaaaaaggccactcccaggtaaaatccagggggaagagtcatctaagtttaccatgcagttgtttaccaaaaatagaggaggagagtcttaacttttgctcttggatttaagtcaaggtactgtatagaagttgtgtaaaatcagtatgaaagttcaatgttgctgttcttgctcagtgattttaaagaaattgagtagttcctatgtgatttttttttttcttttctaaactgcattcctgtgcccacctacggcatgcctctatgtattggctactacagtgttttaaaaagtgtttcagatatttctctaattatgtacaacctaaaatgttggtgttttgtatggatcacaagtgcagcattccttaattccttctgctatatgtcacacagttgttatttggagaaccaagtatgtattgcatgaaaacattatgacttttttctcttagtttaaataaactccaaggtaactggacttctaaagcacctttctgtttgcctgatatctactttagcaataattttttttacaaccctctgactcaacaaagtaaataaaagtatattttatcactattaa

SEQ ID NO: 1098 - DNA, 1122 bp, Homo sapiens
  source 1..1122: mol_type = unassigned DNA
gccccgaggaggcccgcaccgcgtagccagtgaaggttggggagcaagcttatgcgggaaagagggagggggactccaggaaaagccgttgagaggaccatcacaacctgagcagcacaggttccagttacagccatcccttgtcataacttttgaactgtatttggaaaaatactggccaggaaagaaaaatgataaaatttttcctcatggtgaataaacaagggcagactcgactttctaagtactatgaacatgtggatattaataagcgtacacttctggaaacagaagtcataaagagctgtctctctcgatccaatgaacaatgctctttcattgaatataaggattttaagctgatatatcggcagtatgcagctctcttcattgtggttggagttaatgacactgagaacgagatggctatttatgaattcattcataactttgtggaagttttagatgagtatttcagccgagtgagtgaattagatgtatcctttttcaatactgttttccacagtacttggcaaatgcactctggtccttatcagacaaggtcttgctctgtcacccaggctggagtgcagaggtgcgatcatggctcactacaccctggatctcctgggctcaagtgatcctcctacctcagcctcccaagtagctgggactacaggaaccaattgatgaacttcccaaaatatgctcagccctggagccccagcagacttgcttttctccagacagttcatcattcaaaggagctgcctccaccacccccatctactgaatagccaggggagggcaccaatgaacagcacagtatgggagacacaccaactactcttcaaatcagtgcgtacctgctctacgcgtgaaggtacagaaaacctccacggccttttcagtatttggtgcctttaaagaggcctaaggacttagtttatttgggctagactggaatgcagcagtactgccttcaggcctggacagccaggggctcctcgggccctgtgctctagaaggcccattctatgtctgcttcgccagcaccctttccccatcatggggcagatgcccaccagccctcactatctactgcttgaccatcctctgact

SEQ ID NO: 1099 - DNA, 1491 bp, Homo sapiens
  source 1..1491: mol_type = unassigned DNA
gcaccgcgtagccagtgaaggttggggagcaagcttatgcgggaaagagggagggggactccaggaaaagccgttgagaggaccatcacaacctgagcagcacaggttccagttacagccatcccttgtcataacttttgaactgtatttggaaaaatactggccaggaaagaaaaatgataaaatttttcctcatggtgaataaacaagggcagactcgactttctaagtactatgaacatgtggatattaataagcgtacacttctggaaacagaagtcataaagagctgtctctctcgatccaatgaacaatgctctttcattgaatataaggattttaagctgatatatcggcagtatgcagctctcttcattgtggttggagttaatgacactgagaacgagatggctatttatgaattcattcataactttgtggaagttttagatgagtatttcagccgagtggaaccaattgatgaacttcccaaaatatgctcagccctggagccccagcagacttgcttttctccagacagttcatcattcaaaggagctgcctccaccacccccatctactgaatagccaggggagggcaccaatgaacagcacagtatgggagacacaccaactactcttcaaatcagtgcgtacctgctctacgcgtgaaggtacagaaaacctccacggccttttcagtatttggtgcctttaaagaggcctaaggacttagtttatttgggctagactggaatgcagcagtactgccttcaggcctggacagccaggggctcctcgggccctgtgctctagaaggcccattctatgtctgcttcgccagcaccctttccccatcatggggcagatgcccaccagccctcactatctactgcttgaccatcctctgacttcctgggcccctagaatttataaggtccctagatatcccagaacctgccaccatggcctctgcaagcctctcctccaccttcaccccaagactaggggcaggaatgataagaaggctgggtggtagctgggatgtcccacctacgtgcctggggagagaagcaagagcaggctggagtctctactttgtattcttgtgaggcacaaatataggctagaatccaggccccacaaatataggctagaatccggaatgttttcttgatttaaagacatctttagaccgggcacagtggctcacgccagtaatcccagcactttggagggctgaagcaggaggattgcttgaggccaggagtttgagaccagcctgggcaacatagggagacccagtctctacaaaaaaatttaaaaagccaggcattggtggtgtgtgcctatagtcccaactactagggaggctgaggtgggaggatcacttgagcctgggggactgaggctgcagtgagccatgattgtgctactgcactccaatctggcaacagagcgagaccttgtctttaaaaataaaaataaaaa

SEQ ID NO: 1100 - DNA, 2742 bp, Homo sapiens
  source 1..2742: mol_type = unassigned DNA
ggggaattaaggctggaactggagagggaggggtctgcggtcagtcggacgcggcgctggaaatccggcggaggacctagaagtagcgggagcgatctgtgggcggggcgaacggcctgccggccgacggctcccacatcaggacgagaaggagccctcgagttaccgtgggagctgtgggagctgccctgtgactcttaggaagatgccgtaccttggctccgaggacgtggtgaaggagctgaagaaggctctgtgcaatcctcacattcaagctgataggctgcgctaccggaatgtcatccagcgagtgattaggtacatgactcaaggcttggacatgtctggtgtttttatggaaatggtgaaggccagtgccactgtagatattgtccagaagaagttggtttatctgtacatgtgcacatatgctcccctgaaaccagatctggctctcctggccatcaatacgctgtgcaaagactgctcagaccccaatccaatggtgcgagggctggcgttacggagcatgtgtagcctcaggatgcctggtgtgcaggagtatatacaacagcctattctcaatggtctgcgggataaggcttcatatgtcaggagagtggcagtccttggatgtgccaagatgcataatcttcatggagactctgaagtagatggtgccctggtaaatgaattatacagtttgctgcgtgaccaggatccaattgtagttgtgaactgcttgaggtctctagaggaaattctgaaacaggaaggaggcgttgtcatcaataagcccattgctcaccatctcttaaatcgaatgtcaaaactggaccaatggggccaggctgaagtattgaactttctgctacgctaccaaccccgcagtgaggaagaactatttgacattctcaatctgttggatagtttcctcaagagcagtagcccaggtgtggtgatgggagctaccaaactttttctgatcttggcaaaaatgtttccccacgtacaaactgatgtccttgtgcgggtcaagggacctttgctagctgcctgttcttcagagagccgtgagctctgttttgttgctctttgtcatgtacgccagatcttgcatagtttaccaggtcactttagcagccactacaaaaagtttttttgctcctactcggagccccactacatcaaactacagaaagtggaggtgctgtgtgaactggtgaacgatgagaatgtgcagcaggtgctagaggagcttcgagggtactgcacggatgtgtctgcggactttgcacaggctgccatctttgccataggtggcattgccaggacttacacagatcaatgtgttcagattttaacagagttgctgggtcttcgacaagagcacattaccacagtggtggtgcagactttccgagacctggtttggttgtgtcctcagtgtactgaagctgtatgtcaggccctgcccggctgtgaagagaacattcaagatagtgaggggaagcaagcacttatttggctacttggtgtccatggggaaagaattcctaatgctccttatgtgttagaggactttgttgagaatgtgaagtcggaaacatttccagctgttaagatggagctgctcactgctttgctgcgccttttcctctcccgacctgctgagtgccaggacatgctaggacgtttgttgtattactgcatagaggaagaaaaagatatggctgtacgggaccgaggtctcttctattatcgcctcctcttagttggcattgatgaagttaagcggattctgtgtagccctaaatctgaccctactcttggacttttggaggatccggcagaaagacctgtgaatagctgggcctcagacttcaacacactggtgccagtgtatggcaaagcccactgggcaactatctctaaatgccagggggcagagcgttgtgacccagagcttcctaaaacttcatcctttgccgcatcaggacccttgattcctgaagagaacaaggagagggtacaagaactccctgattctggagccctcatgctagtccccaatcgccagcttactgctgattattttgagaaaacttggcttagccttaaagttgctcatcagcaagtgttgccttggcggggagaattccatcctgacaccctccagatggctcttcaagtagtgaacatccagaccatcgcaatgagtagggctgggtctcggccatggaaagcatacctcagtgctcaggatgatactggctgtctgttcttaacagaactgctattggagcctggaaactcagaaatgcagatctctgtgaaacaaaatgaagcaagaacggagacgctgaatagttttatttctgtattagaaactgtgattggaacaattgaagaaataaaatcataacagagtcttgttgcttgtctagagtaagatgaataactattacactttcttagtctttcctattagagctgccagtaagtccagataatatcagatacaaaggagagtggaaaatctagaaatcaggattcttaagtttttggccaaagaacattgattcattcctttcattcctattggcaattgaccccatttttcagtgatgatgttgtagaggttaatgttggtaaggagatgcgttgaggatgggatttggattatttcctaatcaattttaggaattgtgttagtaattaaagatggctgatgtgtggaaa

SEQ ID NO: 1101 - DNA, 1225 bp, Homo sapiens
  source 1..1225: mol_type = unassigned DNA
ggagtcgggactacgcttagcgctcgctcgcggggagaccggcagcggtcttctgtttggtctcttgacaagggggcgggacttccgcagaaagcaagattgggcctatccgcgatgagaacggcgtggagggggaattaaggctggaactggagagggaggggtctgcggtcagtcggacgcggcgctggaaatccggcggaggacctagaagtagcgggagcgatctgtgggcggggcgaacggcctgccggccgacggctcccacatcaggacgagaaggagccctcgagttaccgtgggagctgtgggagctgccctgtgactcttaggaagatgccgtaccttggctccgaggacgtggtgaaggagctgaagaaggctctgtgcaatcctcacattcaagctgataggctgcgctaccggaatgtcatccagcgagtgattaggatgcctggtgtgcaggagtatatacaacagcctattctcaatggtctgcgggataaggcttcatatgtcaggagagtggcagtccttggatgtgccaagatgcataatcttcatggagactctgaagtagatggtgccctggtaaatgaattatacagtttgctgcgtgaccaggatccaattgtagttgtgaactgcttgaggtctctagaggaaattctgaaacaggaaggaggcgttgtcatcaataagcccattgctcaccatctcttaaatcgaatgtcaaaactggaccaatggggccaggctgaagtattgaactttctgctacgctaccaaccccgcagtgaggaagaactatttgacattctcaatctgttggatagtttcctcaagagcagtagcccaggtgtggtgatgggagctaccaaactttttctgatcttggcaaaaatgtttccccacgtacaaactgatgtccttgtgcgggtcaagggacctttgctagctgcctgttcttcagagagccgtgagctctgttttgttgctctttgtcatgtacgccagatcttgcatagtttaccaggtcactttagcagccactacaaaaagtttttttgctcctactcggagccccactacatcaaactacagaaagtggaggtgctgtgtgaactggtgaacgatgagaatgtgcagcaggtgctagaggagcttcgagggtactgcacggatgtgtctgcggactttgcacaggctgccatctttgccatag

SEQ ID NO: 1102 - DNA, 1476 bp, Homo sapiens
  source 1..1476: mol_type = unassigned DNA
ctacggaagccgagcctgaggcgagatctcgccttttgtattttcactgactcatatttcctttactcaggctcccacatcaggacgagaaggagccctcgagttaccgtgggagctgtgggagctgccctgtgactcttaggaagatgccgtaccttggctccgaggacgtggtgaaggagctgaagaaggctctgtgcaatcctcacattcaagctgataggctgcgctaccggaatgtcatccagcgagtgattaggtacatgactcaaggcttggacatgtctggtgtttttatggaaatggtgaaggccagtgccactgtagatattgtccagaagaagttggtttatctgtacatgtgcacatatgctcccctgaaaccagatctggctctcctggccatcaatacgctgtgcaaagactgctcagaccccaatccaatggtgcgagggctggcgttacggagcatgtgtagcctcagaatgtcaaaactggaccaatggggccaggctgaagtattgaactttctgctacgctaccaaccccgcagtgaggaagaactatttgacattctcaatctgttggatagtttcctcaagagcagtagcccaggtgtggtgatgggagctaccaaactttttctgatcttggcaaaaatgtttccccacgtacaaactgatgtccttgtgcgggtcaagggacctttgctagctgcctgttcttcagagagccgtgagctctgttttgttgctctttgtcatgtacgccagatcttgcatagtttaccaggtcactttagcagccactacaaaaagtttttttgctcctactcggagccccactacatcaaactacagaaagtggaggtgctgtgtgaactggtgaacgatgagaatgtgcagcaggtgctagaggagcttcgagggtactgcacggatgtgtctgcggactttgcacaggctgccatctttgccataggtaggtgtctgctccttttccttcttgagaacctagaccagccagcaagaaaactgtggttagaggaaccatagagagcaaagggcatgaatcttgcttcagaagcaaagtactatgcactaaataattgggtcagtgactacaaacacgggggaagagagtttttttttgttttttgtttttttttggtcaagattggtgttgctgtatcttccaggatggagaatacaggtaacacaaactacaatacttaaaattgttgttgtcttctatccaaaatgctttcctatacatcatcttaccacagtatcgtgagacagtcaggaaaagtagacaaatgtcattaacttcattttaaagatgaagaaactcaggcacaaaaacagttatcaaattgccaaaagggcacatagttttagaaatgggactgaaatccagctttcctgactcaaagtcctatgttaatccaccagtcatttattgagcttctgctat

SEQ ID NO: 1103 - DNA, 2144 bp, Homo sapiens
  source 1..2144: mol_type = unassigned DNA
ttgtattttcactgactcatatttcctttactcaggctcccacatcaggacgagaaggagccctcgagttaccgtgggagctgtgggagctgccctgtgactcttaggaagatgccgtaccttggctccgaggacgtggtgaaggagctgaagaaggctctgtgcaatcctcacattcaagctgataggctgcgctaccggaatgtcatccagcgagtgattagaatgtcaaaactggaccaatggggccaggctgaagtattgaactttctgctacgctaccaaccccgcagtgaggaagaactatttgacattctcaatctgttggatagtttcctcaagagcagtagcccaggtgtggtgatgggagctaccaaactttttctgatcttggcaaaaatgtttccccacgtacaaactgatgtccttgtgcgggtcaagggacctttgctagctgcctgttcttcagagagccgtgagctctgttttgttgctctttgtcatgtacgccagatcttgcatagtttaccaggtcactttagcagccactacaaaaagtttttttgctcctactcggagccccactacatcaaactacagaaagtggaggtgctgtgtgaactggtgaacgatgagaatgtgcagcaggtgctagaggagcttcgagggtactgcacggatgtgtctgcggactttgcacaggctgccatctttgccataggtggcattgccaggacttacacagatcaatgtgttcagattttaacagagttgctgggtcttcgacaagagcacattaccacagtggtggtgcagactttccgagacctggtttggttgtgtcctcagtgtactgaagctgtatgtcaggccctgcccggctgtgaagagaacattcaagatagtgaggggaagcaagcacttatttggctacttggtgtccatggggaaagaattcctaatgctccttatgtgttagaggactttgttgagaatgtgaagtcggaaacatttccagctgttaagatggagctgctcactgctttgctgcgccttttcctctcccgacctgctgagtgccaggacatgctaggacgtttgttgtattactgcatagaggaagaaaaagatatggctgtacgggaccgaggtctcttctattatcgcctcctcttagttggcattgatgaagttaagcggattctgtgtagccctaaatctgaccctactcttggacttttggaggatccggcagaaagacctgtgaatagctgggcctcagacttcaacacactggtgccagtgtatggcaaagcccactgggcaactatctctaaatgccagggggcagagcgttgtgacccagagcttcctaaaacttcatcctttgccgcatcaggacccttgattcctgaagagaacaaggagagggtacaagaactccctgattctggagccctcatgctagtccccaatcgccagcttactgctgattattttgagaaaacttggcttagccttaaagttgctcatcagcaagtgttgccttggcggggagaattccatcctgacaccctccagatggctcttcaagtagtgaacatccagaccatcgcaatgagtagggctgggtctcggccatggaaagcatacctcagtgctcaggatgatactggctgtctgttcttaacagaactgctattggagcctggaaactcagaaatgcagatctctgtgaaacaaaatgaagcaagaacggagacgctgaatagttttatttctgtattagaaactgtgattggaacaattgaagaaataaaatcataacagagtcttgttgcttgtctagagtaagatgaataactattacactttcttagtctttcctattagagctgccagtaagtccagataatatcagatacaaaggagagtggaaaatctagaaatcaggattcttaagtttttggccaaagaacattgattcattcctttcattcctattggcaattgaccccatttttcagtgatgatgttgtagaggttaatgttggtaaggagatgcgttgaggatgggatttggattatttcctaatcaattttaggaattgtgttagtaattaaagatggctgatgtgtggaaa

SEQ ID NO: 1104 - DNA, 2818 bp, Homo sapiens
  source 1..2818: mol_type = unassigned DNA
ggacctagaagtagcgggagcgatctgtgggcggggcgaacggcctgccggccgacggtagggcctgaagagcctagggtggggctcgcggtgtcgcggagggcgtggaagtgtgtcagggccagcgtgccggccctacggaagccgagcctgaggcgagatctcgccttttgtattttcactgactcatatttcctttactcaggctcccacatcaggacgagaaggagccctcgagttaccgtgggagctgtgggagctgccctgtgactcttaggaagatgccgtaccttggctccgaggacgtggtgaaggagctgaagaaggctctgtgcaatcctcacattcaagctgataggctgcgctaccggaatgtcatccagcgagtgattaggtacatgactcaaggcttggacatgtctggtgtttttatggaaatggtgaaggccagtgccactgtagatattgtccagaagaagttggtttatctgtacatgtgcacatatgctcccctgaaaccagatctggctctcctggccatcaatacgctgtgcaaagactgctcagaccccaatccaatggtgcgagggctggcgttacggagcatgtgtagcctcaggatgcctggtgtgcaggagtatatacaacagcctattctcaatggtctgcgggataaggcttcatatgtcaggagagtggcagtccttggatgtgccaagatgcataatcttcatggagactctgaagtagatggtgccctggtaaatgaattatacagtttgctgcgtgaccaggatccaattgtagttgtgaactgcttgaggtctctagaggaaattctgaaacaggaaggaggcgttgtcatcaataagcccattgctcaccatctcttaaatcgaatgtcaaaactggaccaatggggccaggctgaagtattgaactttctgctacgctaccaaccccgcagtgaggaagaactatttgacattctcaatctgttggatagtttcctcaagagcagtagcccaggtgtggtgatgggagctaccaaactttttctgatcttggcaaaaatgtttccccacgtacaaactgatgtccttgtgcgggtcaagggacctttgctagctgcctgttcttcagagagccgtgagctctgttttgttgctctttgtcatgtacgccagatcttgcatagtttaccaggtcactttagcagccactacaaaaagtttttttgctcctactcggagccccactacatcaaactacagaaagtggaggtgctgtgtgaactggtgaacgatgagaatgtgcagcaggtgctagaggagcttcgagggtactgcacggatgtgtctgcggactttgcacaggctgccatctttgccataggtggcattgccaggacttacacagatcaatgtgttcagattttaacagagttgctgggtcttcgacaagagcacattaccacagtggtggtgcagactttccgagacctggtttggttgtgtcctcagtgtactgaagctgtatgtcaggccctgcccggctgtgaagagaacattcaagatagtgaggggaagcaagcacttatttggctacttggtgtccatggggaaagaattcctaatgctccttatgtgttagaggactttgttgagaatgtgaagtcggaaacatttccagctgttaagatggagctgctcactgctttgctgcgccttttcctctcccgacctgctgagtgccaggacatgctaggacgtttgttgtattactgcatagaggaagaaaaagatatggctgtacgggaccgaggtctcttctattatcgcctcctcttagttggcattgatgaagttaagcggattctgtgtagccctaaatctgaccctactcttggacttttggaggatccggcagaaagacctgtgaatagctgggcctcagacttcaacacactggtgccagtgtatggcaaagcccactgggcaactatctctaaatgccagggggcagagcgttgtgacccagagcttcctaaaacttcatcctttgccgcatcaggacccttgattcctgaagagaacaaggagagggtacaagaactccctgattctggagccctcatgctagtccccaatcgccagcttactgctgattattttgagaaaacttggcttagccttaaagttgctcatcagcaagtgttgccttggcggggagaattccatcctgacaccctccagatggctcttcaagtagtgaacatccagaccatcgcaatgagtagggctgggtctcggccatggaaagcatacctcagtgctcaggatgatactggctgtctgttcttaacagaactgctattggagcctggaaactcagaaatgcagatctctgtgaaacaaaatgaagcaagaacggagacgctgaatagttttatttctgtattagaaactgtgattggaacaattgaagaaataaaatcataacagagtcttgttgcttgtctagagtaagatgaataactattacactttcttagtctttcctattagagctgccagtaagtccagataatatcagatacaaaggagagtggaaaatctagaaatcaggattcttaagtttttggccaaagaacattgattcattcctttcattcctattggcaattgaccccatttttcagtgatgatgttgtagaggttaatgttggtaaggagatgcgttgaggatgggatttggattatttcctaatcaattttaggaattgtgttagtaattaaagatggctgatgtgtggaaa

SEQ ID NO: 1105 - DNA, 980 bp, Homo sapiens
  source 1..980: mol_type = unassigned DNA
tctgcggtcagtcggacgcggcgctggaaatccggcggaggacctagaagtagcgggagcgatctgtgggcggggcgaacggcctgccggccgacggtagggcctgaagagcctagggctcccacatcaggacgagaaggagccctcgagttaccgtgggagctgtgggagctgccctgtgactcttaggaagatgccgtaccttggctccgaggacgtggtgaaggagctgaagaaggctctgtgcaatcctcacattcaagctgataggctgcgctaccggaatgtcatccagcgagtgattaggtacatgactcaaggcttggacatgtctggtgtttttatggaaatggtgaaggccagtgccactgtagatattgtccagaagaagttggtttatctgtacatgtgcacatatgctcccctgaaaccagatctggctctcctggccatcaatacgctgtgcaaagactgctcagaccccaatccaatggtgcgagggctggcgttacggagcatgtgtagcctcaggatgcctggtgtgcaggagtatatacaacagcctattctcaatggtctgcgggataaggcttcatatgtcaggagagtggcagtccttggatgtgccaagatgcataatcttcatggagactctgaagtagatggtgccctggtaaatgaattatacagtttgctgcgtgaccaggatccaattgtagttgtgaactgcttgaggtctctagaggaaattctgaaacaggaaggaggcgttgtcatcaataagcccattgctcaccatctcttaaatcgaatgtcaaaactggaccaatggggccaggctgaagtattgaactttctgctacgctaccaaccccgcagtgaggaagaactatttgacattctcaatctgttggatagtttcctcaagagcagtagcccaggtgtggtgatgggagctaccaaactttttctgatcttgg

SEQ ID NO: 1106 - DNA, 681 bp, Homo sapiens
  source 1..681: mol_type = unassigned DNA
gcggcgctggaaatccggcggaggacctagaagtagcgggagcgatctgtgggcggggcgaacggcctgccggccgacggctcccacatcaggacgagaaggagccctcgagttaccgtgggagctgtgggagctgccctgtgactcttaggaagatgccgtaccttggctccgaggacgtggtgaaggagctgaagaaggctctgtgcaatcctcacattcaagctgataggctgcgctaccggaatgtcatccagcgagtgattagaatgtcaaaactggaccaatggggccaggctgaagtattgaactttctgctacgctaccaaccccgcagtgaggaagaactatttgacattctcaatctgttggatagtttcctcaagagcagtagcccaggtgtggtgatgggagctaccaaactttttctgatcttggcaaaaatgtttccccacgtacaaactgatgtccttgtgcgggtcaagggacctttgctagctgcctgttcttcagagagccgtgagctctgttttgttgctctttgtcatgtacgccagatcttgcatagtttaccaggtcactttagcagccactacaaaaagtttttttgctcctactcggagccccactacatcaaactacagaaagtggaggtgctgtgtgaactggtgaacgatgaga

SEQ ID NO: 1107 - DNA, 6758 bp, Homo sapiens
  source 1..6758: mol_type = unassigned DNA
aaaaacaggaagtgcctacggaggccgggccggcagcggcggccgggcatgaagccgggcggctacgggatcgcgggcggcggcggcatcgcgggcggcggcggcgatgagcgacatagtggagaagacgctgacggcgctgccgggactctttctgcagaaccagcccggtggtgggcccgcggccgccaaggcgtccttctcctcgaggctgggcagccttgtccgcggcatcacagccctcacctccaagcacgaagaagaaaaattaatccagcaggaactgagtagtctgaaagcgactgtttctgctcctactacaacactgaaaatgatgaaggaatgtatggtgagacttatatattgtgaaatgcttggatatgatgcttcctttggctatattcatgcaatcaagttagcccaacaaggaaacctcttagaaaaaagagtaggttatttggctgtttccttatttctacatgaaagtcatgaattattgcttctccttgtgaatacagttgtaaaggatctgcagagcactaacctagtagaagtgtgtatggcactgactgttgttagccagattttcccctgcgaaatgattccagctgttcttccattaatagaagataaacttcaacattctaaggagattgtacgaagaaaagctgttctggcattatacaaattccatctcattgctcctaatcaagtacaacatattcatattaagtttcggaaagcactttgtgacagagatgttggggtcatggctgcctccttgcatatatatcttagaatgattaaggagaattcatctggatataaagacttgactgggagttttgtaaccattttgaagcaagtagttggaggaaagctcccagtagaattcaattaccacagtgtgccagcaccatggttacaaattcagctcttgagaatactgggacttctaggaaaagatgatcaaaggacaagtgaattaatgtatgatgttcttgatgaatccttacgaagagctgagttaaatcacaatgtcacatatgctattttgtttgaatgtgtgcatacagtctattctatttatcctaaatcggaattacttgagaaggctgccaagtgcattggaaaatttgttctgtcacctaaaataaatctaaaatatttaggactgaaggctcttacctatgttatccaacaggatcctactctggctcttcaacaccagatgacaataattgaatgtttagatcatcctgatcccattattaaaagagagactctggaacttctttacagaattactaatgcacagaatataacagttattgtccagaaaatgcttgaatatttacatcagagcaaagaagagtatgtcatcgtcaatttggtcggcaaaatagcagagctggctgagaaatatgctcctgataatgcatggtttattcagacaatgaatgctgtgttttcagtaggaggagatgtaatgcatcctgatattcccaataactttctgagactactagcggaaggttttgatgatgaaacagaagatcagcaattaagactctatgcagttcagtcttatctcactttactggatatggaaaatgtgttctatccacagagatttcttcaagttatgagttgggtattaggggaatattcctacctcttagataaggaaacgccagaggaagttatagctaagctctacaagttacttatgaatgactctgtgtcttcagaaacaaaagcctggttaattgctgctgtgaccaaattgacatctcaggcgcactcttctaatacagttgagagattaatccatgaatttaccatatctttggatacttgtatgagacaacatgcatttgaattaaaacatttgcatgagaatgtggaacttatgaagagcttgcttccagttgacaggagttgtgaagacttggtggtagatgcttctttatcttttctggatggttttgtggctgaaggactcagtcagggtgcagcgccttacaaacctccccatcaacgccaggaggaaaagctttctcaggaaaaagttctcaattttgaaccatatggactctccttttcttcatctggcttcactggacgacagtctcctgctggcatttctcttggttcagatgtatctgggaatagtgctgagacaggactgaaagagacaaatagcttgaagctggaaggtataaagaaattgtgggggaaagaaggctatcttcccaagaaggaaagcaaaactggtgatgaaagtggagctctgcctgttcctcaagagagtataatggagaatgtagatcaagctataactaaaaaggatcaatctcaagttcttacccaatctaaagaggagaaagaaaagcagctgctggcatcatcattatttgttggtctaggatcagaaagtacaatcaacctgctgggaaaagcagatactgtctctcacaagttcagaaggaaatcaaaagtcaaagaagctaaaagtggcgaaacaaccagtactcataatatgacctgttcttcctttagttctttgtcaaatgtggcatatgaagatgattattattcgaatactttgcacgatacaggagacaaggaattaaagaaattttctctcacttcagaacttttggattctgagtcactcacagaactgcccttggttgagaaattctcatattgtagtctgtctacaccttcattgtttgctaataacaacatggaaatttttcaccctcctcaatctactgcagcctcagttgccaaggaaagctctttagcttcatcttttttggaagaaactactgaatacatacactcaaatgctatggaagtctgtaataatgaaactatatcagtgtcttcttataaaatttggaaagatgattgtttattgatggtctggtcagtcactaataagagtggtttggaattgaaaagtgctgacttagaaatttttcctgcagaaaatttcaaggtgactgagcaacctggatgctgtttgcctgtaatggaagcagaaagcaccaaaagctttcaatatagtgtgcagatagaaaaaccttttacagaaggaaatcttactggttttattagttatcatatgatggatactcattctgctcagctggaattttctgtaaacttatcactattagatttcattagaccattaaaaatctcaagtgacgactttgggaaactctggttatccttcgcaaatgatgtgaaacaaaatgtaaaaatgtcagaatctcaagctgcacttccttctgcactaaagactctgcaacagaaactaagactccatattattgagattataggcaatgaagggctattggcctgtcagctgctcccatccatcccctgcttactgcattgccgagttcatgcagatgtattagccctgtggttcagatcctcctgttctactcttcctgactatttactgtatcagtgtcaaaaggtgatggagggatcctagcagaagccctgctaaattttactccatcaagatcaatggtttacatagataaacttatttaccaaagtaaaaagaactcatggtacttctaatgaaaatggggattattacaagtgtggtttatatgttttctttgtgattcctggtcaagaaagatccccaaaactgtatccctaacctttaactcaggattgtacagtatgtttaggtccctcaaaaagtgacctaagctaatgttataaactgctaatgatttatatatcacttagtgtgtagagggactgaaaatatttattttgttataaataattttatagcacgtttactctagtgctagctaatttgtaataaagccaagtctcagttttctgcattaaatggaagggagacatgaaattgataatctcaaacttaattcatatttggctttggaatgtagtgtatggtttttggtagggaagtcaatattttcgattatgttttgcttagatcagtgttgaactaagttggcatagcacacactaacagttgtaggagatccatgagcatgctggatattgaggggatccaatctgtgatctattttttattatagataactgttacacataatttcagatcgtttggctgtaaaatttgtctgttttccacttggagttattttaaaattcaaagtaaatcactctattcttattttgaaaactcagagccattttatatagaaacaaaacccataagagcacacagtaacaaagcaaacagatacaaaaatgactttttagttatgacaaatattttagttggttactacttaggtccttttggcaaatgaaaatttgtgattagagtataaatggcaaaactatcttttcctggcctttgaatccactagtacttaatggatatagctgaagcagagactaagtataacatacaggttcttcagtaaaatatatcattttcatgttatagttatgcctgtgtggcctctgtcagaactattatcagtaaaagaggttaagcctatatatgaatgatggaccaaaaccttgaggttgtacattaactgaaatagtattttataaaatcttatggtgctgtggaaaatatttattatttcaccttttctgacacttcaccatggagactattcaggtaatacaattttaagtcattgcagttaatactctggttaattggtactgttaatcacccaggtcaggaattctgattttaggttatctcattaatcatggctgataaagaagctaaggggattctccagatctaatagatttcattagtcatttgtgtcgagtattcctccctaaaaacaaaagcagtattttctttctcaattaatttttaagttattcattaaaaaatatataacatcttaattttattcttttaaaaacatacagtgaagccttgctacaagagtcataagtgactggaatttcttgcataataggttcctccttttgaatagatcagattcatccccaggctctcagcagtgtcatgatgaaatgagtgtgctgacttcaggggtgtggtggacactggtagctagccttatcagctccctccttattcctacctctgtcagcagcatgcctcgccccttacctaattctgctgtgactctgacagagaggaagtgccttctcactttgcaaaggaatgcagcatgtcacaaaggaggtgctccaattttttgtgtccttacttccctatgtttgcctagttactgaggctaggtcgagtgtgaagcaataggtgtaagatgctgagagcacatggacagctaccagggagatctgttgcttggttacagggtgtattcatgagtggtagctgcagttgtcgtgagagacatgcttggcatacagagctgtctaatgggtgggagacatgtaatggtagatttagggctgggagcatgattttgggtctgcccaaaggaacatggtgtcacttttgttctttctgacccactaaataaaaagtagtgtaacagggtttcactggaatgtttattagaaagtttacactttttatatttttatgattttaaaaacaaacaataatagaaaaacagattttaaggaacttcagagcagtatatattctgtctaaactcactgaatattttaagttgtaaatcaggtgtccaccaacctttatttttgcattgcaggagatgtgactgtaaagtagggagtttttttttttgagacagagtttcacccttgttgcccaggctagagtgtaatggtgcaatctccgctcactgcaacctctgcctcccaggttcaagcgattctcctgcctcagcctccctagtagctgggattacaggcatgcaccaccacacccggctaatttttttatatttttagtagagacaaggtttctccatgttggtcaggctggtctcgaactcccgacctcaggtgatctgcccgcctcagcctcccaaagtgctgggattacaggcgtgagccactgcgcccggccaaattatttttgtgggtagattcattctctttacctaatagtcataatttagtcagtgaagggacaacatctggggtaagagctatggaggaggtgctcagctttgtgagttttgtgccaggcatctttgctgaaaatggagatggcagcaagtgtgaatctgggggaatataagggaagacagaaaagccttaagagtagacggaggaagaagggtaccagaatagtccctgtggaggcaggcagatcagagctcagggtttgaaagtgggcctgagtaagggtcctgctagagaaactgcagatggaagctgagcagttaccaactgctaatgtgccaagtataccaagcacagcatgtgtcctgtagaggagcattattttaaacaatgttctactatcatctaccaaaataattgtggtaaaagtgtagtattttattttttccttttatgtcagcaatattttaaaatattgatctgtttatcttatatttttatggataaatgtagtatttgcctcatgattgtgagccactgagagtgcactgaacctattcacatgtctttaagatgttttgctgtgttaaaattttaggagagaaaaatacaagtgaataattatttaataggcatttattactttattttggagttgaattctgtcatttgaaaaagttcagtaatgtaataaatacaaagtgatctgcactgtt

SEQ ID NO: 1108 - DNA, 1817 bp, Homo sapiens
  source 1..1817: mol_type = unassigned DNA
ggggtagtgcaggcgccgggtttcccgcggtccgagctggcgcgggcggaggagaatcgctcttaaagggccagcgcacacgcgttcttttgttccggggccgcagggcggggcaggcccgactttcgccgtcttcttgtctactctccagaacggccatgatttcccaattcttcattctgtcctccaagggggacccgctcatctacaaagacttccgcggggacagtggcggccgggatgtggccgagctcttctaccggaagctgacgggactgccaggagacgagtccccggttgtcatgcatcaccatggccgtcatttcattcacatcagacacagcggcctctatttggtggtcacaacttcagaaaacgtttctcccttcagcctcctagaactgctctccaggttggccacccttctgggcgattactgtggctccctgggcgaggggaccatctcccgcaatgtggctctggtatacgaactcctggatgaagtgctggactatggctatgtacagaccacatccacggagatgctgaggaatttcatccagacggaagctgtggtcagcaagcccttcagcctctttgacctcagcagcgttggcttgtttggggctgagacacaacagagcaaagtggcccccagcagtgcagccagccgccccgtcctgtccagtcgctctgaccagagccaaaagaatgaagtttttttggatgtggtcgagagattgtctgtactgatagcatctaatggatccctgctgaaggtggatgtgcagggagagattcggctcaagagcttccttcctagcggctctgagatgcgcattggcttgacggaagagttttgtgtggggaagtcagagctgagaggttatgggccaggaatccgggtcgatgaagtctcgtttcacagctctgtgaatctggacgaatttgagtctcatcgaatcctccgcttgcaaccacctcagggcgagctgactgtgatgcggtaccaactctccgatgacctcccctcaccgctccccttccggctcttcccctctgtgcagtgggaccgaggctcaggccggctccaggtttatctaaagttgcgatgtgacctgctctcaaagagccaagccctcaatgtcaggctgcacctccccctgcctcgaggggtggtcagcctgtctcaggagctgagcagcccagagcagaaggctgagctggcagagggagcccttcgctgggacctgcctcgggtgcaaggaggctctcaactctcaggccttttccagatggacgtcccagggcccccaggacctcccagccatgggctctccacctcggcctctcctctggggctgggccctgccagtctctccttcgagcttccccggcacacgtgctctggcctccaggtccgattcctcaggctggccttcaggccatgcggcaatgccaacccccacaagtgggtgcgacacctaagccacagcgacgcctatgtcattcggatctgaggctccccaaacgaggacacgacggccaaggtggcagtttgtcccacgggaggacagtcgtttcttttccagcctcctggccttcggactctgaatctgggcaggaagagtcctcagtcccaagaccaggagggggcaatgggcccagcctttctgtggtatctgatgcaggaaggactgcagtggatcagaacttacaaaccaaacttttattctgagaaactggctgtacaatatctaaaaagaaagtgacatgaaggaagcaatctacaacttccttccgcttagcgagcatgc

SEQ ID NO: 1109 - DNA, 1572 bp, Homo sapiens
  source 1..1572: mol_type = unassigned DNA
gcggggcaggcccgactttcgccgtcttcttgtctactctccagaacggccatgatttcccaattcttcattctgtcctccaagggggacccgctcatctacaaagacttccgcggggacagtggcggccgggatgtggccgagctcttctaccggaagctgacgggactgccaggagacgagtccccggttgtcatgcatcaccatggccgtcatttcattcacatcagacacagcggcctctatttggtggtcacaacttcagaaaacgtttctcccttcagcctcctagaactgctctccaggttggccacccttctgggcgattactgtggctccctgggcgaggggaccatctcccgcaatgtggctctggtatacgaactcctggatgaagtgctggactatggctatgtacagaccacatccacggagatgctgaggaatttcatccagacggaagctgtggtcagcaagcccttcagcctctttgacctcagcagcgttggcttgtttggggctgagacacaacagagcaaagtggcccccagcagtgcagccagccgccccgtcctgtccagtcgctctgaccagagccaaaagaatgaagtttttttggatgtggtcgagagattgtctgtactgatagcatctaatggatccctgctgaaggtggatgtgcagggagagattcggctcaagagcttccttcctagcggctctgagatgcgcattggcttgacggaagagttttgtgtggggaagtcagagctgagaggttatgggccaggaatccgggtcgatgaagtctcgtttcacagctctgtgaatctggacgaatttgagtctcatcgaatcctccgcttgcaaccacctcagggcgagctgactgtgatgcggtaccaactctccgatgacctcccctcaccgctccccttccggctcttcccctctgtgcagtgggaccgaggctcaggccggctccaggtttatctaaagttgcgatgtgacctgctctcaaagagccaagccctcaatgtcaggctgcacctccccctgcctcgaggggtggtcagcctgtctcaggagctgagcagcccagagcagaaggctgagctggcagagggagcccttcgctgggacctgcctcgggtgcaaggaggctctcaactctcaggccttttccagatggacgtcccagggcccccaggacctcccagccatgggctctccacctcggcctctcctctggggctgggccctgccagtctctccttcgagcttccccggcacacgtgctctggcctccaggtccgattcctcaggctggccttcaggccatgcggcaatgccaacccccacaagtgggtgcgacacctaagccacagcgacgcctatgtcattcggatctgaggctccccaaacgaggacacgacggccaagaggcctaacatcgtgtcccagctcagccaagcctgcgatggagccataacgagtcgtccagggcgtcttctcgtccacccagctctgtaaggggaaggaaataaactaagatgaaggggtctgaaagga

SEQ ID NO: 1110 - DNA, 2256 bp, Homo sapiens
  source 1..2256: mol_type = unassigned DNA
taaaagccaaaatggctgccccgaggaggcccgcaccgcgtagccagtgaaggttggggagcaagcttatgcgggaaagagggagggggactccaggaaaagccgttgagaggaccatcacaacctgagcagcacaggttccagttacagccatcccttgtcataacttttgaactgtatttggaaaaatactggccaggaaagaaaaatgataaaatttttcctcatggtgaataaacaagggcagactcgactttctaagtactatgaacatgtggatattaataagcgtacacttctggaaacagaagtcataaagagctgtctctctcgatccaatgaacaatgctctttcattgaatataaggattttaagctgatatatcggcagtatgcagctctcttcattgtggttggagttaatgacactgagaacgagatggctatttatgaattcattcataactttgtggaagttttagatgagtatttcagccgagtgagtgaattagatgtatcctttttcaatactgttttccacagtacttggcaaatgcactctggtccttatcaggaaccaattgatgaacttcccaaaatatgctcagccctggagccccagcagacttgcttttctccagacagttcatcattcaaaggagctgcctccaccacccccatctactgaatagccaggggagggcaccaatgaacagcacagtatgggagacacaccaactactcttcaaatcagtgcgtacctgctctacgcgtgaaggtacagaaaacctccacggccttttcagtatttggtgcctttaaagaggcctaaggacttagtttatttgggctagactggaatgcagcagtactgccttcaggcctggacagccaggggctcctcgggccctgtgctctagaaggcccattctatgtctgcttcgccagcaccctttccccatcatggggcagatgcccaccagccctcactatctactgcttgaccatcctctgacttcctgggcccctagaatttataaggtccctagatatcccagaacctgccaccatggcctctgcaagcctctcctccaccttcaccccaagactaggggcaggaatgataagaaggctgggtggtagctgggatgtcccacctacgtgcctggggagagaagcaagagcaggctggagtctctactttgtattcttgtgaggcacaaatataggctagaatccaggccccacaaatataggctagaatccggaatgttttcttgatttaaagacatctttagaccgggcacagtggctcacgccagtaatcccagcactttggagggctgaagcaggaggattgcttgaggccaggagtttgagaccagcctgggcaacatagggagacccagtctctacaaaaaaatttaaaaagccaggcattggtggtgtgtgcctatagtcccaactactagggaggctgaggtgggaggatcacttgagcctgggggactgaggctgcagtgagccatgattgtgctactgcactccaatctggcaacagagcgagaccttgtctttaaaaataaaaataaaaacatctttacaacattcctgtttgtattttataaactcaaaatctcaaagactgagcagttgattctagagccctaaagctctggtgggttgtgtgaaaaaaccctgattcatgtcccttctattgcagttgagggtgggacataggaagggcatcaatgctgtgtgcactctctgtgactccgccagcatctgccatggtgcttcctggagaatgatggtgtgcaggcaacagtgatcagcaccaccatggtttgcagacaggcctcgatcaggcccactgtgggcatctacctctagttccatcagcttcctaaaatctgaaatacttttagagatccggaaaccagaatagggtttctccaagtgggagataatgtcagcctgatttaatgagaaattgcaaaaatacttgttcaaactgaggctataggaataccagccagaagaacaaacaaattcttcagggaagcatccagcactgaagtggcagcttctaaatgaactgaaattttctgcatgttctctcagaaagttacagtgttaattaattaataaaatcattacaaaagaatttcttccgaggtatgatggagcatgtgatgacttcaggaatggcttgatttgtttgtttgtttgtttgtttgttttttgagacagtct

SEQ ID NO: 1111 - DNA, 817 bp, Homo sapiens
  source 1..817: mol_type = unassigned DNA
gtaagatgcctatcctagtccctctcttcgggctcttcatctcaagaggaacaaacaagagcaaactcagtgttgagaggccccaaaccggactctcccacagagaggtgctcggtcccaagccccggaggcccgggaaggccgcctccggaggagcccccgcagacgccatactaaaagccaaaatggctgccccgaggaggcccgcaccgcgtagccagtgaaggttggggagcaagcttatgcgggaaagagggagggggactccaggaaaagccgttgagaggaccatcacaacctgagcagcacaggttccagttacagccatcccttgtcataacttttgaactgtatttggaaaaatactggccaggaaagaaaaatgataaaatttttcctcatggtgaataaacaagggcagactcgactttctaagtactatgaacatgtggatattaataagcgtacacttctggaaacagaagtcataaagagctgtctctctcgatccaatgaacaatgctctttcattgaatataaggattttaagctgatatatcggcagtatgcagctctcttcattgtggttggagttaatgacactgagaacgagatggctatttatgaattcattcataactttgtggaagttttagatgagtatttcagccgagtggtaaaagggcatataatgtttaatttggataaagtacacatcattttggatgagatggtgttaaatggctgcattgtggaaactaacagggcaagaattcttgcccctctactaattcttgataagatgtcagaaagctga

SEQ ID NO: 1112 - DNA, 1405 bp, Homo sapiens
  source 1..1405: mol_type = unassigned DNA
ggaaaaggggggtaagatgcctatcctagtccctctcttcgggctcttcatctcaagaggaacaaacaagagcaaactcagtgttgagaggccccaaaccggactctcccacagagaggtgctcggtcccaagccccggaggcccgggaaggccgcctccggaggagcccccgcagacgccatactaaaagccaaaatggctgccccgaggaggcccgcaccgcgtagccagtgaaggttggggagcaagcttatgcgggaaagagggagggggactccaggaaaagccgttgagaggaccatcacaacctgagcagcacaggttccagttacagccatcccttgtcataacttttgaactgtatttggaaaaatactggccaggaaagaaaaatgataaaatttttcctcatggtgaataaacaagggcagactcgactttctaagtactatgaacatgtggatattaataagcgtacacttctggaaacagaagtcataaagagctgtctctctcgatccaatgaacaatgctctttcattgaatataaggattttaagctgatatatcggcagtatgcagctctcttcattgtggttggagttaatgacactgagaacgagatggctatttatgaattcattcataactttgtggaagttttagatgagtatttcagccgagtgagtgaattagatataatgtttaatttggataaagtacacatcattttggatgagatggtgttaaatggctgcattgtggaaactaacagggcaagaattcttgcccctctactaattcttgataagatgtcagaaagctgaaaggaagtctcttcgagacaatatggatttatcagaaatgcgagtaccgtggaatacatctcaacatgttaacccagaagaatctggaagaccacaattacaaaatggggtatccttccaaagacattataaataggcattttccacagttcctaaaaagaaaacacaactgtactttaaaatatgtacaaagaaaaaaatttctttaaactgagagagaagttttattttctaattgtaaacatatctgtcgcactttaaattctgttgagcacctaaggaacccttcttggtctatgcttcttttgcaaattgaattcaggaatagcaggatggtagtgggaagaaagtatggcagttttccgtcagccaataaagttttaaaatttaaacacaaggcattttgagtaacgctgttttctgaaagctatttttttttttttgagacggagtctagtctagctgtgtcacctggcacattctcggctcactgcaacctccacttccggggttcaagcgattctcctgcctcagcctccgagctgggactacaggcatgcaccaccacacctggcta

SEQ ID NO: 1113 - DNA, 769 bp, Homo sapiens
  source 1..769: mol_type = unassigned DNA
gccgcagctaccggacacctgggctccgactctgacttttggaagcgaggcggccttaggcttcctggttatcagtttccttttagcaggccgtccccgggcgctgtttccttcccaggggtctctcacccgtgtcccggctttctgagctggttgttaacctggctggtcgctctggccgaccgcatcccgtctcggattcctgacgtttctttttcattctttgagtgtttcaggcagtcccaagggtgggccctctttcccttcctgtcactcgctctgcctctggtttcttagaaccagtcagttctctgctggcaaatagccaagatcctccggctgtggttactgattcctcgtctctgtcttgagcctgggctttggtcccatttctatgcgctcggtcgcccgtcgtaacttattccactttgcgtcccctcttctttccttttctggaatgggttgtgggggggttgggagagggggaggagcgattttttttttcttgggagaagaagaggtagtgaattcctttagatcttgacgatgatgggtagagggagagaagtttgaaggagactggctagactaacaatttgatacggtagaaatgaatgggctcacaaatattgtcatcaatagactattttgatcgaaacagaaaataaaagcactgttccagttacagccatcccttgtcataacttttgaactgtatttggaaaaatactggccaggaaagaaaaatgataaaatttttcctcatggt

SEQ ID NO: 1114 - DNA, 542 bp, Homo sapiens
  source 1..542: mol_type = unassigned DNA
atactaaaagccaaaatggctgccccgaggaggcccgcaccgcgtagccagtgaaggttggggagcaagcttatgcgggaaagagggagggggactccaggaaaagccgttgagaggaccatcacaacctgagcagcacagtgaagaaagaaagctgaagagctcttggtcacttcagttccagttacagccatcccttgtcataacttttgaactgtatttggaaaaatactggccaggaaagaaaaatgataaaatttttcctcatggtgaataaacaagggcagactcgactttctaagtactatgaacatgtggatattaataagcgtacacttctggaaacagaagtcataaagagctgtctctctcgatccaatgaacaatgctctttcattgaatataaggattttaagctgatatatcggcagtatgcagctctcttcattgtggttggagttaatgacactgagaacgagatggctatttatgaattcattcataactttgtggaagttttagatgagtatttcagccgagtg

SEQ ID NO: 1115 - DNA, 663 bp, Homo sapiens
  source 1..663: mol_type = unassigned DNA
aaatctcttcagtcgtttcataaatacagcatcgatcgtctggtttggtttttttatagataaagaaacggatgggggaaaggagatctagtggagagtactgtaaaaagaaaaattcagtgctgaaagcgttgatgagtcactaagtaaggaataactacagagaatccaagtgagtaaggcagcatctcaggttccagttacagccatcccttgtcataacttttgaactgtatttggaaaaatactggccaggaaagaaaaatgataaaatttttcctcatggtgaataaacaagggcagactcgactttctaagtactatgaacatgtggatattaataagcgtacacttctggaaacagaagtcataaagagctgtctctctcgatccaatgaacaatgctctttcattgaatataaggattttaagctgatatatcggcagtatgcagctctcttcattgtggttggagttaatgacactgagaacgagatggctatttatgaattcattcataactttgtggaagttttagatgagtatttcagccgagtgagtgaattagatataatgtttaatttggataaagtacacatcattttggatgagatggtgttaaatggctgcattgtggaaactaacagggcaagaattcttgcc

SEQ ID NO: 1116 - DNA, 6591 bp, Homo sapiens
  source 1..6591: mol_type = unassigned DNA
atgggggttgtgaattttgtgttcagagcgtcagaggacttgcaggtattagaaaactactcggatgctccaatgacaccaaaacagattctgcaggtcatagaggcagaaggactaaaggaaatgagtgggacttcccctctcgcatgcctcaatgctatgctacattccaattcaagaggaggagaggggttgttttataaactgcctggccgaatcagccttttcacgctcaagaaggatgccctgcagtggtctcgccatccagctacagtggagggagaggagccagaggacacggctgatgtggagagctgtgggtctaatgaagccagcactgtgagtggtgaaaacgatgtatctcttgatgaaacatcttcgaacgcatcctgttctacagaatctcagagtcgacctctttccaatcccagggacagctacagagcttcctcacaggcgaacaaacaaaagaaaaagactggggtgatgctgcctcgagttgtcctgactcctctgaaggtaaacggggcccacgtggaatctgcatcagggttctcgggctgccacgccgatggcgagagcggcagcccgtccagcagcagcagcggctctctggccctgggcagcgctgctattcgtggccaggccgaggtcacccaggaccctgccccgctcctgagaggcttccggaagccagccacaggtcaaatgaagcgcaacagaggggaagaaatagattttgagacacctgggtccattcttgtcaacaccaacctccgtgccctgatcaactctcggaccttccatgccttaccatcacacttccagcagcagctcctcttcctcctgcctgaagtagacagacaggtggggacggatggcctgttgcgtctcagcagcagtgcactaaataacgagttttttacccatgcggctcagagctggcgggagcgcctggctgatggtgaatttactcatgagatgcaagtcaggatacgacaggaaatggagaaggaaaagaaggtggaacaatggaaagaaaagttctttgaagactactatggacagaagctgggtttgaccaaagaagagtcattgcagcagaacgtgggccaggaggaggctgaaatcaaaagtggcttgtgtgtcccaggagaatcagtgcgtatacagcgtggtccagccacccgacagcgagatgggcattttaagaaacgctctcggccagatctccgaaccagagccagaaggaatctgtacaaaaaacaggagtcagaacaagcaggggttgctaaggatgcaaaatctgtggcctcagatgttcccctctacaaggatggggaggctaagactgacccagcagggctgagcagtccccatctgccaggcacatcctctgcagcacccgacctggagggtcccgaattcccagttgagtctgtggcttctcggatccaggctgagccagacaacttggcacgtgcctctgcatctccagacagaattcctagcctgcctcaggaaactgtggatcaggaacccaaggatcagaagaggaaatcctttgagcaggcggcctctgcatcctttcccgaaaagaagccccggcttgaagatcgtcagtcctttcgtaacacaattgaaagtgttcacaccgaaaagccacagcccactaaagaggagcccaaagtcccgcccatccggattcaactttcacgtatcaaaccaccctgggtggttaaaggtcagcccacttaccagatatgcccccggatcatccccaccacggagtcctcctgccggggttggactggcgccaggaccctcgcagacattaaagcccgtgctctgcaggtccgaggggcgagaggtcaccactgccatagagaggcggccaccactgccatcggaggggggggtggcccgggtggaggtggcggcggggccaccgatgagggaggtggcagaggcagcagcagtggtgatggtggtgaggcctgtggccaccctgagcccaggggaggcccgagcacccctggaaagtgtacgtcagatctacagcgaacacaactactgccgccttatcctctaaatggggagcatacccaggccggaactgccatgtccagagctaggagagaggacctgccttctctgagaaaggaggaaagctgcctactacagagggctacagttggactcacagatgggctaggagatgcctcccaactccccgttgctcccactggggaccagccatgccaggccttgcccctactgtcctcccaaacctcagtagctgagagattagtggagcagcctcagttgcatccggatgttagaactgaatgtgagtctggcaccacttcctgggaaagtgatgatgaggagcaaggacccaccgttcctgcagacaatggtcccattctgtctctagtgggagatgatacattagagaaaggaactggccaagctcttgacagtcatcccactatgaaggatcctgtaaatgtgacccccagttccacacctgaatcctcaccgactgattgcctgcagaacagagcatttgatgacgaattagggcttggtggctcatgccctcctatgagggaaagtgatactagacaagaaaacttgaaaaccaaggctctcgtttctaacagttctttgcattggatacccatcccatcgaatgatgaggtagtgaaacagcccaaaccagaatccagagaacacataccatctgttgagccccaggttggagaggagtgggagaaagctgctcccacccctcctgcattgcctggggatttgacagctgaggagggtctagatcctcttgacagccttacttcactctggactgtgccatctcgaggaggcagtgacagcaatggcagttactgtcaacaggtggacattgaaaagctgaaaatcaacggagactctgaagcactgagtcctcacggtgagtccacggatacagcctctgactttgaaggtcacctcacggaggacagcagtgaggctgacactagagaagctgcagtgacaaagggatcttcggtggacaaggatgagaaacccaattggaaccaatctgccccactgtccaaggtgaatggtgacatgcgtctggttacaaggacagatgggatggttgctcctcagagctgggtgtctcgagtatgtgcggtccgccaaaagatcccagattccctactgctggccagtactgagtaccagccaagagccgtgtgcctgtccatgcctgggtcctcagtggaggccactaacccacttgtgatgcagttgctgcagggtagcttgcccctagagaaggttcttccaccagcccacgatgacagcatgtcagaatccccacaagtaccacttacaaaagaccagagccatggctcgctacgcatgggatctttacatggtcttggaaaaaacagtggcatggttgatggaagcagccccagttctttaagggctttgaaggagcctcttctgccagatagctgtgaaacaggcactggtcttgccaggattgaggccacccaggctcctggagcaccccaaaagaattgcaaggcagtcccaagttttgactccctccatccagtgacaaatcccattacatcctctaggaaactggaagaaatggattccaaagagcagttctcttcctttagttgtgaagatcagaaggaagtccgtgctatgtcacaggacagtaattcaaatgctgctccaggaaagagcccaggagatcttactacctcgagaacacctcgtttctcatctccaaatgtgatctcctttggtccagagcagacaggtcgggccctgggtgatcagagcaatgttacaggccaagggaagaagctttttggctctgggaatgtggctgcaacccttcagcgccccaggcctgcggacccgatgcctcttcctgctgagatccctccagtttttcccagtgggaagttgggaccaagcacaaactccatgtctggtggggtacagactccaagggaagactgggctccaaagccacatgcctttgttggcagcgtcaagaatgagaagacttttgtggggggtcctcttaaggcaaatgccgagaacaggaaagctactgggcatagtcccctggaactggtgggtcacttggaagggatgccctttgtcatggacttgcccttctggaaattaccccgagagccagggaaggggctcagtgagcctctggagccttcttctctcccctcccaactcagcatcaagcaggcattttatgggaagctttctaaactccaactgagttccaccagctttaattattcctctagctctcccacctttcccaaaggccttgctggaagtgtggtgcagctgagccacaaagcaaactttggtgcgagccacagtgcatcactttccttgcaaatgttcactgacagcagcacggtggaaagcatctcgctccagtgtgcgtgcagcctgaaagccatgatcatgtgccaaggctgcggtgcgttctgtcacgatgactgtattggaccctcaaagctctgtgtattgtgccttgtggtgagataataaattatggccatgggaaacattgtatatttagtgtgtgtattttgataatgattgatcttaaatctgtatacagaatatcattgatataatactctttaggcaggagcactcttgccttcccccaaaatttacactgctaaagccctctgtcacttggcgacccttctggtcttgctggaggggtttcctgggtataacccattgggctgcccaaggccagccagcctgagctctcctgcaagacagagcctgatgtggcacggagtggggttgcggggggtggggggactgcctgactcccagagggacttgaaactgaagcaagaaggttgcattctccaccaagggagttaacctacctgaactaagtagaaatgccagtcttccactaccccctccctgccatcttttcttctgctactttggggagttgatggccaggaaagaagccagcacagggttaaagtaactcctggcattgcccaccagggggctggtgcacctgctgacctcagggtcacagttgagtcatttgccagttgacggagcaagtttgaccttggttctgttgctgaagcaaatttggaacttttctgtctcagtgtgatccactaacccacaggatcatttggaaccttgaatagctctgcttggacaatggggttggggaatagggttgtctttcctatgaaaatgccatctgtagaccttgtgagtcagccgtccagatgtttgcaggtgaattcctctgcttgacatcctccctgtcactttggaccctatgggagtgggcatctccacgcacctgtgtatgtgaaagtcattttacatttcaaagcagtgtgtgtttcttatttttatatttttaactctttattcttggatgtataaagtgaactttttggcttctgtaagtatgctctatgcacctctaatgttttatcatgtatttatatgttgtacacagtactggctgattctgtaaatggatgtattgtacagagaacatgaacgtctcttcctaattttacatcttcagcatcattgcattaaagtggtgtaatctccttctctacatctgttgtcagagccactgagtgctgtgctgctcgacgtgagggtgaaatgattgacttgtgacctgccaggttgcccgatgccctgttgggtcaccggctggacctgctgcagcctgcagagccacagtcagcctgcccacatgccaccgagcaaacgcatcttgcttttcacatctctcctcctacagccttaatggctgcttgctgccatatgtgacaaatcaccaccaccagtgttaagtgcttctggattcatgggtgagttccctgggcagcccccaggaaggccttccagatctggctccagggtcaccacctgtcacagcaatacctgggaccatgctctcctgggactgtgaggctccttttgacgtacttttgacatcaggcaggtttgggaagaaacaaagccatgcctgctcctgcctctctcccaacatgtttccagcaagtagatgcccctgtgtgtgttttcccttgccttgtttcctgccttatatcttgtatttcgacttattacagagttgagggttcttgcttaatttagatcaagtataaaatttgtatgacttcaagtctcattttatctgaaaggtttttttctcatttaatctgatgtggcattttcgtcatctgaagcatgagtgacaagttgggaatgatgtggtgatttagaatgcagtattggccaagtccaagttgtcaacttaagcgtctgtttaccaaagaccgggaacaggggcccaaacatgtccagtcctcttcttccctctgctggaacctttggggacactcaagggtacagtttgacactgatctggtccatgaggctgcccagagaaagcactgcttctgtatgtctcttgtggtattggaacaataaacccgtacaacctgc

SEQ ID NO: 1117 - DNA, 7038 bp, Homo sapiens
  source 1..7038: mol_type = unassigned DNA
cacacccacggcagacacgcacgcacccgggcgccgaagggaaagccgcgtctcgccctcccgccccgccgtcggtcctgtctcagtccctcagcagagcgggaaagcggaggccggagccgtgacctctgaccccgtggttatgcggagccgccgcattccttagcgatcgcggggcagccgccgctgccgccgtgggcgactgacgcagcgcgggcgcgtggagccgccgccgcccctcccccaccgccgctctcgcgccagccggtccccgcgtgcccgccccttctccccggccgcacccgagacctcgcgcgccgccgctgccacgcgccccccccaccgccgccgccgccccagccccgcgccaccgccccagcccgcccagcccggaggtcccgcgtggagctgccgccgccgccggggagaaggatgaaggacaaacagaagaagaagaaggagcgcacgtgggccgaggccgcgcgcctggtattagaaaactactcggatgctccaatgacaccaaaacagattctgcaggtcatagaggcagaaggactaaaggaaatgaggagtgggacttcccctctcgcatgcctcaatgctatgctacattccaattcaagaggaggagaggggttgttttataaactgcctggccgaatcagccttttcacgctcaagaaggatgccctgcagtggtctcgccatccagctacagtggagggagaggagccagaggacacggctgatgtggagagctgtgggtctaatgaagccagcactgtgagtggtgaaaacgatgtatctcttgatgaaacatcttcgaacgcatcctgttctacagaatctcagagtcgacctctttccaatcccagggacagctacagagcttcctcacaggcgaacaaacaaaagaaaaagactggggtgatgctgcctcgagttgtcctgactcctctgaaggtaaacggggcccacgtggaatctgcatcagggttctcgggctgccacgccgatggcgagagcggcagcccgtccagcagcagcagcggctctctggccctgggcagcgctgctattcgtggccaggccgaggtcacccaggaccctgccccgctcctgagaggcttccggaagccagccacaggtcaaatgaagcgcaacagaggggaagaaatagattttgagacacctgggtccattcttgtcaacaccaacctccgtgccctgatcaactctcggaccttccatgccttaccatcacacttccagcagcagctcctcttcctcctgcctgaagtagacagacaggtggggacggatggcctgttgcgtctcagcagcagtgcactaaataacgagttttttacccatgcggctcagagctggcgggagcgcctggctgatggtgaatttactcatgagatgcaagtcaggatacgacaggaaatggagaaggaaaagaaggtggaacaatggaaagaaaagttctttgaagactactatggacagaagctgggtttgaccaaagaagagtcattgcagcagaacgtgggccaggaggaggctgaaatcaaaagtggcttgtgtgtcccaggagaatcagtgcgtatacagcgtggtccagccacccgacagcgagatgggcattttaagaaacgctctcggccagatctccgaaccagagccagaaggaatctgtacaaaaaacaggagtcagaacaagcaggggttgctaaggatgcaaaatctgtggcctcagatgttcccctctacaaggatggggaggctaagactgacccagcagggctgagcagtccccatctgccaggcacatcctctgcagcacccgacctggagggtcccgaattcccagttgagtctgtggcttctcggatccaggctgagccagacaacttggcacgtgcctctgcatctccagacagaattcctagcctgcctcaggaaactgtggatcaggaacccaaggatcagaagaggaaatcctttgagcaggcggcctctgcatcctttcccgaaaagaagccccggcttgaagatcgtcagtcctttcgtaacacaattgaaagtgttcacaccgaaaagccacagcccactaaagaggagcccaaagtcccgcccatccggattcaactttcacgtatcaaaccaccctgggtggttaaaggtcagcccacttaccagatatgcccccggatcatccccaccacggagtcctcctgccggggttggactggcgccaggaccctcgcagacattaaagcccgtgctctgcaggtccgaggggcgagaggtcaccactgccatagagaggcggccaccactgccatcggaggggggggtggcccgggtggaggtggcggcggggccaccgatgagggaggtggcagaggcagcagcagtggtgatggtggtgaggcctgtggccaccctgagcccaggggaggcccgagcacccctggaaagtgtacgtcagatctacagcgaacacaactactgccgccttatcctctaaatggggagcatacccaggccggaactgccatgtccagagctaggagagaggacctgccttctctgagaaaggaggaaagctgcctactacagagggctacagttggactcacagatgggctaggagatgcctcccaactccccgttgctcccactggggaccagccatgccaggccttgcccctactgtcctcccaaacctcagtagctgagagattagtggagcagcctcagttgcatccggatgttagaactgaatgtgagtctggcaccacttcctgggaaagtgatgatgaggagcaaggacccaccgttcctgcagacaatggtcccattctgtctctagtgggagatgatacattagagaaaggaactggccaagctcttgacagtcatcccactatgaaggatcctgtaaatgtgacccccagttccacacctgaatcctcaccgactgattgcctgcagaacagagcatttgatgacgaattagggcttggtggctcatgccctcctatgagggaaagtgatactagacaagaaaacttgaaaaccaaggctctcgtttctaacagttctttgcattggatacccatcccatcgaatgatgaggtagtgaaacagcccaaaccagaatccagagaacacataccatctgttgagccccaggttggagaggagtgggagaaagctgctcccacccctcctgcattgcctggggatttgacagctgaggagggtctagatcctcttgacagccttacttcactctggactgtgccatctcgaggaggcagtgacagcaatggcagttactgtcaacaggtggacattgaaaagctgaaaatcaacggagactctgaagcactgagtcctcacggtgagtccacggatacagcctctgactttgaaggtcacctcacggaggacagcagtgaggctgacactagagaagctgcagtgacaaagggatcttcggtggacaaggatgagaaacccaattggaaccaatctgccccactgtccaaggtgaatggtgacatgcgtctggttacaaggacagatgggatggttgctcctcagagctgggtgtctcgagtatgtgcggtccgccaaaagatcccagattccctactgctggccagtactgagtaccagccaagagccgtgtgcctgtccatgcctgggtcctcagtggaggccactaacccacttgtgatgcagttgctgcagggtagcttgcccctagagaaggttcttccaccagcccacgatgacagcatgtcagaatccccacaagtaccacttacaaaagaccagagccatggctcgctacgcatgggatctttacatggtcttggaaaaaacagtggcatggttgatggaagcagccccagttctttaagggctttgaaggagcctcttctgccagatagctgtgaaacaggcactggtcttgccaggattgaggccacccaggctcctggagcaccccaaaagaattgcaaggcagtcccaagttttgactccctccatccagtgacaaatcccattacatcctctaggaaactggaagaaatggattccaaagagcagttctcttcctttagttgtgaagatcagaaggaagtccgtgctatgtcacaggacagtaattcaaatgctgctccaggaaagagcccaggagatcttactacctcgagaacacctcgtttctcatctccaaatgtgatctcctttggtccagagcagacaggtcgggccctgggtgatcagagcaatgttacaggccaagggaagaagctttttggctctgggaatgtggctgcaacccttcagcgccccaggcctgcggacccgatgcctcttcctgctgagatccctccagtttttcccagtgggaagttgggaccaagcacaaactccatgtctggtggggtacagactccaagggaagactgggctccaaagccacatgcctttgttggcagcgtcaagaatgagaagacttttgtggggggtcctcttaaggcaaatgccgagaacaggaaagctactgggcatagtcccctggaactggtgggtcacttggaagggatgccctttgtcatggacttgcccttctggaaattaccccgagagccagggaaggggctcagtgagcctctggagccttcttctctcccctcccaactcagcatcaagcaggcattttatgggaagctttctaaactccaactgagttccaccagctttaattattcctctagctctcccacctttcccaaaggccttgctggaagtgtggtgcagctgagccacaaagcaaactttggtgcgagccacagtgcatcactttccttgcaaatgttcactgacagcagcacggtggaaagcatctcgctccagtgtgcgtgcagcctgaaagccatgatcatgtgccaaggctgcggtgcgttctgtcacgatgactgtattggaccctcaaagctctgtgtattgtgccttgtggtgagataataaattatggccatgggaaacattgtatatttagtgtgtgtattttgataatgattgatcttaaatctgtatacagaatatcattgatataatactctttaggcaggagcactcttgccttcccccaaaatttacactgctaaagccctctgtcacttggcgacccttctggtcttgctggaggggtttcctgggtataacccattgggctgcccaaggccagccagcctgagctctcctgcaagacagagcctgatgtggcacggagtggggttgcggggggtggggggactgcctgactcccagagggacttgaaactgaagcaagaaggttgcattctccaccaagggagttaacctacctgaactaagtagaaatgccagtcttccactaccccctccctgccatcttttcttctgctactttggggagttgatggccaggaaagaagccagcacagggttaaagtaactcctggcattgcccaccagggggctggtgcacctgctgacctcagggtcacagttgagtcatttgccagttgacggagcaagtttgaccttggttctgttgctgaagcaaatttggaacttttctgtctcagtgtgatccactaacccacaggatcatttggaaccttgaatagctctgcttggacaatggggttggggaatagggttgtctttcctatgaaaatgccatctgtagaccttgtgagtcagccgtccagatgtttgcaggtgaattcctctgcttgacatcctccctgtcactttggaccctatgggagtgggcatctccacgcacctgtgtatgtgaaagtcattttacatttcaaagcagtgtgtgtttcttatttttatatttttaactctttattcttggatgtataaagtgaactttttggcttctgtaagtatgctctatgcacctctaatgttttatcatgtatttatatgttgtacacagtactggctgattctgtaaatggatgtattgtacagagaacatgaacgtctcttcctaattttacatcttcagcatcattgcattaaagtggtgtaatctccttctctacatctgttgtcagagccactgagtgctgtgctgctcgacgtgagggtgaaatgattgacttgtgacctgccaggttgcccgatgccctgttgggtcaccggctggacctgctgcagcctgcagagccacagtcagcctgcccacatgccaccgagcaaacgcatcttgcttttcacatctctcctcctacagccttaatggctgcttgctgccatatgtgacaaatcaccaccaccagtgttaagtgcttctggattcatgggtgagttccctgggcagcccccaggaaggccttccagatctggctccagggtcaccacctgtcacagcaatacctgggaccatgctctcctgggactgtgaggctccttttgacgtacttttgacatcaggcaggtttgggaagaaacaaagccatgcctgctcctgcctctctcccaacatgtttccagcaagtagatgcccctgtgtgtgttttcccttgccttgtttcctgccttatatcttgtatttcgacttattacagagttgagggttcttgcttaatttagatcaagtataaaatttgtatgacttcaagtctcattttatctgaaaggtttttttctcatttaatctgatgtggcattttcgtcatctgaagcatgagtgacaagttgggaatgatgtggtgatttagaatgcagtattggccaagtccaagttgtcaacttaagcgtctgtttaccaaagaccgggaacaggggcccaaacatgtccagtcctcttcttccctctgctggaacctttggggacactcaagggtacagtttgacactgatctggtccatgaggctgcccagagaaagcactgcttctgtatgtctcttgtggtattggaacaataaacccgtacaacctgc

SEQ ID NO: 1118 - DNA, 7031 bp, Homo sapiens
  source 1..7031: mol_type = unassigned DNA
cggcagacacgcacgcacccgggcgccgaagggaaagccgcgtctcgccctcccgccccgccgtcggtcctgtctcagtccctcagcagagcgggaaagcggaggccggagccgtgacctctgaccccgtggttatgcggagccgccgcattccttagcgatcgcggggcagccgccgctgccgccgtgggcgactgacgcagcgcgggcgcgtggagccgccgccgcccctcccccaccgccgctctcgcgccagccggtccccgcgtgcccgccccttctccccggccgcacccgagacctcgcgcgccgccgctgccacgcgccccccccaccgccgccgccgccccagccccgcgccaccgccccagcccgcccagcccggaggtcccgcgtggagctgccgccgccgccggggagaaggatgaaggacaaacagaagaagaagaaggagcgcacgtgggccgaggccgcgcgcctggtattagaaaactactcggatgctccaatgacaccaaaacagattctgcaggtcatagaggcagaaggactaaaggaaatgagaagtgggacttcccctctcgcatgcctcaatgctatgctacattccaattcaagaggaggagaggggttgttttataaactgcctggccgaatcagccttttcacgctcaagaaggatgccctgcagtggtctcgccatccagctacagtggagggagaggagccagaggacacggctgatgtggagagctgtgggtctaatgaagccagcactgtgagtggtgaaaacgatgtatctcttgatgaaacatcttcgaacgcatcctgttctacagaatctcagagtcgacctctttccaatcccagggacagctacagagcttcctcacaggcgaacaaacaaaagaaaaagactggggtgatgctgcctcgagttgtcctgactcctctgaaggtaaacggggcccacgtggaatctgcatcagggttctcgggctgccacgccgatggcgagagcggcagcccgtccagcagcagcagcggctctctggccctgggcagcgctgctattcgtggccaggccgaggtcacccaggaccctgccccgctcctgagaggcttccggaagccagccacaggtcaaatgaagcgcaacagaggggaagaaatagattttgagacacctgggtccattcttgtcaacaccaacctccgtgccctgatcaactctcggaccttccatgccttaccatcacacttccagcagcagctcctcttcctcctgcctgaagtagacagacaggtggggacggatggcctgttgcgtctcagcagcagtgcactaaataacgagttttttacccatgcggctcagagctggcgggagcgcctggctgatggtgaatttactcatgagatgcaagtcaggatacgacaggaaatggagaaggaaaagaaggtggaacaatggaaagaaaagttctttgaagactactatggacagaagctgggtttgaccaaagaagagtcattgcagcagaacgtgggccaggaggaggctgaaatcaaaagtggcttgtgtgtcccaggagaatcagtgcgtatacagcgtggtccagccacccgacagcgagatgggcattttaagaaacgctctcggccagatctccgaaccagagccagaaggaatctgtacaaaaaacaggagtcagaacaagcaggggttgctaaggatgcaaaatctgtggcctcagatgttcccctctacaaggatggggaggctaagactgacccagcagggctgagcagtccccatctgccaggcacatcctctgcagcacccgacctggagggtcccgaattcccagttgagtctgtggcttctcggatccaggctgagccagacaacttggcacgtgcctctgcatctccagacagaattcctagcctgcctcaggaaactgtggatcaggaacccaaggatcagaagaggaaatcctttgagcaggcggcctctgcatcctttcccgaaaagaagccccggcttgaagatcgtcagtcctttcgtaacacaattgaaagtgttcacaccgaaaagccacagcccactaaagaggagcccaaagtcccgcccatccggattcaactttcacgtatcaaaccaccctgggtggttaaaggtcagcccacttaccagatatgcccccggatcatccccaccacggagtcctcctgccggggttggactggcgccaggaccctcgcagacattaaagcccgtgctctgcaggtccgaggggcgagaggtcaccactgccatagagaggcggccaccactgccatcggaggggggggtggcccgggtggaggtggcggcggggccaccgatgagggaggtggcagaggcagcagcagtggtgatggtggtgaggcctgtggccaccctgagcccaggggaggcccgagcacccctggaaagtgtacgtcagatctacagcgaacacaactactgccgccttatcctctaaatggggagcatacccaggccggaactgccatgtccagagctaggagagaggacctgccttctctgagaaaggaggaaagctgcctactacagagggctacagttggactcacagatgggctaggagatgcctcccaactccccgttgctcccactggggaccagccatgccaggccttgcccctactgtcctcccaaacctcagtagctgagagattagtggagcagcctcagttgcatccggatgttagaactgaatgtgagtctggcaccacttcctgggaaagtgatgatgaggagcaaggacccaccgttcctgcagacaatggtcccattctgtctctagtgggagatgatacattagagaaaggaactggccaagctcttgacagtcatcccactatgaaggatcctgtaaatgtgacccccagttccacacctgaatcctcaccgactgattgcctgcagaacagagcatttgatgacgaattagggcttggtggctcatgccctcctatgagggaaagtgatactagacaagaaaacttgaaaaccaaggctctcgtttctaacagttctttgcattggatacccatcccatcgaatgatgaggtagtgaaacagcccaaaccagaatccagagaacacataccatctgttgagccccaggttggagaggagtgggagaaagctgctcccacccctcctgcattgcctggggatttgacagctgaggagggtctagatcctcttgacagccttacttcactctggactgtgccatctcgaggaggcagtgacagcaatggcagttactgtcaacaggtggacattgaaaagctgaaaatcaacggagactctgaagcactgagtcctcacggtgagtccacggatacagcctctgactttgaaggtcacctcacggaggacagcagtgaggctgacactagagaagctgcagtgacaaagggatcttcggtggacaaggatgagaaacccaattggaaccaatctgccccactgtccaaggtgaatggtgacatgcgtctggttacaaggacagatgggatggttgctcctcagagctgggtgtctcgagtatgtgcggtccgccaaaagatcccagattccctactgctggccagtactgagtaccagccaagagccgtgtgcctgtccatgcctgggtcctcagtggaggccactaacccacttgtgatgcagttgctgcagggtagcttgcccctagagaaggttcttccaccagcccacgatgacagcatgtcagaatccccacaagtaccacttacaaaagaccagagccatggctcgctacgcatgggatctttacatggtcttggaaaaaacagtggcatggttgatggaagcagccccagttctttaagggctttgaaggagcctcttctgccagatagctgtgaaacaggcactggtcttgccaggattgaggccacccaggctcctggagcaccccaaaagaattgcaaggcagtcccaagttttgactccctccatccagtgacaaatcccattacatcctctaggaaactggaagaaatggattccaaagagcagttctcttcctttagttgtgaagatcagaaggaagtccgtgctatgtcacaggacagtaattcaaatgctgctccaggaaagagcccaggagatcttactacctcgagaacacctcgtttctcatctccaaatgtgatctcctttggtccagagcagacaggtcgggccctgggtgatcagagcaatgttacaggccaagggaagaagctttttggctctgggaatgtggctgcaacccttcagcgccccaggcctgcggacccgatgcctcttcctgctgagatccctccagtttttcccagtgggaagttgggaccaagcacaaactccatgtctggtggggtacagactccaagggaagactgggctccaaagccacatgcctttgttggcagcgtcaagaatgagaagacttttgtggggggtcctcttaaggcaaatgccgagaacaggaaagctactgggcatagtcccctggaactggtgggtcacttggaagggatgccctttgtcatggacttgcccttctggaaattaccccgagagccagggaaggggctcagtgagcctctggagccttcttctctcccctcccaactcagcatcaagcaggcattttatgggaagctttctaaactccaactgagttccaccagctttaattattcctctagctctcccacctttcccaaaggccttgctggaagtgtggtgcagctgagccacaaagcaaactttggtgcgagccacagtgcatcactttccttgcaaatgttcactgacagcagcacggtggaaagcatctcgctccagtgtgcgtgcagcctgaaagccatgatcatgtgccaaggctgcggtgcgttctgtcacgatgactgtattggaccctcaaagctctgtgtattgtgccttgtggtgagataataaattatggccatgggaaacattgtatatttagtgtgtgtattttgataatgattgatcttaaatctgtatacagaatatcattgatataatactctttaggcaggagcactcttgccttcccccaaaatttacactgctaaagccctctgtcacttggcgacccttctggtcttgctggaggggtttcctgggtataacccattgggctgcccaaggccagccagcctgagctctcctgcaagacagagcctgatgtggcacggagtggggttgcggggggtggggggactgcctgactcccagagggacttgaaactgaagcaagaaggttgcattctccaccaagggagttaacctacctgaactaagtagaaatgccagtcttccactaccccctccctgccatcttttcttctgctactttggggagttgatggccaggaaagaagccagcacagggttaaagtaactcctggcattgcccaccagggggctggtgcacctgctgacctcagggtcacagttgagtcatttgccagttgacggagcaagtttgaccttggttctgttgctgaagcaaatttggaacttttctgtctcagtgtgatccactaacccacaggatcatttggaaccttgaatagctctgcttggacaatggggttggggaatagggttgtctttcctatgaaaatgccatctgtagaccttgtgagtcagccgtccagatgtttgcaggtgaattcctctgcttgacatcctccctgtcactttggaccctatgggagtgggcatctccacgcacctgtgtatgtgaaagtcattttacatttcaaagcagtgtgtgtttcttatttttatatttttaactctttattcttggatgtataaagtgaactttttggcttctgtaagtatgctctatgcacctctaatgttttatcatgtatttatatgttgtacacagtactggctgattctgtaaatggatgtattgtacagagaacatgaacgtctcttcctaattttacatcttcagcatcattgcattaaagtggtgtaatctccttctctacatctgttgtcagagccactgagtgctgtgctgctcgacgtgagggtgaaatgattgacttgtgacctgccaggttgcccgatgccctgttgggtcaccggctggacctgctgcagcctgcagagccacagtcagcctgcccacatgccaccgagcaaacgcatcttgcttttcacatctctcctcctacagccttaatggctgcttgctgccatatgtgacaaatcaccaccaccagtgttaagtgcttctggattcatgggtgagttccctgggcagcccccaggaaggccttccagatctggctccagggtcaccacctgtcacagcaatacctgggaccatgctctcctgggactgtgaggctccttttgacgtacttttgacatcaggcaggtttgggaagaaacaaagccatgcctgctcctgcctctctcccaacatgtttccagcaagtagatgcccctgtgtgtgttttcccttgccttgtttcctgccttatatcttgtatttcgacttattacagagttgagggttcttgcttaatttagatcaagtataaaatttgtatgacttcaagtctcattttatctgaaaggtttttttctcatttaatctgatgtggcattttcgtcatctgaagcatgagtgacaagttgggaatgatgtggtgatttagaatgcagtattggccaagtccaagttgtcaacttaagcgtctgtttaccaaagaccgggaacaggggcccaaacatgtccagtcctcttcttccctctgctggaacctttggggacactcaagggtacagtttgacactgatctggtccatgaggctgcccagagaaagcactgcttctgtatgtctcttgtggtattggaacaataaacccgtacaacctgca

SEQ ID NO: 1119 - DNA, 4632 bp, Homo sapiens
  source 1..4632: mol_type = unassigned DNA
aaattccggcggaggggcgagctggcaggccggctcctcccactctgggcagcggggtcccgcgtcccctcccccactatttggcagcgtctgggggtctggggcagcttcgttcattcacccgggggagttgggtttccgggaagggtcggaagctcctccctcgcttcctggtgggtaatggggtggtgcctttgactccgggggtggaaaagcgaccccacattcaaggacgccaatggcatgttgagctttcccaatctaaaccaggtattagaaaactactcggatgctccaatgacaccaaaacagattctgcaggtcatagaggcagaaggactaaaggaaatgagcagtgggacttcccctctcgcatgcctcaatgctatgctacattccaattcaagaggaggagaggggttgttttataaactgcctggccgaatcagccttttcacgctcaagaaggatgccctgcagtggtctcgccatccagctacagtggagggagaggagccagaggacacggctgatgtggagagctgtgggtctaatgaagccagcactgtgagtggtgaaaacgatgtatctcttgatgaaacatcttcgaacgcatcctgttctacagaatctcagagtcgacctctttccaatcccagggacagctacagagcttcctcacaggcgaacaaacaaaagaaaaagactggggtgatgctgcctcgagttgtcctgactcctctgaaggtaaacggggcccacgtggaatctgcatcaggtcaaatgaagcgcaacagaggggaagaaatagattttgagacacctgggtccattcttgtcaacaccaacctccgtgccctgatcaactctcggaccttccatgccttaccatcacacttccagcagcagctcctcttcctcctgcctgaagtagacagacaggtggggacggatggcctgttgcgtctcagcagcagtgcactaaataacgagttttttacccatgcggctcagagctggcgggagcgcctggctgatggtgaatttactcatgagatgcaagtcaggatacgacaggaaatggagaaggaaaagaaggtggaacaatggaaagaaaagttctttgaagactactatggacagaagctgggtttgaccaaagaagagtcattgcagcagaacgtgggccaggaggaggctgaaatcaaaagtggcttgtgtgtcccaggagaatcagtgcgtatacagcgtggtccagccacccgacagcgagatgggcattttaagaaacgctctcggccagatctccgaaccagagccagaaggaatctgtacaaaaaacaggagtcagaacaagcaggggttgctaaggatgcaaaatctgtggcctcagatgttcccctctacaaggatggggaggctaagactgacccagcagggctgagcagtccccatctgccaggcacatcctctgcagcacccgacctggagggtcccgaattcccagttgagtctgtggcttctcggatccaggctgagccagacaacttggcacgtgcctctgcatctccagacagaattcctagcctgcctcaggaaactgtggatcaggaacccaaggatcagaagaggaaatcctttgagcaggcggcctctgcatcctttcccgaaaagaagccccggcttgaagatcgtcagtcctttcgtaacacaattgaaagtgttcacaccgaaaagccacagcccactaaagaggagcccaaagtcccgcccatccggattcaactttcacgtatcaaaccaccctgggtggttaaaggtcagcccacttaccagatatgcccccggatcatccccaccacggagtcctcctgccggggttggactggcgccaggaccctcgcagacattaaagcccgtgctctgcaggtccgaggggcgagaggtcaccactgccatagagaggccaccgatgagggaggtggcagaggcagcagcagtggtgatggtggtgaggcctgtggccaccctgagcccaggggaggcccgagcacccctggaaagtgtacgtcagatctacagcgaacacaactactgccgccttatcctctaaatggggagcatacccaggccggaactgccatgtccagagctaggagagaggacctgccttctctgagaaaggaggaaagctgcctactacagagggctacagttggactcacagatgggctaggagatgcctcccaactccccgttgctcccactggggaccagccatgccaggccttgcccctactgtcctcccaaacctcagtagctgagagattagtggagcagcctcagttgcatccggatgttagaactgaatgtgagtctggcaccacttcctgggaaagtgatgatgaggagcaaggacccaccgttcctgcagacaatggtcccattctgtctctagtgggagatgatacattagagaaaggaactggccaagctcttgacagtcatcccactatgaaggatcctgtaaatgtgacccccagttccacacctgaatcctcaccgactgattgcctgcagaacagagcatttgatgacgaattagggcttggtggctcatgccctcctatgagggaaagtgatactagacaagaaaacttgaaaaccaaggctctcgtttctaacagttctttgcattggatacccatcccatcgaatgatgaggtagtgaaacagcccaaaccagaatccagagaacacataccatctgttgagccccaggttggagaggagtgggagaaagctgctcccacccctcctgcattgcctggggatttgacagctgaggagggtctagatcctcttgacagccttacttcactctggactgtgccatctcgaggaggcagtgacagcaatggcagttactgtcaacaggtggacattgaaaagctgaaaatcaacggagactctgaagcactgagtcctcacggtgagtccacggatacagcctctgactttgaaggtcacctcacggaggacagcagtgaggctgacactagagaagctgcagtgacaaagggatcttcggtggacaaggatgagaaacccaattggaaccaatctgccccactgtccaaggtgaatggtgacatgcgtctggttacaaggacagatgggatggttgctcctcagagctgggtgtctcgagtatgtgcggtccgccaaaagatcccagattccctactgctggccagtactgagtaccagccaagagccgtgtgcctgtccatgcctgggtcctcagtggaggccactaacccacttgtgatgcagttgctgcagggtagcttgcccctagagaaggttcttccaccagcccacgatgacagcatgtcagaatccccacaagtaccacttacaaaagaccagagccatggctcgctacgcatgggatctttacatggtcttggaaaaaacagtggcatggttgatggaagcagccccagttctttaagggctttgaaggagcctcttctgccagatagctgtgaaacaggcactggtcttgccaggattgaggccacccaggctcctggagcaccccaaaagaattgcaaggcagtcccaagttttgactccctccatccagtgacaaatcccattacatcctctaggaaactggaagaaatggattccaaagagcagttctcttcctttagttgtgaagatcagaaggaagtccgtgctatgtcacaggacagtaattcaaatgctgctccaggaaagagcccaggagatcttactacctcgagaacacctcgtttctcatctccaaatgtgatctcctttggtccagagcagacaggtcgggccctgggtgatcagagcaatgttacaggccaagggaagaagctttttggctctgggaatgtggctgcaacccttcagcgccccaggcctgcggacccgatgcctcttcctgctgagatccctccagtttttcccagtgggaagttgggaccaagcacaaactccatgtctggtggggtacagactccaagggaagactgggctccaaagccacatgcctttgttggcagcgtcaagaatgagaagacttttgtggggggtcctcttaaggcaaatgccgagaacaggaaagctactgggcatagtcccctggaactggtgggtcacttggaagggatgccctttgtcatggacttgcccttctggaaattaccccgagagccagggaaggggctcagtgagcctctggagccttcttctctcccctcccaactcagcatcaagcaggcattttatgggaagctttctaaactccaactgagttccaccagctttaattattcctctagctctcccacctttcccaaaggccttgctggaagtgtggtgcagctgagccacaaagcaaactttggtgcgagccacagtgcatcactttccttgcaaatgttcactgacagcagcacggtggaaagcatctcgctccagtgtgcgtgcagcctgaaagccatgatcatgtgccaaggctgcggtgcgttctgtcacgatgactgtattggaccctcaaagctctgtgtattgtgccttgtggtgagataa

SEQ ID NO: 1120 - DNA, 5374 bp, Homo sapiens
  source 1..5374: mol_type = unassigned DNA
cgtcggtcctgtctcagtccctcagcagagcgggaaagcggaggccggagccgtgacctctgaccccgtggttatgcggagccgccgcattccttagcgatcgcggggcagccgccgctgccgccgtgggcgactgacgcagcgcgggcgcgtggagccgccgccgcccctcccccaccgccgccggggagaaggatgaaggacaaacagaagaagaagaaggagcgcacgtgggccgaggccgcgcgcctggtattagaaaactactcggatgctccaatgacaccaaaacagattctgcaggtcatagaggcagaaggactaaaggaaatgaggagtgggacttcccctctcgcatgcctcaatgctatgctacattccaattcaagaggaggagaggggttgttttataaactgcctggccgaatcagccttttcacgctcaagaaggatgccctgcagtggtctcgccatccagctacagtggagggagaggagccagaggacacggctgatgtggagagctgtgggtctaatgaagccagcactgtgagtggtgaaaacgatgtatctcttgatgaaacatcttcgaacgcatcctgttctacagaatctcagagtcgacctctttccaatcccagggacagctacagagcttcctcacaggcgaacaaacaaaagaaaaagactggggtgatgctgcctcgagttgtcctgactcctctgaaggtaaacggggcccacgtggaatctgcatcagggttctcgggctgccacgccgatggcgagagcggcagcccgtccagcagcagcagcggctctctggccctgggcagcgctgctattcgtggccaggccgaggtcacccaggaccctgccccgctcctgagaggcttccggaagccagccacaggtcaaatgaagcgcaacagaggggaagaaatagattttgagacacctgggtccattcttgtcaacaccaacctccgtgccctgatcaactctcggaccttccatgccttaccatcacacttccagcagcagctcctcttcctcctgcctgaagtagacagacaggtggggacggatggcctgttgcgtctcagcagcagtgcactaaataacgagttttttacccatgcggctcagagctggcgggagcgcctggctgatggtgaatttactcatgagatgcaagtcaggatacgacaggaaatggagaaggaaaagaaggtggaacaatggaaagaaaagttctttgaagactactatggacagaagctgggtttgaccaaagaagagtcattgcagcagaacgtgggccaggaggaggctgaaatcaaaagtggcttgtgtgtcccaggagaatcagtgcgtatacagcgtggtccagccacccgacagcgagatgggcattttaagaaacgctctcggccagatctccgaaccagagccagaaggaatctgtacaaaaaacaggagtcagaacaagcaggggttgctaaggatgcaaaatctgtggcctcagatgttcccctctacaaggatggggaggctaagactgacccagcagggctgagcagtccccatctgccaggcacatcctctgcagcacccgacctggagggtcccgaattcccagttgagtctgtggcttctcggatccaggctgagccagacaacttggcacgtgcctctgcatctccagacagaattcctagcctgcctcaggaaactgtggatcaggaacccaaggatcagaagaggaaatcctttgagcaggcggcctctgcatcctttcccgaaaagaagccccggcttgaagatcgtcagtcctttcgtaacacaattgaaagtgttcacaccgaaaagccacagcccactaaagaggagcccaaagtcccgcccatccggattcaactttcacgtatcaaaccaccctgggtggttaaaggtcagcccacttaccagatatgcccccggatcatccccaccacggagtcctcctgccggggttggactggcgccaggaccctcgcagacattaaagcccgtgctctgcaggtccgaggggcgagaggtcaccactgccatagagaggcggccaccactgccatcggaggggggggtggcccgggtggaggtggcggcggggccaccgatgagggaggtggcagaggcagcagcagtggtgatggtggtgaggcctgtggccaccctgagcccaggggaggcccgagcacccctggaaagtgtacgtcagatctacagcgaacacaactactgccgccttatcctctaaatggggagcatacccaggccggaactgccatgtccagagctaggagagaggacctgccttctctgagaaaggaggaaagctgcctactacagagggctacagttggactcacagatgggctaggagatgcctcccaactccccgttgctcccactggggaccagccatgccaggccttgcccctactgtcctcccaaacctcagtagctgagagattagtggagcagcctcagttgcatccggatgttagaactgaatgtgagtctggcaccacttcctgggaaagtgatgatgaggagcaaggacccaccgttcctgcagacaatggtcccattctgtctctagtgggagatgatacattagagaaaggaactggccaagctcttgacagtcatcccactatgaaggatcctgtaaatgtgacccccagttccacacctgaatcctcaccgactgattgcctgcagaacagagcatttgatgacgaattagggcttggtggctcatgccctcctatgagggaaagtgatactagacaagaaaacttgaaaaccaaggctctcgtttctaacagttctttgcattggatacccatcccatcgaatgatgaggtagtgaaacagcccaaaccagaatccagagaacacataccatctgttgagccccaggttggagaggagtgggagaaagctgctcccacccctcctgcattgcctggggatttgacagctgaggagggtctagatcctcttgacagccttacttcactctggactgtgccatctcgaggaggcagtgacagcaatggcagttactgtcaacaggtggacattgaaaagctgaaaatcaacggagactctgaagcactgagtcctcacggtgagtccacggatacagcctctgactttgaaggtcacctcacggaggacagcagtgaggctgacactagagaagctgcagtgacaaagggatcttcggtggacaaggatgagaaacccaattggaaccaatctgccccactgtccaaggtgaatggtgacatgcgtctggttacaaggacagatgggatggttgctcctcagagctgggtgtctcgagtatgtgcggtccgccaaaagatcccagattccctactgctggccagtactgagtaccagccaagagccgtgtgcctgtccatgcctgggtcctcagtggaggccactaacccacttgtgatgcagttgctgcagggtagcttgcccctagagaaggttcttccaccagcccacgatgacagcatgtcagaatccccacaagtaccacttacaaaagaccagagccatggctcgctacgcatgggatctttacatggtcttggaaaaaacagtggcatggttgatggaagcagccccagttctttaagggctttgaaggagcctcttctgccagatagctgtgaaacaggcactggtcttgccaggattgaggccacccaggctcctggagcaccccaaaagaattgcaaggcagtcccaagttttgactccctccatccagtgacaaatcccattacatcctctaggaaactggaagaaatggattccaaagagcagttctcttcctttagttgtgaagatcagaaggaagtccgtgctatgtcacaggacagtaattcaaatgctgctccaggaaagagcccaggagatcttactacctcgagaacacctcgtttctcatctccaaatgtgatctcctttggtccagagcagacaggtcgggccctgggtgatcagagcaatgttacaggccaagggaagaagctttttggctctgggaatgtggctgcaacccttcagcgccccaggcctgcggacccgatgcctcttcctgctgagatccctccagtttttcccagtgggaagttgggaccaagcacaaactccatgtctggtggggtacagactccaagggaagactgggctccaaagccacatgcctttgttggcagcgtcaagaatgagaagacttttgtggggggtcctcttaaggcaaatgccgagaacaggaaagctactgggcatagtcccctggaactggtgggtcacttggaagggatgccctttgtcatggacttgcccttctggaaattaccccgagagccagggaaggggctcagtgagcctctggagccttcttctctcccctcccaactcagcatcaagcaggcattttatgggaagctttctaaactccaactgagttccaccagctttaattattcctctagctctcccacctttcccaaaggccttgctggaagtgtggtgcagctgagccacaaagcaaactttggtgcgagccacagtgcatcactttccttgcaaatgttcactgacagcagcacggtggaaagcatctcgctccagtgtgcgtgcagcctgaaagccatgatcatgtgccaaggctgcggtgcgttctgtcacgatgactgtattggaccctcaaagctctgtgtattgtgccttgtggtgagataataaattatggccatgggaaacattgtatatttagtgtgtgtattttgataatgattgatcttaaatctgtatacagaatatcattgatataatactctttaggcaggagcactcttgccttcccccaaaatttacactgctaaagccctctgtcacttggcgacccttctggtcttgctggaggggtttcctgggtataacccattgggctgcccaaggccagccagcctgagctctcctgcaagacagagcctgatgtggcacggagtggggttgcggggggtggggggactgcctgactcccagagggacttgaaactgaagcaagaaggttgcattctccaccaagggagttaacctacctgaactaagtagaaatgccagtcttccactaccccctccctgccatcttttcttctgctactttggggagttgatggccaggaaagaagccagcacagggttaaagtaactcctggcattgcccaccagggggctggtgcacctgctgacctcagggtcacagttgagtcatttgccagttgacggagca

SEQ ID NO: 1121 - DNA, 284 bp, Homo sapiens
  source 1..284: mol_type = unassigned DNA
gtgggccgaggccgcgcgcctggtattagaaaactactcggatgctccaatgacaccaaaacagattctgcaggtcatagaggcagaaggactaaaggaaatgagaagtgggacttcccctctcgcatgcctcaatgctatgctacattccaattcaagaggaggagaggggttgttttataaactgcctggccgaatcagccttttcacgctcaaggtgtgagccactgcaccaggccccttcatcttaattttaatatatctttgaataaacaccattgtat

SEQ ID NO: 1122 - DNA, 1068 bp, Homo sapiens
  source 1..1068: mol_type = unassigned DNA
cacacccacggcagacacgcacgcacccgggcgccgaagggaaagccgcgtctcgccctcccgccccgccgtcggtcctgtctcagtccctcagcagagcgggaaagcggaggccggagccgtgacctctgaccccgtggttatgcggagccgccgcattccttagcgatcgcggggcagccgccgctgccgccgtgggcgactgacgcagcgcgggcgcgtggagccgccgccgcccctcccccaccgccgctctcgcgccagccggtccccgcgtgcccgccccttctccccggccgcacccgagacctcgcgcgccgccgctgccacgcgccccccccaccgccgccgccgccccagccccgcgccaccgccccagcccgcccagcccggaggtcccgcgtggagctgccgccgccgccggggagaaggatgaaggacaaacagaagaagaagaaggagcgcacgtgggccgaggccgcgcgcctggtattagaaaactactcggatgctccaatgacaccaaaacagattctgcaggtcatagaggcagaaggactaaaggaaatgaggagtgggacttcccctctcgcatgcctcaatgctatgctacattccaattcaagaggaggagaggggttgttttataaactgcctggccgaatcagccttttcacgctcaaggtgtgagccactgcaccaggccccttcatcttaattttaatatatctttgaataaacaccattgtatgaacctgctgtaagcttgggagtggtctgttagtctacagcttgtgtctgagatgtgctaattgaatatttgctcagtacctcatcttaactgcctttggctttatgttgcttatccttcatagtatcttgttcattggccttttacatccataggcatcacttctctgatattcgttgtgctcttttaatggattaatggtttgcttggttggttcctctagttagactgtaaactccttgagagcagagtctgtattttattaattacccacagtactaggtacatagttgccttcaataaatatatatttaatg

SEQ ID NO: 1123 - DNA, 983 bp, Homo sapiens
  source 1..983: mol_type = unassigned DNA
cacgcacgcacccgggcgccgaagggaaagccgcgtctcgccctcccgccccgccgtcggtcctgtctcagtccctcagcagagcgggaaagcggaggccggagccgtgacctctgaccccgtggttatgcggagccgccgcattccttagcgatcgcggggcagccgccgctgccgccgtgggcgactgacgcagcgcgggcgcgtggagccgccgccgcccctcccccaccgccgctctcgcgccagccggtccccgcgtgcccgccccttctccccggccgcacccgagacctcgcgcgccgccgctgccacgcgccccccccaccgccgccgccgccccagccccgcgccaccgccccagcccgcccagcccggaggtcccgcgtggagctgccgccgccgccggggagaaggatgaaggacaaacagaagaagaagaaggagcgcacgtgggccgaggccgcgcgcctggtattagaaaactactcggatgctccaatgacaccaaaacagattctgcaggtcatagaggcagaaggactaaaggaaatgagtgggacttcccctctcgcatgcctcaatgctatgctacattccaattcaagaggaggagaggggttgttttataaactgcctggccgaatcagccttttcacgctcaagagatgaagtcttgctatgttggttaaactggtctcaaactcctggcctcaagtgatcttcccaccacagcttcacaaagcactgggatggattacagaaggatgccctgcagtggtctcgccatccagctacagtggagggagaggagccagaggacacggctgatgtggagagctgtgggtctaatgaagccagcactgtgagtggtgaaaacgatgtatctcttgatgaaacatcttcgaacgcatcctgttctacagaatctcagagtcgacctctttccaatcccagggacagctacagagcttcctcacagg

SEQ ID NO: 1124 - DNA, 3781 bp, Homo sapiens
  source 1..3781: mol_type = unassigned DNA
gtacagtaagaacccaatatggcagcggcggtagcagtggcaacggcagcaagaggaccggccgccccatagacccccccgcgcaccacccccgccgcttcctctgcttgggtgcccccccggtctgacttcccttttctcccacctttcccggcaccgcgggaaaagcagcgcagggcagagcaggcagggagggcggccggagcccggacacgggagcctcccagtcagttcaagacccgacatgagggaaaagggacgtaggaagaagggcaggacctgggcggaggccgccaagacggtcttagaaaaataccccaatacacccatgagtcataaagaaattcttcaagttatccagagagaaggactaaaagaaatcagcagtgggacttctcctcttgcatgcctgaatgcaatgcttcacacaaactccagaggtgaagagggcatcttctataaggttccaggtagaatgggagtatatactttgaagaaagatgtgccggatggggtgaaagagctgtcagaaggttcagaagaaagcagtgatggtcagtcagattcccagagttctgagaacagcagcagcagcagtgatggtggcagcaacaaggagggaaaaaagagcaggtggaaaaggaaagtatcgtcgtcctccccgcagtcaggctgcccatcacccaccattccagcaggtaaagtcatttctccatcacagaagcacagcaagaaggcactaaagcaggcgctaaagcagcaacagcagaagaagcagcagcagcaatgcaggccaagcatatccatctcctccaaccagcatctctcactaaagactgtcaaagcagccagtgactctgtacctgccaaacctgcaacatgggaaggaaagcaatctgatggacagacaggcagccctcaaaactcaaactccagcttttcttcctcagttaaagtggaaaatactttactaggcttggggaagaagtcattccagagatctgagagactccataccagacaaatgaaaagaactaaatgtgctgacattgacgttgagacaccggactccattctggttaatacaaatctgcgagcactgatcaacaagcacacattttcagtccttcctggagattgccagcaacgactgcttttactactcccagaggtagatcgacaggttggtccagatggtttaatgaagttaaatggctcagcccttaacaatgaattcttcacttcagcagcccaaggctggaaggaaagactctcagaaggtgagtttacacctgagatgcaggtgagaattcgacaagagattgagaaggagaaaaaagtggagccatggaaagaacaattctttgaaagctactatgggcagagttctggcctgagccttgaagattctaagaaattgacagcttctcccagtgatcccaaagtaaagaaaaccccagctgaacaaccaaaatccatgcctgtgtcagaggcctctcttatcagaatagttccagtagtctcccagtcagagtgtaaagaagaagcattgcaaatgtcatcaccaggcagaaaagaagagtgtgaaagccaaggtgaagtgcagccgaacttctccacatcttcagagcccctgctttcctcagctctcaatacacatgagcttagcagcattcttcccatcaagtgcccaaaggatgaggatctcttggagcagaagccagtcacctctgctgaacaggaatctgagaagaaccatctcaccacagcttctaattataacaaaagtgaaagccaagaatctttagttacatcgccaagcaaacccaagagtcctggggttgaaaaaccaatagtgaagcccacagcaggagcgggtccacaggagactaatatgaaagaacctctagcaactcttgttgatcagagcccagaaagcctcaagaggaagtcttccctcacccaagaagaggcccctgtgagctgggagaagaggccacgtgtcactgagaatcgccagcaccagcagccatttcaggtctcaccacagccctttctcaatagaggggacagaatccaggtgcgaaaagtaccacctctcaagatcccggtctccagaatctcccccatgccgtttcatccatcgcaggtctctcccagggctcgttttccagtctccatcactagtcctaacagaacaggagccagaactcttgcagacatcaaagcaaaagcccaactggtcaaagcacagagggcagcagctgccgctgccgccgcagctgctgcagccgcctcagttggagggaccattccaggacctggcccagggggtggacaaggtccaggagagggtggtgaagggcagactgctagaggaggcagtccaggctcagacagagtcagtgaaactggaaagggccccacactggaactggcaggaactggaagcaggggaggtacgagagagcttttaccctgtggtccagagactcagccccagtctgagaccaagaccaccccaagccaggcacagcctcatagtgtctctggagcacaactacagcaaacccccccagtgcctccaacacctgccgtcagtggagcatgcacaagtgtcccatcaccagcccacatagagaaattggataatgaaaaactgaaccccaccagagcaacagccacagtggcctctgtcagccatccacaagggcccagtagttgcagacaggagaaagcaccttctccaacaggtttccagctggaagacatctccacaagccagaggttcatgctgggttttgctggcagaaggacatccaaacctgcaatggcagggcactacttactgaatatttctacctacggccggggctcagagagctttaggaggacccattctgtaaaccctgaagatcgtttttgtctaagcagccccactgaagccttgaaaatgggatatacagactgtaaaaatgcaacaggagagagtagcagcagcaaagaagatgacactgatgaggaaagtactggtgatgagcaggaatctgtcacagtgaaagaggagccccaggtttcccagagtgctggcaagggtgacacaagttcaggacctcacagcagggaaactctatctaccagtgattgcttagctagcaagaatgtgaaggctgagataccattgaatgagcaaaccactttaagtaaggagaattacctgttcactagaggccaaacatttgatgaaaagaccctagccagagatttaattcaggcagcacagaagcagatggctcatgcagtgagaggtaaggcaatccgtagcagccccgagcttttcagttctactgttcttcctctgcctgcagacagccccacccaccagcccctactccttccacccctgcaaaccccgaagttgtatggaagccccacccagatagggccaagctatagaggcatgatcaatgtctccacctcatctgacatggaccataactctgctgtaccaggtagccaggtatctagcaatgtaggtgatgtcatgtcattttcagtgactgtcactaccatccctgctagccaagctatgaatcccagcagccatggccagaccattcctgttcaggcgttctccgaagagaacagcatagagggcacgccttcgaaatgttactgccgcttgaaagccatgatcatgtgcaaaggctgtggcgctttctgccatgatgattgcatcggcccctccaaactgtgcgtctcctgccttgtcgttcggtaa

SEQ ID NO: 1125 - DNA, 8889 bp, Homo sapiens
  source 1..8889: mol_type = unassigned DNA
gtacagtaagaacccaatatggcagcggcggtagcagtggcaacggcagcaagaggaccggccgccccatagacccccccgcgcaccacccccgccgcttcctctgcttgggtgcccccccggtctgacttcccttttctcccacctttcccggcaccgcgggaaaagcagcgcagggcagagcaggcagggagggcggccggagcccggacacgggagcctcccagtcagttcaagacccgacatgagggaaaagggacgtaggaagaagggcaggacctgggcggaggccgccaagacggtcttagaaaaataccccaatacacccatgagtcataaagaaattcttcaagttatccagagagaaggactaaaagaaatcagcagtgggacttctcctcttgcatgcctgaatgcaatgcttcacacaaactccagaggtgaagagggcatcttctataaggttccaggtagaatgggagtatatactttgaagaaagatgtgccggatggggtgaaagagctgtcagaaggttcagaagaaagcagtgatggtcagtcagattcccagagttctgagaacagcagcagcagcagtgatggtggcagcaacaaggagggaaaaaagagcaggtggaaaaggaaagtatcgtcgtcctccccgcagtcaggctgcccatcacccaccattccagcaggtaaagtcatttctccatcacagaagcacagcaagaaggcactaaagcaggcgctaaagcagcaacagcagaagaagcagcagcagcaatgcaggccaagcatatccatctcctccaaccagcatctctcactaaagactgtcaaagcagccagtgactctgtacctgccaaacctgcaacatgggaaggaaagcaatctgatggacagacaggcagccctcaaaactcaaactccagcttttcttcctcagttaaagtggaaaatactttactaggcttggggaagaagtcattccagagatctgagagactccataccagacaaatgaaaagaactaaatgtgctgacattgacgttgagacaccggactccattctggttaatacaaatctgcgagcactgatcaacaagcacacattttcagtccttcctggagattgccagcaacgactgcttttactactcccagaggtagatcgacaggttggtccagatggtttaatgaagttaaatggctcagcccttaacaatgaattcttcacttcagcagcccaaggctggaaggaaagactctcagaaggtgagtttacacctgagatgcaggtgagaattcgacaagagattgagaaggagaaaaaagtggagccatggaaagaacaattctttgaaagctactatgggcagagttctggcctgagccttgaagattctaagaaattgacagcttctcccagtgatcccaaagtaaagaaaaccccagctgaacaaccaaaatccatgcctgtgtcagaggcctctcttatcagaatagttccagtagtctcccagtcagagtgtaaagaagaagcattgcaaatgtcatcaccaggcagaaaagaagagtgtgaaagccaaggtgaagtgcagccgaacttctccacatcttcagagcccctgctttcctcagctctcaatacacatgagcttagcagcattcttcccatcaagtgcccaaaggatgaggatctcttggagcagaagccagtcacctctgctgaacaggaatctgagaagaaccatctcaccacagcttctaattataacaaaagtgaaagccaagaatctttagttacatcgccaagcaaacccaagagtcctggggttgaaaaaccaatagtgaagcccacagcaggagcgggtccacaggagactaatatgaaagaacctctagcaactcttgttgatcagagcccagaaagcctcaagaggaagtcttccctcacccaagaagaggcccctgtgagctgggagaagaggccacgtgtcactgagaatcgccagcaccagcagccatttcaggtctcaccacagccctttctcaatagaggggacagaatccaggtgcgaaaagtaccacctctcaagatcccggtctccagaatctcccccatgccgtttcatccatcgcaggtctctcccagggctcgttttccagtctccatcactagtcctaacagaacaggagccagaactcttgcagacatcaaagcaaaagcccaactggtcaaagcacagagggcagcagctgccgctgccgccgcagctgctgcagccgcctcagttggagggaccattccaggacctggcccagggggtggacaaggtccaggagagggtggtgaagggcagactgctagaggaggcagtccaggctcagacagagtcagtgaaactggaaagggccccacactggaactggcaggaactggaagcaggggaggtacgagagagcttttaccctgtggtccagagactcagccccagtctgagaccaagaccaccccaagccaggcacagcctcatagtgtctctggagcacaactacagcaaacccccccagtgcctccaacacctgccgtcagtggagcatgcacaagtgtcccatcaccagcccacatagagaaattggataatgaaaaactgaaccccaccagagcaacagccacagtggcctctgtcagccatccacaagggcccagtagttgcagacaggagaaagcaccttctccaacaggtcctgctctaatctcaggtgcctcacctgttcattgtgcagctgatggcacagttgagctcaaagcaggtcctagtaagaatatacctaacccttcagcctcatcaaagacagatgctagtgtgccagtggctgtaactccctcccctttaacatctttattgaccacagccactttagaaaagcttcctgtaccccaggtcagtgcaactacagcacctgctggatcagctccaccctcgagcactttgccagcagcttctagccttaaaaccccaggaacttctttaaacatgaatggacccactttaagaccaacctctagtatccctgctaataatcctttagtgactcagctgcttcaaggcaaagatgttcccatggagcaaattctgcctaaacctctcaccaaagttgaaatgaaaacggttccactgactgcaaaagaggaaagggggatgggagcgctcatagctaccaacacaacagaaaatagcaccagagaggaagttaatgagagacagtcccatccagctacgcagcagcagctgggcaaaaccttgcaaagtaagcagctcccccaggttccaaggccccttcagctcttttcagctaaggagctgagggactccagcattgacacacaccaataccacgaaggactaagtaaagcaacccaagatcagatccttcagactctcattcagagggttcggaggcagaatcttctctcagttgtgccgccctcacagttcaacttcgctcactcaggtttccagctggaagacatctccacaagccagaggttcatgctgggttttgctggcagaaggacatccaaacctgcaatggcagggcactacttactgaatatttctacctacggccggggctcagagagctttaggaggacccattctgtaaaccctgaagatcgtttttgtctaagcagccccactgaagccttgaaaatgggatatacagactgtaaaaatgcaacaggagagagtagcagcagcaaagaagatgacactgatgaggaaagtactggtgatgagcaggaatctgtcacagtgaaagaggagccccaggtttcccagagtgctggcaagggtgacacaagttcaggacctcacagcagggaaactctatctaccagtgattgcttagctagcaagaatgtgaaggctgagataccattgaatgagcaaaccactttaagtaaggagaattacctgttcactagaggccaaacatttgatgaaaagaccctagccagagatttaattcaggcagcacagaagcagatggctcatgcagtgagaggtaaggcaatccgtagcagccccgagcttttcagttctactgttcttcctctgcctgcagacagccccacccaccagcccctactccttccacccctgcaaaccccgaagttgtatggaagccccacccagatagggccaagctatagaggcatgatcaatgtctccacctcatctgacatggaccataactctgctgtaccaggtagccaggtatctagcaatgtaggtgatgtcatgtcattttcagtgactgtcactaccatccctgctagccaagctatgaatcccagcagccatggccagaccattcctgttcaggcgttctccgaagagaacagcatagagggcacgccttcgaaatgttactgccgcttgaaagccatgatcatgtgcaaaggctgtggcgctttctgccatgatgattgcatcggcccctccaaactgtgcgtctcctgccttgtcgttcggtaatgagactagaaagagatacactgtaaaggagggggaagggaagggttgaccagttgggttttttgcgtccttttggaatcacagaaataaacaagtaggtttcagttgtcttcagagacaaatgttacttaatcaggaatacaaagtacagattttttacattttagaggaagagcaccttgtatagtaagtctaagtcaagcaagactttgtgaatttgtgacaagtttgcacttacaaaatcatgtaaatatgtcacattttgtttaacattatttttccaagtgtttaggtaataatgtattactttgaattcagattaatgttctactacttgtgactgagaaaagtttaatgccggcatggtaaaaggaagctgtctcccttctgacatttcctaggaagctaggaaaaggaaagtgaaggaatggtctaaagaaatgaccattcacactgattttgtctggacagtctggccgcaggttattcatagattattcagcctttgcaggacttggattcagggttttactcagtccctttaccttaggtggaatcttcttaaattgaaatttttggtaaggaattcatttcacaggtagtgtttcagactctgaaagccctgacttggttcttggcttctactgtactagttactagttactggtactgttgccaagcaatctgcttggaatttgtggatccctgctgttccctaatcccaccccctgccctgagacagtgaatgtagtccgtgaagggagtgcctctctgggaccccctgtgttgttacaggctgtgcagtgcaacaattccagcaaaaataccctatccccgcacttagtcattcgtggtaactaacaattttgaaatactcatataaaatgaacaggaaagtgttagtgattgggtgatttgagctacatcttgttgagcaaggggagtgaaaccacagaaactgttaaattgaacgtaaataactttggaaaacagttttgacactagaacaaggtcgcttctcttttcctcttctctcccaacctgttaacctagtgctagatagtcagctgctgttgcaggtagaaaagctcaccaatgccacatttgttcattctgttcaacctgttttgacctcccaggcatctgaacaggatgacatcatcttattatatcttactttacacatacgtgtatgtacacacacacacacaatacaagacatttttcctgttttagaaaatatagcccttgtttggattactgctgtctgagcactagaaatttctaatggaaagaggcctctgaatggctaagggaacatctggaaaggaaggaaaatgagccctaaaggttttttggttgcttgtttttgtttctttttctttcttgtttccttttttgtttttaaatccttctctagtgactgaagaaattgtgagtacataatatttaggtcatggttaaggaacattaaaataaacctgcagtttaacagaattttgtattaaatgggggagtgtcaatttgcatcatttgcatattgatttcaagtctcctaatttggaatgggtaaagtacaaatgttaatgcaacatagtacagttgtatttgtccttcatattcaggatgtgatatttacaaaatgcagaacagtttaaacttgttaagtcacattccagattaggagaaaatgggcaataatcatctctgttttgcccccattctactacccaccactgcccaccccacccccacatcacacactcttcgatgctttcccacagcccctgctccgctcctctccgtaagaaactcacttcactgtttttcacttttcacttctggcttttttgtggcccaaggccaatataggattaatatctgtgttccagcttcagccagaacgatatgtctgtccatctttctcctttcttccagcacacacagctaagagataagaaggctgcaaggattggggataaggagtatattttcaagccaagaaccagtagaaaacagaaataatggtgctcccaaatattcagtaccttgggcaatccaggaagggtttaaagagacctgttgctgcatagaactctccctgccctaccccttaactccaccttagtgccagggccgagggctggtctgcatgctggaagaggttgagagttttggaattgattccatgctaaatgtcagttaccagtttggattgatgaaagtgatttttctgctttacctttttcctgtcagaaaggttttcctctgtgctacccttaacttagggatgaacagactataactaggaaaggaggaaaggtatcagggatttttaagtccgtttagagagcaaaccatattgtgcctcttcatcttgacccaggctcttatagataggtcctaaacattgctgttcactagattatcttaacaaataatactcagctaaatatttgcatttaggaatactcctaaaacagatattgccaactagatacactgcctcaatcttgaccagacaagagaacagttaagttctctcagttgggtagtaacttgaataccagtctatttatcagttggtttcaacacagaggtttcaagtggaaagccattcatcttaaaagctgaacagaaaaattaaaaaaaaaaaaaacacattacaatctggccttttagaaaatgaagcagtagaaacaaaacctttattagtatggtattccagcagcacctttaaagcaatctttaccttagttttttgagttgttttacctttcatcccaatctgaaaagttttaataaatgctgagcttattcttagggtatgacctggcattatttccagtgactagtcaggcattatgcctgatgcatacgcctcccgtgcacccctatctagccttcagatgtcctccactgcaggtcaccccaggagatagcatcaataatatagtctcagtcttgtttataaagattctaagttgtctagtaaataagtctccctgaatcttaaataattttggagaattagaattctccatcctattaaacagaaagtaaagccaaatagcctggagttgtttgtcctacttgttccataacccctatgctcaagatactgaagctatctgtggtatttcatgtaacatttctaagaataagagctggcaaatgggaaacttggggtggagagagcatacttattgggctgtgaaggcatacggatgtacatgttttagagcttatctcagatttaaatagccaaaggaagacctcattgccttccaggtgaaggtgcaaagtcatacatattaatgacctgacagttaacattctgttgtttattattgcctttctccaccttagagagccataaataactctctggtgaagtgatttgctataatgggggtgaggagtggggagacttctctggtcattacactgctatttatttctagaactcactatcagtgagcagtgccagagtgttttctctttgacctagaggtttcacatcatagcaaggagggaaaagtctccccatctccttacaactgtgtgctaagtaagtaacttggccaagggtagttttcagctcaatttatagaatagtccaaagagactttgagaaacatggtgataggcaggggcctttcctaccatgtttcaatacctacaaacctattgaaagagaacagtaggtaaaacatttcctaaagttgaagcaatagcttcgtagattcttggttactttattttttttaatgctttacatttgatacaactattgaagatcaattttaaaaatagctttccagtaatatattttaagtaatatatattttaatatctgtaaaaagtgacagtggaagactttgaatttctcatatatggtatgtttgatgtaggacctcactgttaaggcacaaattatttcaaaggaagttactctaaagacactcagattatttcagaaaaatgcaataaggggaatagttttggggtttattttttattttaaaagaaaattgacttatttaccacaagctatttttttcccttctggctgtaaggtttgtacagactggtttggtaaatgctaaacttttgtgtcttttgcctttttaaaggaattgttaacattggaattgagggtatgtacagagaagttggtgtcaacaccatttaaaaagtcatattttttcacaaatatagaaaatcattttacataagaattttaagtatttgcaataaatatatgtatatagattgtatgtattcctatattcttatttttcattttattattaagtaaaagatcattaaaagtg

SEQ ID NO: 1126 - DNA, 3299 bp, Homo sapiens
  source 1..3299: mol_type = unassigned DNA
tcctccaggatgcattgagttttttcacttaaatcaaagtggctcccgcctgggcaacagatatcgtcgtcctccccgcagtcaggctgcccatcacccaccattccagcaggtaaagtcatttctccatcacagaagcacagcaagaaggcactaaagcaggcgctaaagcagcaacagcagaagaagcagcagcagcaatgcaggccaagcatatccatctcctccaaccagcatctctcactaaagactgtcaaagcagccagtgactctgtacctgccaaacctgcaacatgggaaggaaagcaatctgatggacagacaggcagccctcaaaactcaaactccagcttttcttcctcagttaaagtggaaaatactttactaggcttggggaagaagtcattccagagatctgagagactccataccagacaaatgaaaagaactaaatgtgctgacattgacgttgagacaccggactccattctggttaatacaaatctgcgagcactgatcaacaagcacacattttcagtccttcctggagattgccagcaacgactgcttttactactcccagaggtagatcgacaggttggtccagatggtttaatgaagttaaatggctcagcccttaacaatgaattcttcacttcagcagcccaaggctggaaggaaagactctcagaaggtgagtttacacctgagatgcaggtgagaattcgacaagagattgagaaggagaaaaaagtggagccatggaaagaacaattctttgaaagctactatgggcagagttctggcctgagccttgaagattctaagaaattgacagcttctcccagtgatcccaaagtaaagaaaaccccagctgaacaaccaaaatccatgcctgtgtcagaggcctctcttatcagaatagttccagtagtctcccagtcagagtgtaaagaagaagcattgcaaatgtcatcaccaggcagaaaagaagagtgtgaaagccaaggtgaagtgcagccgaacttctccacatcttcagagcccctgctttcctcagctctcaatacacatgagcttagcagcattcttcccatcaagtgcccaaaggatgaggatctcttggagcagaagccagtcacctctgctgaacaggaatctgagaagaaccatctcaccacagcttctaattataacaaaagtgaaagccaagaatctttagttacatcgccaagcaaacccaagagtcctggggttgaaaaaccaatagtgaagcccacagcaggagcgggtccacaggagactaatatgaaagaacctctagcaactcttgttgatcagagcccagaaagcctcaagaggaagtcttccctcacccaagaagaggcccctgtgagctgggagaagaggccacgtgtcactgagaatcgccagcaccagcagccatttcaggtctcaccacagccctttctcaatagaggggacagaatccaggtgcgaaaagtaccacctctcaagatcccggtctccagaatctcccccatgccgtttcatccatcgcaggtctctcccagggctcgttttccagtctccatcactagtcctaacagaacaggagccagaactcttgcagacatcaaagcaaaagcccaactggtcaaagcacagagggcagcagctgccgctgccgccgcagctgctgcagccgcctcagttggagggaccattccaggacctggcccagggggtggacaaggtccaggagagggtggtgaagggcagactgctagaggaggcagtccaggctcagacagagtcagtgaaactggaaagggccccacactggaactggcaggaactggaagcaggggaggtacgagagagcttttaccctgtggtccagagactcagccccagtctgagaccaagaccaccccaagccaggcacagcctcatagtgtctctggagcacaactacagcaaacccccccagtgcctccaacacctgccgtcagtggagcatgcacaagtgtcccatcaccagcccacatagagaaattggataatgaaaaactgaaccccaccagagcaacagccacagtggcctctgtcagccatccacaagggcccagtagttgcagacaggagaaagcaccttctccaacaggtttccagctggaagacatctccacaagccagaggttcatgctgggttttgctggcagaaggacatccaaacctgcaatggcagggcactacttactgaatatttctacctacggccggggctcagagagctttaggaggacccattctgtaaaccctgaagatcgtttttgtctaagcagccccactgaagccttgaaaatgggatatacagactgtaaaaatgcaacaggagagagtagcagcagcaaagaagatgacactgatgaggaaagtactggtgatgagcaggaatctgtcacagtgaaagaggagccccaggtttcccagagtgctggcaagggtgacacaagttcaggacctcacagcagggaaactctatctaccagtgattgcttagctagcaagaatgtgaaggctgagataccattgaatgagcaaaccactttaagtaaggagaattacctgttcactagaggccaaacatttgatgaaaagaccctagccagagatttaattcaggcagcacagaagcagatggctcatgcagtgagaggtaaggcaatccgtagcagccccgagcttttcagttctactgttcttcctctgcctgcagacagccccacccaccagcccctactccttccacccctgcaaaccccgaagttgtatggaagccccacccagatagggccaagctatagaggcatgatcaatgtctccacctcatctgacatggaccataactctgctgtaccaggtagccaggtatctagcaatgtaggtgatgtcatgtcattttcagtgactgtcactaccatccctgctagccaagctatgaatcccagcagccatggccagaccattcctgttcaggcgttctccgaagagaacagcatagagggcacgccttcgaaatgttactgccgcttgaaagccatgatcatgtgcaaaggctgtggcgctttctgccatgatgattgcatcggcccctccaaactgtgcgtctcctgccttgtcgttcggtaatgagactagaaagagatacactgtaaaggagggggaagggaagggttgaccagttgggttttttgcgtccttttggaatcacagaaataaacaagtaggtttca

SEQ ID NO: 1127 - DNA, 8943 bp, Homo sapiens
  source 1..8943: mol_type = unassigned DNA
acagtagtgacggccgcgcgggagcggtcacatgaccgtagcggcagcctgtacagtaagaacccaatatggcagcggcggtagcagtggcaacggcagcaagaggaccggccgccccatagacccccccgcgcaccacccccgccgcttcctctgcttgggtgcccccccggtctgacttcccttttctcccacctttcccggcaccgcgggaaaagcagcgcagggcagagcaggcagggagggcggccggagcccggacacgggagcctcccagtcagttcaagacccgacatgagggaaaagggacgtaggaagaagggcaggacctgggcggaggccgccaagacggtcttagaaaaataccccaatacacccatgagtcataaagaaattcttcaagttatccagagagaaggactaaaagaaatcagaagtgggacttctcctcttgcatgcctgaatgcaatgcttcacacaaactccagaggtgaagagggcatcttctataaggttccaggtagaatgggagtatatactttgaagaaagatgtgccggatggggtgaaagagctgtcagaaggttcagaagaaagcagtgatggtcagtcagattcccagagttctgagaacagcagcagcagcagtgatggtggcagcaacaaggagggaaaaaagagcaggtggaaaaggaaagtatcgtcgtcctccccgcagtcaggctgcccatcacccaccattccagcaggtaaagtcatttctccatcacagaagcacagcaagaaggcactaaagcaggcgctaaagcagcaacagcagaagaagcagcagcagcaatgcaggccaagcatatccatctcctccaaccagcatctctcactaaagactgtcaaagcagccagtgactctgtacctgccaaacctgcaacatgggaaggaaagcaatctgatggacagacaggcagccctcaaaactcaaactccagcttttcttcctcagttaaagtggaaaatactttactaggcttggggaagaagtcattccagagatctgagagactccataccagacaaatgaaaagaactaaatgtgctgacattgacgttgagacaccggactccattctggttaatacaaatctgcgagcactgatcaacaagcacacattttcagtccttcctggagattgccagcaacgactgcttttactactcccagaggtagatcgacaggttggtccagatggtttaatgaagttaaatggctcagcccttaacaatgaattcttcacttcagcagcccaaggctggaaggaaagactctcagaaggtgagtttacacctgagatgcaggtgagaattcgacaagagattgagaaggagaaaaaagtggagccatggaaagaacaattctttgaaagctactatgggcagagttctggcctgagccttgaagattctaagaaattgacagcttctcccagtgatcccaaagtaaagaaaaccccagctgaacaaccaaaatccatgcctgtgtcagaggcctctcttatcagaatagttccagtagtctcccagtcagagtgtaaagaagaagcattgcaaatgtcatcaccaggcagaaaagaagagtgtgaaagccaaggtgaagtgcagccgaacttctccacatcttcagagcccctgctttcctcagctctcaatacacatgagcttagcagcattcttcccatcaagtgcccaaaggatgaggatctcttggagcagaagccagtcacctctgctgaacaggaatctgagaagaaccatctcaccacagcttctaattataacaaaagtgaaagccaagaatctttagttacatcgccaagcaaacccaagagtcctggggttgaaaaaccaatagtgaagcccacagcaggagcgggtccacaggagactaatatgaaagaacctctagcaactcttgttgatcagagcccagaaagcctcaagaggaagtcttccctcacccaagaagaggcccctgtgagctgggagaagaggccacgtgtcactgagaatcgccagcaccagcagccatttcaggtctcaccacagccctttctcaatagaggggacagaatccaggtgcgaaaagtaccacctctcaagatcccggtctccagaatctcccccatgccgtttcatccatcgcaggtctctcccagggctcgttttccagtctccatcactagtcctaacagaacaggagccagaactcttgcagacatcaaagcaaaagcccaactggtcaaagcacagagggcagcagctgccgctgccgccgcagctgctgcagccgcctcagttggagggaccattccaggacctggcccagggggtggacaaggtccaggagagggtggtgaagggcagactgctagaggaggcagtccaggctcagacagagtcagtgaaactggaaagggccccacactggaactggcaggaactggaagcaggggaggtacgagagagcttttaccctgtggtccagagactcagccccagtctgagaccaagaccaccccaagccaggcacagcctcatagtgtctctggagcacaactacagcaaacccccccagtgcctccaacacctgccgtcagtggagcatgcacaagtgtcccatcaccagcccacatagagaaattggataatgaaaaactgaaccccaccagagcaacagccacagtggcctctgtcagccatccacaagggcccagtagttgcagacaggagaaagcaccttctccaacaggtcctgctctaatctcaggtgcctcacctgttcattgtgcagctgatggcacagttgagctcaaagcaggtcctagtaagaatatacctaacccttcagcctcatcaaagacagatgctagtgtgccagtggctgtaactccctcccctttaacatctttattgaccacagccactttagaaaagcttcctgtaccccaggtcagtgcaactacagcacctgctggatcagctccaccctcgagcactttgccagcagcttctagccttaaaaccccaggaacttctttaaacatgaatggacccactttaagaccaacctctagtatccctgctaataatcctttagtgactcagctgcttcaaggcaaagatgttcccatggagcaaattctgcctaaacctctcaccaaagttgaaatgaaaacggttccactgactgcaaaagaggaaagggggatgggagcgctcatagctaccaacacaacagaaaatagcaccagagaggaagttaatgagagacagtcccatccagctacgcagcagcagctgggcaaaaccttgcaaagtaagcagctcccccaggttccaaggccccttcagctcttttcagctaaggagctgagggactccagcattgacacacaccaataccacgaaggactaagtaaagcaacccaagatcagatccttcagactctcattcagagggttcggaggcagaatcttctctcagttgtgccgccctcacagttcaacttcgctcactcaggtttccagctggaagacatctccacaagccagaggttcatgctgggttttgctggcagaaggacatccaaacctgcaatggcagggcactacttactgaatatttctacctacggccggggctcagagagctttaggaggacccattctgtaaaccctgaagatcgtttttgtctaagcagccccactgaagccttgaaaatgggatatacagactgtaaaaatgcaacaggagagagtagcagcagcaaagaagatgacactgatgaggaaagtactggtgatgagcaggaatctgtcacagtgaaagaggagccccaggtttcccagagtgctggcaagggtgacacaagttcaggacctcacagcagggaaactctatctaccagtgattgcttagctagcaagaatgtgaaggctgagataccattgaatgagcaaaccactttaagtaaggagaattacctgttcactagaggccaaacatttgatgaaaagaccctagccagagatttaattcaggcagcacagaagcagatggctcatgcagtgagaggtaaggcaatccgtagcagccccgagcttttcagttctactgttcttcctctgcctgcagacagccccacccaccagcccctactccttccacccctgcaaaccccgaagttgtatggaagccccacccagatagggccaagctatagaggcatgatcaatgtctccacctcatctgacatggaccataactctgctgtaccaggtagccaggtatctagcaatgtaggtgatgtcatgtcattttcagtgactgtcactaccatccctgctagccaagctatgaatcccagcagccatggccagaccattcctgttcaggcgttctccgaagagaacagcatagagggcacgccttcgaaatgttactgccgcttgaaagccatgatcatgtgcaaaggctgtggcgctttctgccatgatgattgcatcggcccctccaaactgtgcgtctcctgccttgtcgttcggtaatgagactagaaagagatacactgtaaaggagggggaagggaagggttgaccagttgggttttttgcgtccttttggaatcacagaaataaacaagtaggtttcagttgtcttcagagacaaatgttacttaatcaggaatacaaagtacagattttttacattttagaggaagagcaccttgtatagtaagtctaagtcaagcaagactttgtgaatttgtgacaagtttgcacttacaaaatcatgtaaatatgtcacattttgtttaacattatttttccaagtgtttaggtaataatgtattactttgaattcagattaatgttctactacttgtgactgagaaaagtttaatgccggcatggtaaaaggaagctgtctcccttctgacatttcctaggaagctaggaaaaggaaagtgaaggaatggtctaaagaaatgaccattcacactgattttgtctggacagtctggccgcaggttattcatagattattcagcctttgcaggacttggattcagggttttactcagtccctttaccttaggtggaatcttcttaaattgaaatttttggtaaggaattcatttcacaggtagtgtttcagactctgaaagccctgacttggttcttggcttctactgtactagttactagttactggtactgttgccaagcaatctgcttggaatttgtggatccctgctgttccctaatcccaccccctgccctgagacagtgaatgtagtccgtgaagggagtgcctctctgggaccccctgtgttgttacaggctgtgcagtgcaacaattccagcaaaaataccctatccccgcacttagtcattcgtggtaactaacaattttgaaatactcatataaaatgaacaggaaagtgttagtgattgggtgatttgagctacatcttgttgagcaaggggagtgaaaccacagaaactgttaaattgaacgtaaataactttggaaaacagttttgacactagaacaaggtcgcttctcttttcctcttctctcccaacctgttaacctagtgctagatagtcagctgctgttgcaggtagaaaagctcaccaatgccacatttgttcattctgttcaacctgttttgacctcccaggcatctgaacaggatgacatcatcttattatatcttactttacacatacgtgtatgtacacacacacacacaatacaagacatttttcctgttttagaaaatatagcccttgtttggattactgctgtctgagcactagaaatttctaatggaaagaggcctctgaatggctaagggaacatctggaaaggaaggaaaatgagccctaaaggttttttggttgcttgtttttgtttctttttctttcttgtttccttttttgtttttaaatccttctctagtgactgaagaaattgtgagtacataatatttaggtcatggttaaggaacattaaaataaacctgcagtttaacagaattttgtattaaatgggggagtgtcaatttgcatcatttgcatattgatttcaagtctcctaatttggaatgggtaaagtacaaatgttaatgcaacatagtacagttgtatttgtccttcatattcaggatgtgatatttacaaaatgcagaacagtttaaacttgttaagtcacattccagattaggagaaaatgggcaataatcatctctgttttgcccccattctactacccaccactgcccaccccacccccacatcacacactcttcgatgctttcccacagcccctgctccgctcctctccgtaagaaactcacttcactgtttttcacttttcacttctggcttttttgtggcccaaggccaatataggattaatatctgtgttccagcttcagccagaacgatatgtctgtccatctttctcctttcttccagcacacacagctaagagataagaaggctgcaaggattggggataaggagtatattttcaagccaagaaccagtagaaaacagaaataatggtgctcccaaatattcagtaccttgggcaatccaggaagggtttaaagagacctgttgctgcatagaactctccctgccctaccccttaactccaccttagtgccagggccgagggctggtctgcatgctggaagaggttgagagttttggaattgattccatgctaaatgtcagttaccagtttggattgatgaaagtgatttttctgctttacctttttcctgtcagaaaggttttcctctgtgctacccttaacttagggatgaacagactataactaggaaaggaggaaaggtatcagggatttttaagtccgtttagagagcaaaccatattgtgcctcttcatcttgacccaggctcttatagataggtcctaaacattgctgttcactagattatcttaacaaataatactcagctaaatatttgcatttaggaatactcctaaaacagatattgccaactagatacactgcctcaatcttgaccagacaagagaacagttaagttctctcagttgggtagtaacttgaataccagtctatttatcagttggtttcaacacagaggtttcaagtggaaagccattcatcttaaaagctgaacagaaaaattaaaaaaaaaaaaaacacattacaatctggccttttagaaaatgaagcagtagaaacaaaacctttattagtatggtattccagcagcacctttaaagcaatctttaccttagttttttgagttgttttacctttcatcccaatctgaaaagttttaataaatgctgagcttattcttagggtatgacctggcattatttccagtgactagtcaggcattatgcctgatgcatacgcctcccgtgcacccctatctagccttcagatgtcctccactgcaggtcaccccaggagatagcatcaataatatagtctcagtcttgtttataaagattctaagttgtctagtaaataagtctccctgaatcttaaataattttggagaattagaattctccatcctattaaacagaaagtaaagccaaatagcctggagttgtttgtcctacttgttccataacccctatgctcaagatactgaagctatctgtggtatttcatgtaacatttctaagaataagagctggcaaatgggaaacttggggtggagagagcatacttattgggctgtgaaggcatacggatgtacatgttttagagcttatctcagatttaaatagccaaaggaagacctcattgccttccaggtgaaggtgcaaagtcatacatattaatgacctgacagttaacattctgttgtttattattgcctttctccaccttagagagccataaataactctctggtgaagtgatttgctataatgggggtgaggagtggggagacttctctggtcattacactgctatttatttctagaactcactatcagtgagcagtgccagagtgttttctctttgacctagaggtttcacatcatagcaaggagggaaaagtctccccatctccttacaactgtgtgctaagtaagtaacttggccaagggtagttttcagctcaatttatagaatagtccaaagagactttgagaaacatggtgataggcaggggcctttcctaccatgtttcaatacctacaaacctattgaaagagaacagtaggtaaaacatttcctaaagttgaagcaatagcttcgtagattcttggttactttattttttttaatgctttacatttgatacaactattgaagatcaattttaaaaatagctttccagtaatatattttaagtaatatatattttaatatctgtaaaaagtgacagtggaagactttgaatttctcatatatggtatgtttgatgtaggacctcactgttaaggcacaaattatttcaaaggaagttactctaaagacactcagattatttcagaaaaatgcaataaggggaatagttttggggtttattttttattttaaaagaaaattgacttatttaccacaagctatttttttcccttctggctgtaaggtttgtacagactggtttggtaaatgctaaacttttgtgtcttttgcctttttaaaggaattgttaacattggaattgagggtatgtacagagaagttggtgtcaacaccatttaaaaagtcatattttttcacaaatatagaaaatcattttacataagaattttaagtatttgcaataaatatatgtatatagattgtatgtattcctatattcttatttttcattttattattaagtaaaagatcattaaaagtgaaaa

SEQ ID NO: 1128 - DNA, 7620 bp, Homo sapiens
  source 1..7620: mol_type = unassigned DNA
gagcaccccgtggaatcccccacgtcatcatcagaaccatcaatgagatgcaaacatgaaagacaagaggaagaagaaggaccgcacctgggccgaggctgcccgcctggcactagaaaaacaccccaactcaccaatgacagcaaagcagatattggaagtcattcagaaagaagggttaaaagaaacaagtggaacctctccattagcctgtctgaatgcaatgcttcacactaacactcgaataggggatggaacattcttcaaaatccctggaaagtcaggcctctatgctctcaaaaaagaggagtcgtcatgcccagcagatggcacgttggatttagtctgtgaatctgaattggatggtacagatatggccgaggcaaatgcccatggagaagaaaatggagtttgttcgaagcaggtaactgatgaagcatcttccactcgagattcaagccttactaacacagcagtgcaaagcaagttagtgtcttccttccagcagcacaccaaaaaggctcttaaacaggctttgaggcagcagcagaaaagaagaaatggagtctcaatgatggtaaacaagactgttcctcgtgttgttttgacaccattaaaggtgtctgatgagcagtcggattcgccttcaggatctgaatctaaaaatggtgaagcagacagttcagataaagaaatgaaacatgggcaaaaatctcccactggaaaacaaacaagtcagcacttaaaacgattaaaaaagtctggtttagggcacttgaaatggaccaaagctgaggacattgacatagaaaccccaggatctattcttgtcaacactaacttgagggcattaataaataaacatacgtttgcttccttacctcagcattttcaacaatacctcctgcttttgctcccagaagtggataggcagatgggaagtgatggaattttacgcctcagtacttcagctctaaataatgaattctttgcatatgcagcacaagggtggaaacagcgactggcagaaggagagtttaccccagaaatgcagttgcggataaggcaagaaattgagaaggaaaagaaaacagaaccttggaaagaaaaattctttgagaggttttatggagaaaagctgggcatgtcaagagaggaatctgtgaagctcactactggaccaaacaacgctggagctcaaagtagttcttcatgtgggacttctggccttccagtttctgcacagacagccttggcagaacaacagccaaaaagcatgaaaagcccagcttctccagagcctggtttctgtgctactctttgccctatggtagaaattccacctaaagatataatggcagaattggagtcagaggatatcttgatccctgaagaatctgtaattcaggaggaaattgcagaagaggtagagactagtatctgtgaatgccaggatgaaaatcataagacaatacctgaattttctgaggaggctgaaagtctaaccaattctcatgaagaaccccaaatagcacctcctgaagataacttggaatcctgtgttatgatgaatgatgttttagaaactttgcctcatattgaagttaagatagaagggaagtcagaatcaccccaggaagaaatgacagttgttatcgatcagttagaagtctgtgactctcttattccttccacttcatctatgactcatgtcagtgacacagaacataaggagtcagaaactgcagtagagaccagtacccccaaaataaaaacagggtcatcttctctagaaggccagtttccaaatgaaggaattgctatagatatggagctacagagtgaccctgaagaacagctttcagaaaatgcctgcatctctgaaacgtccttttcttctgagagcccagagggagcctgtaccagcctgccttctccaggaggggaaacacagtccacatcagaagaatcatgtactccagcctcccttgagacaacattttgttctgaggtatctagcactgaaaatacagacaaatacaaccagagaaattccactgatgaaaactttcatgcatctttgatgtcagaaatatctccaatatccacttcacctgaaatatcagaagcatctcttatgtccaacttaccattaacatctgaagcatcaccagtatccaacttacctttaacatcagaaacctcaccgatgtctgacttacctttaacatcagaaacttcttcagtgtcttccatgcttctcacctctgagaccacttttgtatccagtttgccacttccttcagaaacatctccaatttccaactcttccataaatgagagaatggcacatcagcaaagaaagtcaccttctgtatctgaagagccactctccccgcagaaagatgagtcttccgccactgccaaacctctgggagagaaccttacctcccagcagaagaatctgtctaatactcccgaacccatcataatgagttcttcttccattgctcctgaagcatttccgtctgaagatttgcacaataagaccctgagtcagcaaacctgtaaatcacatgttgacactgagaagccctaccctgcttcaattccagaacttgcttctactgaaatgataaaagttaaaaatcatagcgtcctgcaaagaacagaaaaaaaagtgttaccttcaccattggaattatctgtcttttctgaagggacagataataagggaaatgagcttccatctgctaaattacaggacaagcaatatatctcatcagtggataaggctccattttcagaaggctctagaaataaaacacataagcaagggagtacacagagtcggttagaaacctcacatacttccaagtcatcagagccctccaagtcacctgatgggataagaaatgaaagtagagattcagagatatcaaagagaaaaactgcagagcaacacagctttggaatctgtaaggaaaagagagctaggatagaagatgatcagtcaacccggaacatatcatctagcagcccacctgagaaagaacagcctcccagagaggaaccaagggttccccctctcaagattcagctttccaaaattgggccaccttttataatcaagagccaaccagtctccaaacctgagtctcgagcatccactagcacatctgtcagtggcgggaggaacacaggagccaggaccctcgcagatatcaaggcccgggcccaacaagctcgggcccagcgagaggctgctgcagctgctgctgtggctgctgcagcgagcattgtctctggagccatgggaagtccaggagagggtggaaagacgagaactctggcacacatcaaagagcagacaaaggctaagctctttgcaaagcatcaagctcgagcccatctcttccagacctctaaagagacccggttgcctcctccgctcagctcaaaggaagggcctccaaacttagaagtctcttctacccctgaaacaaaaatggaaggttcgactggtgtcattattgtcaatccaaactgtagatctcctagcaacaagtctgcccacctccgggagaccaccactgtactacagcagtctcttaacccaagtaaacttccagaaactgccactgacttatctgtgcatagttctgatgaaaacatacctgtgtcacatttatctgagaaaattgtttcatctacctcttctgaaaatagcagtgtgcccatgctttttaataaaaattctgtccctgtatctgtttgcagcactgctatatcgggagcaattaaagaacatccctttgtgagttctgttgataaatcctctgtcctaatgtctgttgacagtgcaaacactacaatttctgcttgtaatataagcatgttaaaaaccatccagggaactgacactccatgcatagccattataccaaaatgtattgaaagcactcccatttcagccactacagagggctccagcatatcaagctccatggatgataagcagttactaatatcaagcagcagtgctagtaacttagtctccactcagtacacctctgtgccaactccctccatcggaaacaatttgccaaacctctccactagctctgtcttgattcccccaatgggaattaacaacagatttccttctgagaagatagccatacctgggagtgaagaacaggccactgtatccatgggtaccactgtgagagcagccctcagctgcagtgattctgtagcggtcacagactctctggttgcacacccgaccgtcgcaatgtttactggaaacatgctgacaataaactcttatgatagtcctcccaagttaagtgctgaaagcttggacaaaaattcagggcctcgaaacagggcagataattctggaaaacctcagcaaccaccagggggctttgcaccagcagccataaaccgatcaattccgtgtaaagtcatcgttgaccacagcaccacgctgacctccagtttgtctctgactgtctccgttgaaagctcagaagccagcttggacctgcagggcagaccagtgaggacagaggcatccgtacagcccgtggcgtgtcctcaggtgtctgtgattagcaggcctgagccagttgccaacgaaggtatagatcacagttccactttcattgctgcttcggcagcaaaacaagacagtaaaacattgccggccacctgcacaagtctccgagaattaccccttgttccagataaattaaatgagccgactgctcccagtcataactttgctgagcaggcacgtggcccagctcctttcaaaagtgaagcagacacaacctgtagcaatcagtataacccaagtaaccggatttgctggaatgatgatgggatgaggagcacaggacagcctctggttactcactcgggttcaagtaaacaaaaagaatatctagagcaaagctgtccaaaggctatcaaaactgaacatgccaactacttgaacgtgtcagaacttcatcccaggaatcttgtaacaaatgttgctcttcctgtgaaatctgaacttcacgaagcagacaagggctttagaatggacactgaagacttccctggccctgagctgcctcctccggctgcagagggagcctctagtgtacaacaaacacagaacatgaaagcttccacctcaagtcccatggaagaggctatttccttggctaccgatgccctgaagagagtccctggtgcagggagctcaggctgtcgtctgtcctctgtggaggctaacaatccgctggtgacgcagttactacagggcaacctgcctttggaaaaagtgttgccacagcccagattgggagccaagcttgaaatcaacaggcttccattgcctcttcaaactacctcagtgggtaaaacagcaccagagagaaacgttgaaattccgcccagctctccaaatccagatggtaagggctacttggcagggactctggcaccactccaaatgagaaagcgagaaaaccaccccaaaaagagagtagctaggactgtaggagaacacactcaagttaaatgtgaaccaggaaaattgttggtggagccagatgttaaaggggtgccttgtgtcatcagttccggcatcagtcagctaggacacagccagccatttaagcaagaatggctaaacaagcactccatgcagaacagaattgttcacagccctgaggtcaaacagcaaaagcggctgctcccctcgtgtagcttccagcagaacctatttcatgttgacaagaatggcggcttccacactgacgctggtacctcacacagacagcagttttaccaaatgcctgtggctgccaggggccccattcctactgcagctctgttacaggcctcttccaagaccccagtggggtgtaatgcatttgccttcaacaggcatcttgaacagaagggattgggagaggttagtctttcctcagcacctcaccagctaaggttagccaacatgttatcccccaatatgcccatgaaagaaggtgatgaggtgggaggcactgcacacacaatgccaaacaaagcactagtacatccgccgccgccaccgcctccccctccccctccacccttggctttgcccccgcctccccccccaccacctccgctacctccacctctccctaatgcagaagtcccatctgatcaaaaacaacctccagttaccatggaaaccactaagagacttagttggccacagtccacgggcatatgtagcaatataaaatcggaacctctttcttttgaggaaggtttaagcagcagctgtgaactgggcatgaaacaagtttcctatgaccagaatgaaatgaaagaacagttaaaagcattcgcgctaaaaagtgcagatttctcttcctatttgctttctgagccacaaaagccttttacccaattagctgctcagaaaatgcaggtgcagcaacaacagcagctctgtggaaattatccaacaatacactttggtagcacgagtttcaaaagggcagcatctgcaattgaaaagtccattgggattttgggaagtggctccaatcctgccacaggcttgtctggtcagaacgctcagatgcccgttcagaactttgccgacagcagcaatgcagatgaattggaactgaaatgctcttgccggctgaaagccatgattgtgtgcaaaggctgtggggccttctgccatgacgactgcataggtccttcaaaactttgtgtagcatgcctggttgtacgataagagctgagtgaaagatgcagtatcccttttccacacggaaaagccaaatagcatcagcaacaacaaatagaataatgcagtggtttctatcatgctaatttattttgctttggagcaggtacctttcctctatggcattattttcttgcatttctcataaaggggaggatgcatcccaactgaatggctcactggcatgtcttttatgtgttcagttgccattcctagctttggaaagtttctatctgtccatgtgtatacaagtcaatgccccatttttgtttttcttttaaccgaggtgtagataggaaaaggacatttttaattacttaataaccggaaatgcagatgtgtaaggagaatgagaggaatgagttaaagtggttatgcatttttctatagatgagccattacagcaaggaattttacagttgacttctctgaacctagctttaccacagtgattaaatcctatttagaaaggggaatctgatttaaatgtgtgattccttgtatttgctcctatcacaaaagatatattaaaggaggtatgccattaatgaaatccactgtcctgagtattatctttcctcctgttgtactttctcagagactatggcagaatatctggatcttccttggattttgtacacatattgtagtgaaatgtgtcctacatctgaaattgcatgggactcatgcccagcaatctggttctaggcctttgacacctgataatatgagagcaattggccagccaatagccataagcccagaggattttagagcttcatgtgtggcttttaagagcaggtttg

SEQ ID NO: 1129 - DNA, 4032 bp, Homo sapiens
  source 1..4032: mol_type = unassigned DNA
gcacccaggtcgggcggtgggggcgagcggaggggctgaggggcggagaggcctggcgggccgctgctgcgggccaggggacgggggcggagccggagccggagccgacgggcggtggccgcactgggaccccggaatcccgcgcgctgcccacgattcgcttctgaggaacctagaaagattgtacaatgaatggtgattctcgtgctgcggtggtgacctcaccacccccgaccacagcccctcacaaggagaggtacttcgaccgagtagatgagaacaacccagagtacttgagggagaggaacatggcaccagaccttcgccaggacttcaacatgatggagcaaaagaagagggtgtccatgattctgcaaagccctgctttctgtgaagaattggaatcaatgatacaggagcaatttaagaaggggaagaaccccacaggcctattggcattacagcagattgcagattttatgaccacgaatgtaccaaatgtctacccagcagctccgcaaggagggatggctgccttaaacatgagtcttggtatggtgactcctgtgaacgatcttagaggatctgattctattgcgtatgacaaaggagagaagttattacggtgtaaattggcagcgttttatagactagcagatctctttgggtggtctcagcttatctacaatcatatcacaaccagagtgaactccgagcaggaacacttcctcattgtcccttttgggcttctttacagtgaagtgactgcatccagtttggttaagatcaatctacaaggagatatagtagatcgtggaagcactaatctgggagtgaatcaggccggcttcaccttacactctgcaatttatgctgcacgcccggacgtgaagtgcgtcgtgcacattcacaccccagcaggggctgcggtctctgcaatgaaatgtggcctcttgccaatctccccggaggcgctttcccttggagaagtggcttatcatgactaccatggcattctggttgatgaagaggaaaaagttttgattcagaaaaatctggggcctaaaagcaaggttcttattctccggaaccatgggctcgtgtcagttggagagagcgttgaggaggccttctattacatccataaccttgtggttgcctgtgagatccaggttcgaactctggccagtgcaggaggaccagacaacttagtcctgctgaatcctgagaagtacaaagccaagtcccgttccccagggtctccggtaggggaaggcactggatcgcctcccaagtggcagattggtgagcaggaatttgaagccctcatgcggatgctcgataatctgggctacagaactggctacccttatcgataccctgctctgagagagaagtctaaaaaatacagcgatgtggaggttcctgctagtgtcacaggttactcctttgctagtgacggtgattcgggcacttgctccccactcagacacagttttcagaagcagcagcgggagaagacaagatggctgaactctggccggggcgacgaagcttccgaggaagggcagaatggaagcagtcccaagtcgaagactaaggtgtggacgaacattacacacgatcacgtgaaacccttgctgcagtctctctcgtccggtgtctgcgtgccaagctgtattaccaactgcttgtggactaaagaggatggacatagaacttccacctctgctgtccctaacctgtttgttccattgaacactaacccaaaagaggtccaggagatgaggaacaagatccgagagcagaatttacaggacattaagacggctggccctcagtcccaggttttgtgtggtgtagtgatggacaggagcctcgtccagggagagctggtgacggcctccaaggccatcattgaaaaggagtaccagccccacgtcattgtgagcaccacgggccccaaccccttcaccacactcacagaccgtgagctggaggagtaccgcagggaggtggagaggaagcagaagggctctgaagagaatctggacgaggctagagaacagaaagaaaagagtcctccagaccagcctgcggtcccccacccgcctcccagcactcccatcaagctggaggaagaccttgtgccggagccgactactggagatgacagtgatgctgccacctttaagccaactctccccgatctgtcccctgatgaaccttcagaagcactcggcttcccaatgttagagaaggaggaggaagcccatagacccccaagccccactgaggcccctactgaggccagccccgagccagccccagacccagccccggtggctgaagaggctgccccctcagctgtcgaggagggggccgccgcggaccctggcagcgatgggtctccaggcaagtccccgtccaaaaagaagaagaagttccgtaccccgtcctttctgaagaagagcaagaagaagagtgactcctgaaagccctgcgctaacactgtcctgtccggagcgaccctggctctgccagcgtccccggccacgtctgtgctctgtccttgtgtaatggaatgcaaaaaagccaagccctccgcctagaggtcccctcacgtgaccagccccgtgtagccccgggctgacccagtgtgtgctcagcagccccaccccaccctgccccttgtcctctcagagcctcagcttctgggggagacatgctctccccacaggggggaggcactaagtcatggtcctggctggaaggtactgaaggcttctgcagctttggctgcacgtcaccctcctgagcctcacctttcctgccgtccctcctgttgtgaaatcaccacattctgtctctgcttggcttcccctccaccctaaagtctcaggtgacggactcagactcctggcttcatgtggcattctctctgctcagtgatctcacttaaatctatatacaaagccttggtcccgtgaaaacactcgtgtgcccaccagcggccttgaagaggcaggtctgggccagatgctgggcaggaaaccccagcggcagatgggcctgtgtgcacccaacgtgatgctatgcatgtctgaccgacgatccctcgaccagaatcagattcaggagctcagtttctttttcacttgggtctctggattcctgtcatagggaaggtatatcaggaggggaagaggcctttctagaattttctttgagcaggtttacaatttagcttacatttttcgactgtgaacgtgaataggctgctttttgctttcttctttccagaccccacagtagagcacttttcacttatttgggggaggcttcaggggactgttctcaccttaactcagccagaaagatgccctagttgtgatcaaaggtaactcgaggtggagggtagccctggggcccctcgacatcaccgtcattgatggagcctgaaccgtgtgctcctcggcagatgctgttgttgttacttccctccaagaggctggaaaagggctcagagctgctgagcaggaaccggagggtgacccatttcaggaggtgccggtaccagcctgactaggtacaggcaagcttgtgtgggcccaacaggcccttggtagagctggtgccagatgtgggctcagatcctgggcatgatgggccgagccacctcggatcccactgattggccagccgagcgagaaccaggctgctgcatggcactgaccgccgcttccagcttcctctgagccgcagggcctgctacgcgggcaagcgtgctgcctctcttctgtgtcgttttgttgccaaggcagaatgaaaagtccttaaccgtggactcttcctttatcccctcctttaccccacatatgcaatgacttttaattttcacttttgtagtttaatcctttgtattacaacatgaaatatagttgcatatatggacaccgacttgggaggacaggtcctgaatgtcctttctccagtgtaacatgttttactcacaaataaaattctttcagc

SEQ ID NO: 1130 - DNA, 4743 bp, Homo sapiens
  source 1..4743: mol_type = unassigned DNA
gggggcggggaggccgctgcggcgccgagggcgtcttggaggggtccccgcggggccttcggcctgggccgagccggggagcgagggcgccgcagatctttcatcgggataggaccccggggactaggcttttcccgggccgctcgttcctggccggcttgtgggctgcaggggtgggggcggaggaggacgaccctggctggacgctggtcagcatcctgcttgtgagaccggttccgcggtccgcagcgctggtggctgcaaggtttgtgtacggacgcatctgtcggctctcgtatttaaaaacgacggcttctgccaaaagagaaaagccatatctgccgacggacgctcgagagataatcgtggaactttatcagcgatggggctgttggtcacctttgccctccctctcttttcttttttcttaatcttttattttcgttttttgggagatgtcagagggcctttccctgttaggatgacttttatctttgctcttgtaatggctcaagatagttgggaggtaatttgcattcactttatgcatacccaccttgaaaaacgtattttggttcgcctgaaactgttgttggtttgagcataatttatgtttagaaagacaaaaagcaattgtcatatctccaaagaccaaagacatagctgatagctgtatgcattactggggccttttgagcagctgcttctgcaagaggacatccggagacacaggaatagaaatgatccgatcagagtaattaaaggcttttaactgagctctgaggtcccaaacagggcacactccgtcagcctaaagctgtgaagaagaaccttcaacataaggaacctagaaagattgtacaatgaatggtgattctcgtgctgcggtggtgacctcaccacccccgaccacagcccctcacaaggagaggtacttcgaccgagtagatgagaacaacccagagtacttgagggagaggaacatggcaccagaccttcgccaggacttcaacatgatggagcaaaagaagagggtgtccatgattctgcaaagccctgctttctgtgaagaattggaatcaatgatacaggagcaatttaagaaggggaagaaccccacaggcctattggcattacagcagattgcagattttatgaccacgaatgtaccaaatgtctacccagcagctccgcaaggagggatggctgccttaaacatgagtcttggtatggtgactcctgtgaacgatcttagaggatctgattctattgcgtatgacaaaggagagaagttattacggtgtaaattggcagcgttttatagactagcagatctctttgggtggtctcagcttatctacaatcatatcacaaccagagtgaactccgagcaggaacacttcctcattgtcccttttgggcttctttacagtgaagtgactgcatccagtttggttaagatcaatctacaaggagatatagtagatcgtggaagcactaatctgggagtgaatcaggccggcttcaccttacactctgcaatttatgctgcacgcccggacgtgaagtgcgtcgtgcacattcacaccccagcaggggctgcggtctctgcaatgaaatgtggcctcttgccaatctccccggaggcgctttcccttggagaagtggcttatcatgactaccatggcattctggttgatgaagaggaaaaagttttgattcagaaaaatctggggcctaaaagcaaggttcttattctccggaaccatgggctcgtgtcagttggagagagcgttgaggaggccttctattacatccataaccttgtggttgcctgtgagatccaggttcgaactctggccagtgcaggaggaccagacaacttagtcctgctgaatcctgagaagtacaaagccaagtcccgttccccagggtctccggtaggggaaggcactggatcgcctcccaagtggcagattggtgagcaggaatttgaagccctcatgcggatgctcgataatctgggctacagaactggctacccttatcgataccctgctctgagagagaagtctaaaaaatacagcgatgtggaggttcctgctagtgtcacaggttactcctttgctagtgacggtgattcgggcacttgctccccactcagacacagttttcagaagcagcagcgggagaagacaagatggctgaactctggccggggcgacgaagcttccgaggaagggcagaatggaagcagtcccaagtcgaagactaagtggactaaagaggatggacatagaacttccacctctgctgtccctaacctgtttgttccattgaacactaacccaaaagaggtccaggagatgaggaacaagatccgagagcagaatttacaggacattaagacggctggccctcagtcccaggttttgtgtggtgtagtgatggacaggagcctcgtccaggatgcacctctctctgactgtacggaaactatcgaagggctcgagcttacagagcagacctttagtcccgctaaatctctctcttttagaaagggagagctggtgacggcctccaaggccatcattgaaaaggagtaccagccccacgtcattgtgagcaccacgggccccaaccccttcaccacactcacagaccgtgagctggaggagtaccgcagggaggtggagaggaagcagaagggctctgaagagaatctggacgaggctagagaacagaaagaaaagagtcctccagaccagcctgcggtcccccacccgcctcccagcactcccatcaagctggaggaaggagacggatgcgctagagagtacctgttaccctaaccttgtgccggagccgactactggagatgacagtgatgctgccacctttaagccaactctccccgatctgtcccctgatgaaccttcagaagcactcggcttcccaatgttagagaaggaggaggaagcccatagacccccaagccccactgaggcccctactgaggccagccccgagccagccccagacccagccccggtggctgaagaggctgccccctcagctgtcgaggagggggccgccgcggaccctggcagcgatgggtctccaggcaagtccccgtccaaaaagaagaagaagttccgtaccccgtcctttctgaagaagagcaagaagaagagtgactcctgaaagccctgcgctaacactgtcctgtccggagcgaccctggctctgccagcgtccccggccacgtctgtgctctgtccttgtgtaatggaatgcaaaaaagccaagccctccgcctagaggtcccctcacgtgaccagccccgtgtagccccgggctgacccagtgtgtgctcagcagccccaccccaccctgccccttgtcctctcagagcctcagcttctgggggagacatgctctccccacaggggggaggcactaagtcatggtcctggctggaaggtactgaaggcttctgcagctttggctgcacgtcaccctcctgagcctcacctttcctgccgtccctcctgttgtgaaatcaccacattctgtctctgcttggcttcccctccaccctaaagtctcaggtgacggactcagactcctggcttcatgtggcattctctctgctcagtgatctcacttaaatctatatacaaagccttggtcccgtgaaaacactcgtgtgcccaccagcggccttgaagaggcaggtctgggccagatgctgggcaggaaaccccagcggcagatgggcctgtgtgcacccaacgtgatgctatgcatgtctgaccgacgatccctcgaccagaatcagattcaggagctcagtttctttttcacttgggtctctggattcctgtcatagggaaggtatatcaggaggggaagaggcctttctagaattttctttgagcaggtttacaatttagcttacatttttcgactgtgaacgtgaataggctgctttttgctttcttctttccagaccccacagtagagcacttttcacttatttgggggaggcttcaggggactgttctcaccttaactcagccagaaagatgccctagttgtgatcaaaggtaactcgaggtggagggtagccctggggcccctcgacatcaccgtcattgatggagcctgaaccgtgtgctcctcggcagatgctgttgttgttacttccctccaagaggctggaaaagggctcagagctgctgagcaggaaccggagggtgacccatttcaggaggtgccggtaccagcctgactaggtacaggcaagcttgtgtgggcccaacaggcccttggtagagctggtgccagatgtgggctcagatcctgggcatgatgggccgagccacctcggatcccactgattggccagccgagcgagaaccaggctgctgcatggcactgaccgccgcttccagcttcctctgagccgcagggcctgctacgcgggcaagcgtgctgcctctcttctgtgtcgttttgttgccaaggcagaatgaaaagtccttaaccgtggactcttcctttatcccctcctttaccccacatatgcaatgacttttaattttcacttttgtagtttaatcctttgtattacaacatgaaatatagttgcatatatggacaccgacttgggaggacaggtcctgaatgtcctttctccagtgtaacatgttttactcacaaataaaattctttcagcaa

SEQ ID NO: 1131 - DNA, 2361 bp, Homo sapiens
  source 1..2361: mol_type = unassigned DNA
gaacctagaaagattgtacaatgaatggtgattctcgtgctgcggtggtgacctcaccacccccgaccacagcccctcacaaggagaggtacttcgaccgagtagatgagaacaacccagagtacttgagggagaggaacatggcaccagaccttcgccaggacttcaacatgatggagcaaaagaagagggtgtccatgattctgcaaagccctgctttctgtgaagaattggaatcaatgatacaggagcaatttaagaaggggaagaaccccacaggcctattggcattacagcagattgcagattttatgaccacgaatgtaccaaatgtctacccagcagctccgcaaggagggatggctgccttaaacatgagtcttggtatggtgactcctgtgaacgatcttagaggatctgattctattgcgtatgacaaaggagagaagttattacggtgtaaattggcagcgttttatagactagcagatctctttgggtggtctcagcttatctacaatcatatcacaaccagagtgaactccgagcaggaacacttcctcattgtcccttttgggcttctttacagtgaagtgactgcatccagtttggttaagatcaatctacaaggagatatagtagatcgtggaagcactaatctgggagtgaatcaggccggcttcaccttacactctgcaatttatgctgcacgcccggacgtgaagtgcgtcgtgcacattcacaccccagcaggggctgcggtctctgcaatgaaatgtggcctcttgccaatctccccggaggcgctttcccttggagaagtggcttatcatgactaccatggcattctggttgatgaagaggaaaaagttttgattcagaaaaatctggggcctaaaagcaaggttcttattctccggaaccatgggctcgtgtcagttggagagagcgttgaggaggccttctattacatccataaccttgtggttgcctgtgagatccaggttcgaactctggccagtgcaggaggaccagacaacttagtcctgctgaatcctgagaagtacaaagccaagtcccgttccccagggtctccggtaggggaaggcactggatcgcctcccaagtggcagattggtgagcaggaatttgaagccctcatgcggatgctcgataatctgggctacagaactggctacccttatcgataccctgctctgagagagaagtctaaaaaatacagcgatgtggaggttcctgctagtgtcacaggttactcctttgctagtgacggtgattcgggcacttgctccccactcagacacagttttcagaagcagcagcgggagaagacaagatggctgaactctggccggggcgacgaagcttccgaggaagggcagaatggaagcagtcccaagtcgaagactaaggtgtggacgaacattacacacgatcacgtgaaacccttgctgcagtctctctcgtccggtgtctgcgtgccaagctgtattaccaactgcttgtggactaaagaggatggacatagaacttccacctctgctgtccctaacctgtttgttccattgaacactaacccaaaagaggtccaggagatgaggaacaagatccgagagcagaatttacaggacattaagacggctggccctcagtcccaggttttgtgtggtgtagtgatggacaggagcctcgtccagggagagctggtgacggcctccaaggccatcattgaaaaggagtaccagccccacgtcattgtgagcaccacgggccccaaccccttcaccacactcacagaccgtgagctggaggagtaccgcagggaggtggagaggaagcagaagggctctgaagagaatctggacgaggctagagaacagaaagaaaagagtcctccagaccagcctgcggtcccccacccgcctcccagcactcccatcaagctggaggaaggagacggatgcgctagagagtacctgttaccctaaccttgtgccggagccgactactggagatgacagtgatgctgccacctttaagccaactctccccgatctgtcccctgatgaaccttcagaagcactcggcttcccaatgttagagaaggaggaggaagcccatagacccccaagccccactgaggcccctactgaggccagccccgagccagccccagacccagccccggtggctgaagaggctgccccctcagctgtcgaggagggggccgccgcggaccctggcagcgatgggtctccaggcaagtccccgtccaaaaagaagaagaagttccgtaccccgtcctttctgaagaagagcaagaagaagagtgactcctga

SEQ ID NO: 1132 - DNA, 1391 bp, Homo sapiens
  source 1..1391: mol_type = unassigned DNA
gcacccaggtcgggcggtgggggcgagcggaggggctgaggggcggagaggcctggcgggccgctgctgcgggccaggggacgggggcggagccggagccggagccgacgggcggtggccgcactgggaccccggaatcccgcgcgctgcccacgattcgcttctgaggaacctagaaagattgtacaatgaatggtgattctcgtgctgcggtggtgacctcaccacccccgaccacagcccctcacaaggagaggtacttcgaccgagtagatgagaacaacccagagtacttgagggagaggaacatggcaccagaccttcgccaggacttcaacatgatggagcaaaagaagagggtgtccatgattctgcaaagccctgctttctgtgaagaattggaatcaatgatacaggagcaatttaagaaggggaagaaccccacaggcctattggcattacagcagattgcagattttatgaccacgaatgtaccaaatgtctacccagcagctccgcaaggagggatggctgccttaaacatgagtcttggtatggtgactcctgtgaacgatcttagaggatctgattctattgcgtatgacaaaggagagaagttattacggtgtaaattggcagcgttttatagactagcagatctctttgggtggtctcagcttatctacaatcatatcacaaccagagtgaactccgagcaggaacacttcctcattgtcccttttgggcttctttacagtgaagtgactgcatccagtttggttaagatcaatctacaaggagatatagtagatcgtggaagcactaatctgggagtgaatcaggccggcttcaccttacactctgcaatttatgctgcacgcccggacgtgaagtgcgtcgtgcacattcacaccccagcaggggctgcggtctctgcaatgaaatgtggcctcttgccaatctccccggaggcgctttcccttggagaagtggcttatcatgactaccatggcattctggttgatgaagaggaaaaagttttgattcagaaaaatctggggcctaaaagcaaggttcttattctccggaaccatgggctcgtgtcagttggagagagcgttgaggaggccttctattacatccataaccttgtggttgcctgtgagatccaggttcgaactctggccagtgcaggaggaccagacaacttagtcctgctgaatcctgagaagtacaaagccaagtcccgttccccagggtctccggtaggggaaggcactggatcgcctcccaagtggcagattggtgagcaggaatttgaagccctcatgcggatgctcgataatctgggctacagaacaagcagcagcgggagaagacaagatggctga

SEQ ID NO: 1133 - DNA, 4068 bp, Homo sapiens
  source 1..4068: mol_type = unassigned DNA
gcacccaggtcgggcggtgggggcgagcggaggggctgaggggcggagaggcctggcgggccgctgctgcgggccaggggacgggggcggagccggagccggagccgacgggcggtggccgcactgggaccccggaatcccgcgcgctgcccacgattcgcttctgaggaacctagaaagattgtacaatgaatggtgattctcgtgctgcggtggtgacctcaccacccccgaccacagcccctcacaaggagaggtacttcgaccgagtagatgagaacaacccagagtacttgagggagaggaacatggcaccagaccttcgccaggacttcaacatgatggagcaaaagaagagggtgtccatgattctgcaaagccctgctttctgtgaagaattggaatcaatgatacaggagcaatttaagaaggggaagaaccccacaggcctattggcattacagcagattgcagattttatgaccacgaatgtaccaaatgtctacccagcagctccgcaaggagggatggctgccttaaacatgagtcttggtatggtgactcctgtgaacgatcttagaggatctgattctattgcgtatgacaaaggagagaagttattacggtgtaaattggcagcgttttatagactagcagatctctttgggtggtctcagcttatctacaatcatatcacaaccagagtgaactccgagcaggaacacttcctcattgtcccttttgggcttctttacagtgaagtgactgcatccagtttggttaagatcaatctacaaggagatatagtagatcgtggaagcactaatctgggagtgaatcaggccggcttcaccttacactctgcaatttatgctgcacgcccggacgtgaagtgcgtcgtgcacattcacaccccagcaggggctgcggtctctgcaatgaaatgtggcctcttgccaatctccccggaggcgctttcccttggagaagtggcttatcatgactaccatggcattctggttgatgaagaggaaaaagttttgattcagaaaaatctggggcctaaaagcaaggttcttattctccggaaccatgggctcgtgtcagttggagagagcgttgaggaggccttctattacatccataaccttgtggttgcctgtgagatccaggttcgaactctggccagtgcaggaggaccagacaacttagtcctgctgaatcctgagaagtacaaagccaagtcccgttccccagggtctccggtaggggaaggcactggatcgcctcccaagtggcagattggtgagcaggaatttgaagccctcatgcggatgctcgataatctgggctacagaactggctacccttatcgataccctgctctgagagagaagtctaaaaaatacagcgatgtggaggttcctgctagtgtcacaggttactcctttgctagtgacggtgattcgggcacttgctccccactcagacacagttttcagaagcagcagcgggagaagacaagatggctgaactctggccggggcgacgaagcttccgaggaagggcagaatggaagcagtcccaagtcgaagactaaggtgtggacgaacattacacacgatcacgtgaaacccttgctgcagtctctctcgtccggtgtctgcgtgccaagctgtattaccaactgcttgtggactaaagaggatggacatagaacttccacctctgctgtccctaacctgtttgttccattgaacactaacccaaaagaggtccaggagatgaggaacaagatccgagagcagaatttacaggacattaagacggctggccctcagtcccaggttttgtgtggtgtagtgatggacaggagcctcgtccagggagagctggtgacggcctccaaggccatcattgaaaaggagtaccagccccacgtcattgtgagcaccacgggccccaaccccttcaccacactcacagaccgtgagctggaggagtaccgcagggaggtggagaggaagcagaagggctctgaagagaatctggacgaggctagagaacagaaagaaaagagtcctccagaccagcctgcggtcccccacccgcctcccagcactcccatcaagctggaggaaggagacggatgcgctagagagtacctgttaccctaaccttgtgccggagccgactactggagatgacagtgatgctgccacctttaagccaactctccccgatctgtcccctgatgaaccttcagaagcactcggcttcccaatgttagagaaggaggaggaagcccatagacccccaagccccactgaggcccctactgaggccagccccgagccagccccagacccagccccggtggctgaagaggctgccccctcagctgtcgaggagggggccgccgcggaccctggcagcgatgggtctccaggcaagtccccgtccaaaaagaagaagaagttccgtaccccgtcctttctgaagaagagcaagaagaagagtgactcctgaaagccctgcgctaacactgtcctgtccggagcgaccctggctctgccagcgtccccggccacgtctgtgctctgtccttgtgtaatggaatgcaaaaaagccaagccctccgcctagaggtcccctcacgtgaccagccccgtgtagccccgggctgacccagtgtgtgctcagcagccccaccccaccctgccccttgtcctctcagagcctcagcttctgggggagacatgctctccccacaggggggaggcactaagtcatggtcctggctggaaggtactgaaggcttctgcagctttggctgcacgtcaccctcctgagcctcacctttcctgccgtccctcctgttgtgaaatcaccacattctgtctctgcttggcttcccctccaccctaaagtctcaggtgacggactcagactcctggcttcatgtggcattctctctgctcagtgatctcacttaaatctatatacaaagccttggtcccgtgaaaacactcgtgtgcccaccagcggccttgaagaggcaggtctgggccagatgctgggcaggaaaccccagcggcagatgggcctgtgtgcacccaacgtgatgctatgcatgtctgaccgacgatccctcgaccagaatcagattcaggagctcagtttctttttcacttgggtctctggattcctgtcatagggaaggtatatcaggaggggaagaggcctttctagaattttctttgagcaggtttacaatttagcttacatttttcgactgtgaacgtgaataggctgctttttgctttcttctttccagaccccacagtagagcacttttcacttatttgggggaggcttcaggggactgttctcaccttaactcagccagaaagatgccctagttgtgatcaaaggtaactcgaggtggagggtagccctggggcccctcgacatcaccgtcattgatggagcctgaaccgtgtgctcctcggcagatgctgttgttgttacttccctccaagaggctggaaaagggctcagagctgctgagcaggaaccggagggtgacccatttcaggaggtgccggtaccagcctgactaggtacaggcaagcttgtgtgggcccaacaggcccttggtagagctggtgccagatgtgggctcagatcctgggcatgatgggccgagccacctcggatcccactgattggccagccgagcgagaaccaggctgctgcatggcactgaccgccgcttccagcttcctctgagccgcagggcctgctacgcgggcaagcgtgctgcctctcttctgtgtcgttttgttgccaaggcagaatgaaaagtccttaaccgtggactcttcctttatcccctcctttaccccacatatgcaatgacttttaattttcacttttgtagtttaatcctttgtattacaacatgaaatatagttgcatatatggacaccgacttgggaggacaggtcctgaatgtcctttctccagtgtaacatgttttactcacaaataaaattctttcagcaa

SEQ ID NO: 1134 - DNA, 3787 bp, Homo sapiens
  source 1..3787: mol_type = unassigned DNA
gaacctagaaagattgtacaatgaatggtgattctcgtgctgcggtggtgacctcaccacccccgaccacagcccctcacaaggagaggtacttcgaccgagtagatgagaacaacccagagtacttgagggagaggaacatggcaccagaccttcgccaggacttcaacatgatggagcaaaagaagagggtgtccatgattctgcaaagccctgctttctgtgaagaattggaatcaatgatacaggagcaatttaagaaggggaagaaccccacaggcctattggcattacagcagattgcagattttatgaccacgaatgtaccaaatgtctacccagcagctccgcaaggagggatggctgccttaaacatgagtcttggtatggtgactcctgtgaacgatcttagaggatctgattctattgcgtatgacaaaggagagaagttattacggtgtaaattggcagcgttttatagactagcagatctctttgggtggtctcagcttatctacaatcatatcacaaccagagtgaactccgagcaggaacacttcctcattgtcccttttgggcttctttacagtgaagtgactgcatccagtttggttaagatcaatctacaaggagatatagtagatcgtggaagcactaatctgggagtgaatcaggccggcttcaccttacactctgcaatttatgctgcacgcccggacgtgaagtgcgtcgtgcacattcacaccccagcaggggctgcggtctctgcaatgaaatgtggcctcttgccaatctccccggaggcgctttcccttggagaagtggcttatcatgactaccatggcattctggttgatgaagaggaaaaagttttgattcagaaaaatctggggcctaaaagcaaggttcttattctccggaaccatgggctcgtgtcagttggagagagcgttgaggaggccttctattacatccataaccttgtggttgcctgtgagatccaggttcgaactctggccagtgcaggaggaccagacaacttagtcctgctgaatcctgagaagtacaaagccaagtcccgttccccagggtctccggtaggggaaggcactggatcgcctcccaagtggcagattggtgagcaggaatttgaagccctcatgcggatgctcgataatctgggctacagaactggctacccttatcgataccctgctctgagagagaagtctaaaaaatacagcgatgtggaggttcctgctagtgtcacaggttactcctttgctagtgacggtgattcgggcacttgctccccactcagacacagttttcagaagcagcagcgggagaagacaagatggctgaactctggccggggcgacgaagcttccgaggaagggcagaatggaagcagtcccaagtcgaagactaagtggactaaagaggatggacatagaacttccacctctgctgtccctaacctgtttgttccattgaacactaacccaaaagaggtccaggagatgaggaacaagatccgagagcagaatttacaggacattaagacggctggccctcagtcccaggttttgtgtggtgtagtgatggacaggagcctcgtccagggagagctggtgacggcctccaaggccatcattgaaaaggagtaccagccccacgtcattgtgagcaccacgggccccaaccccttcaccacactcacagaccgtgagctggaggagtaccgcagggaggtggagaggaagcagaagggctctgaagagaatctggacgaggctagagaacagaaagaaaagagtcctccagaccagcctgcggtcccccacccgcctcccagcactcccatcaagctggaggaagaccttgtgccggagccgactactggagatgacagtgatgctgccacctttaagccaactctccccgatctgtcccctgatgaaccttcagaagcactcggcttcccaatgttagagaaggaggaggaagcccatagacccccaagccccactgaggcccctactgaggccagccccgagccagccccagacccagccccggtggctgaagaggctgccccctcagctgtcgaggagggggccgccgcggaccctggcagcgatgggtctccaggcaagtccccgtccaaaaagaagaagaagttccgtaccccgtcctttctgaagaagagcaagaagaagagtgactcctgaaagccctgcgctaacactgtcctgtccggagcgaccctggctctgccagcgtccccggccacgtctgtgctctgtccttgtgtaatggaatgcaaaaaagccaagccctccgcctagaggtcccctcacgtgaccagccccgtgtagccccgggctgacccagtgtgtgctcagcagccccaccccaccctgccccttgtcctctcagagcctcagcttctgggggagacatgctctccccacaggggggaggcactaagtcatggtcctggctggaaggtactgaaggcttctgcagctttggctgcacgtcaccctcctgagcctcacctttcctgccgtccctcctgttgtgaaatcaccacattctgtctctgcttggcttcccctccaccctaaagtctcaggtgacggactcagactcctggcttcatgtggcattctctctgctcagtgatctcacttaaatctatatacaaagccttggtcccgtgaaaacactcgtgtgcccaccagcggccttgaagaggcaggtctgggccagatgctgggcaggaaaccccagcggcagatgggcctgtgtgcacccaacgtgatgctatgcatgtctgaccgacgatccctcgaccagaatcagattcaggagctcagtttctttttcacttgggtctctggattcctgtcatagggaaggtatatcaggaggggaagaggcctttctagaattttctttgagcaggtttacaatttagcttacatttttcgactgtgaacgtgaataggctgctttttgctttcttctttccagaccccacagtagagcacttttcacttatttgggggaggcttcaggggactgttctcaccttaactcagccagaaagatgccctagttgtgatcaaaggtaactcgaggtggagggtagccctggggcccctcgacatcaccgtcattgatggagcctgaaccgtgtgctcctcggcagatgctgttgttgttacttccctccaagaggctggaaaagggctcagagctgctgagcaggaaccggagggtgacccatttcaggaggtgccggtaccagcctgactaggtacaggcaagcttgtgtgggcccaacaggcccttggtagagctggtgccagatgtgggctcagatcctgggcatgatgggccgagccacctcggatcccactgattggccagccgagcgagaaccaggctgctgcatggcactgaccgccgcttccagcttcctctgagccgcagggcctgctacgcgggcaagcgtgctgcctctcttctgtgtcgttttgttgccaaggcagaatgaaaagtccttaaccgtggactcttcctttatcccctcctttaccccacatatgcaatgacttttaattttcacttttgtagtttaatcctttgtattacaacatgaaatatagttgcatatatggacaccgacttgggaggacaggtcctgaatgtcctttctccagtgtaacatgttttactcacaaataaaattctttcagcaagttccttgtctaaa

SEQ ID NO: 1135 - DNA, 3939 bp, Homo sapiens
  source 1..3939: mol_type = unassigned DNA
gcacccaggtcgggcggtgggggcgagcggaggggctgaggggcggagaggcctggcgggccgctgctgcgggccaggggacgggggcggagccggagccggagccgacgggcggtggccgcactgggaccccggaatcccgcgcgctgcccacgattcgcttctgaggaacctagaaagattgtacaatgaatggtgattctcgtgctgcggtggtgacctcaccacccccgaccacagcccctcacaaggagaggtacttcgaccgagtagatgagaacaacccagagtacttgagggagaggaacatggcaccagaccttcgccaggacttcaacatgatggagcaaaagaagagggtgtccatgattctgcaaagccctgctttctgtgaagaattggaatcaatgatacaggagcaatttaagaaggggaagaaccccacaggcctattggcattacagcagattgcagattttatgaccacgaatgtaccaaatgtctacccagcagctccgcaaggagggatggctgccttaaacatgagtcttggtatggtgactcctgtgaacgatcttagaggatctgattctattgcgtatgacaaaggagagaagttattacggtgtaaattggcagcgttttatagactagcagatctctttgggtggtctcagcttatctacaatcatatcacaaccagagtgaactccgagcaggaacacttcctcattgtcccttttgggcttctttacagtgaagtgactgcatccagtttggttaagatcaatctacaaggagatatagtagatcgtggaagcactaatctgggagtgaatcaggccggcttcaccttacactctgcaatttatgctgcacgcccggacgtgaagtgcgtcgtgcacattcacaccccagcaggggctgcggtctctgcaatgaaatgtggcctcttgccaatctccccggaggcgctttcccttggagaagtggcttatcatgactaccatggcattctggttgatgaagaggaaaaagttttgattcagaaaaatctggggcctaaaagcaaggttcttattctccggaaccatgggctcgtgtcagttggagagagcgttgaggaggccttctattacatccataaccttgtggttgcctgtgagatccaggttcgaactctggccagtgcaggaggaccagacaacttagtcctgctgaatcctgagaagtacaaagccaagtcccgttccccagggtctccggtaggggaaggcactggatcgcctcccaagtggcagattggtgagcaggaatttgaagccctcatgcggatgctcgataatctgggctacagaactggctacccttatcgataccctgctctgagagagaagtctaaaaaatacagcgatgtggaggttcctgctagtgtcacaggttactcctttgctagtgacggtgattcgggcacttgctccccactcagacacagttttcagaagcagcagcgggagaagacaagatggctgaactctggccggggcgacgaagcttccgaggaagggcagaatggaagcagtcccaagtcgaagactaagtggactaaagaggatggacatagaacttccacctctgctgtccctaacctgtttgttccattgaacactaacccaaaagaggtccaggagatgaggaacaagatccgagagcagaatttacaggacattaagacggctggccctcagtcccaggttttgtgtggtgtagtgatggacaggagcctcgtccagggagagctggtgacggcctccaaggccatcattgaaaaggagtaccagccccacgtcattgtgagcaccacgggccccaaccccttcaccacactcacagaccgtgagctggaggagtaccgcagggaggtggagaggaagcagaagggctctgaagagaatctggacgaggctagagaacagaaagaaaagagtcctccagaccagcctgcggtcccccacccgcctcccagcactcccatcaagctggaggaagaccttgtgccggagccgactactggagatgacagtgatgctgccacctttaagccaactctccccgatctgtcccctgatgaaccttcagaagcactcggcttcccaatgttagagaaggaggaggaagcccatagacccccaagccccactgaggcccctactgaggccagccccgagccagccccagacccagccccggtggctgaagaggctgccccctcagctgtcgaggagggggccgccgcggaccctggcagcgatgggtctccaggcaagtccccgtccaaaaagaagaagaagttccgtaccccgtcctttctgaagaagagcaagaagaagagtgactcctgaaagccctgcgctaacactgtcctgtccggagcgaccctggctctgccagcgtccccggccacgtctgtgctctgtccttgtgtaatggaatgcaaaaaagccaagccctccgcctagaggtcccctcacgtgaccagccccgtgtagccccgggctgacccagtgtgtgctcagcagccccaccccaccctgccccttgtcctctcagagcctcagcttctgggggagacatgctctccccacaggggggaggcactaagtcatggtcctggctggaaggtactgaaggcttctgcagctttggctgcacgtcaccctcctgagcctcacctttcctgccgtccctcctgttgtgaaatcaccacattctgtctctgcttggcttcccctccaccctaaagtctcaggtgacggactcagactcctggcttcatgtggcattctctctgctcagtgatctcacttaaatctatatacaaagccttggtcccgtgaaaacactcgtgtgcccaccagcggccttgaagaggcaggtctgggccagatgctgggcaggaaaccccagcggcagatgggcctgtgtgcacccaacgtgatgctatgcatgtctgaccgacgatccctcgaccagaatcagattcaggagctcagtttctttttcacttgggtctctggattcctgtcatagggaaggtatatcaggaggggaagaggcctttctagaattttctttgagcaggtttacaatttagcttacatttttcgactgtgaacgtgaataggctgctttttgctttcttctttccagaccccacagtagagcacttttcacttatttgggggaggcttcaggggactgttctcaccttaactcagccagaaagatgccctagttgtgatcaaaggtaactcgaggtggagggtagccctggggcccctcgacatcaccgtcattgatggagcctgaaccgtgtgctcctcggcagatgctgttgttgttacttccctccaagaggctggaaaagggctcagagctgctgagcaggaaccggagggtgacccatttcaggaggtgccggtaccagcctgactaggtacaggcaagcttgtgtgggcccaacaggcccttggtagagctggtgccagatgtgggctcagatcctgggcatgatgggccgagccacctcggatcccactgattggccagccgagcgagaaccaggctgctgcatggcactgaccgccgcttccagcttcctctgagccgcagggcctgctacgcgggcaagcgtgctgcctctcttctgtgtcgttttgttgccaaggcagaatgaaaagtccttaaccgtggactcttcctttatcccctcctttaccccacatatgcaatgacttttaattttcacttttgtagtttaatcctttgtattacaacatgaaatatagttgcatatatggacaccgacttgggaggacaggtcctgaatgtcctttctccagtgtaacatgttttactcacaaataaaattctttcagc

SEQ ID NO: 1136 - DNA, 671 bp, Homo sapiens
  source 1..671: mol_type = unassigned DNA
ggagccggagccggagccgacgggcggtggccgcactgggaccccggaatcccgcgcgctgcccacgattcgcttctgaggggccttttgagcagctgcttctgcaagaggacatccggagacacaggaatagaaatgatccgatcagagtaattaaaggcttttaactgagctctgaggtcccaaacagggcacactccgtcagcctaaagctgtgaagaagaaccttcaacataaggaacctagaaagattgtacaatgaatggtgattctcgtgctgcggtggtgacctcaccacccccgaccacagcccctcacaaggagaggtacttcgaccgagtagatgagaacaacccagagtacttgagggagaggaacatggcaccagaccttcgccaggacttcaacatgatggagcaaaagaagagggtgtccatgattctgcaaagccctgctttctgtgaagaattggaatcaatgatacaggagcaatttaagaaggggaagaaccccacaggcctattggcattacagcagattgcagattttatgaccacgaatgtaccaaatgtctacccagcagctccgcaaggagggatggctgccttaaacatgagtcttggtatggtgactcctgtgaacgatcttagaggatctgattctattgcgta

SEQ ID NO: 1137 - DNA, 3107 bp, Homo sapiens
  source 1..3107: mol_type = unassigned DNA
ggccgcactgggaccccggaatcccgcgcgctgcccacgattcgcttctgaggaacctagaaagattgtacaatgaatggtgattctcgtgctgcggtggtgacctcaccacccccgaccacagcccctcacaaggagaggtacttcgaccgagtagatgagaacaacccagagtacttgagggagaggaacatggcaccagaccttcgccaggacttcaacatgatggagcaaaagaagagggtgtccatgattctgcaaagccctgctttctgtgaagaattggaatcaatgatacaggagcaatttaagaaggggaagaaccccacaggcctattggcattacagcagattgcagattttatgaccacgaatgtaccaaatgtctacccagcagctccgcaaggagggatggctgccttaaacatgagtcttggtatggtgactcctgtgaacgatcttagaggatctgattctattgcgtatgacaaaggagagaagttattacggtgtaaattggcagcgttttatagactagcagatctctttgggtggtctcagcttatctacaatcatatcacaaccagagtgaactccgagcaggaacacttcctcattgtcccttttgggcttctttacagtgaagtgactgcatccagtttggttaagatcaatctacaaggagatatagtagatcgtggaagcactaatctgggagtgaatcaggccggcttcaccttacactctgcaatttatgctgcacgcccggacgtgaagtgcgtcgtgcacattcacaccccagcaggggctgcggtctctgcaatgaaatgtggcctcttgccaatctccccggaggcgctttcccttggagaagtggcttatcatgactaccatggcattctggttgatgaagaggaaaaagttttgattcagaaaaatctggggcctaaaagcaaggttcttattctccggaaccatgggctcgtgtcagttggagagagcgttgaggaggccttctattacatccataaccttgtggttgcctgtgagatccaggttcgaactctggccagtgcaggaggaccagacaacttagtcctgctgaatcctgagaagtacaaagccaagtcccgttccccagggtctccggtaggggaaggcactggatcgcctcccaagtggcagattggtgagcaggaatttgaagccctcatgcggatgctcgataatctgggctacagaactggctacccttatcgataccctgctctgagagagaagtctaaaaaatacagcgatgtggaggttcctgctagtgtcacaggttactcctttgctagtgacggtgattcgggcacttgctccccactcagacacagttttcagaagcagcagcgggagaagacaagatggctgaactctggccggggcgacgaagcttccgaggaagggcagaatggaagcagtcccaagtcgaagactaagtggactaaagaggatggacatagaacttccacctctgctgtccctaacctgtttgttccattgaacactaacccaaaagaggtccaggagatgaggaacaagatccgagagcagaatttacaggacattaagacggctggccctcagtcccaggttttgtgtggtgtagtgatggacaggagcctcgtccagggagagctggtgacggcctccaaggccatcattgaaaaggagtaccagccccacgtcattgtgagcaccacgggccccaaccccttcaccacactcacagaccgtgagctggaggagtaccgcagggaggtggagaggaagcagaagggctctgaagagaatctggacgaggctagagaacagaaagaaaagagtcctccagaccagcctgcggtcccccacccgcctcccagcactcccatcaagctggaggaagcaggagacggatgcgctagagagtacctgttaccctaaccttgtgccggagccgactactggagatgacagtgatgctgccacctttaagccaactctccccgatctgtcccctgatgaaccttcagaagcactcggcttcccaatgttagagaaggaggaggaagcccatagacccccaagccccactgaggcccctactgaggccagccccgagccagccccagacccagccccggtggctgaagaggctgccccctcagctgtcgaggagggggccgccgcggaccctggcagcgatgggtctccaggcaagtccccgtccaaaaagaagaagaagttccgtaccccgtcctttctgaagaagagcaagaagaagagtgactcctgaaagccctgcgctaacactgtcctgtccggagcgaccctggctctgccagcgtccccggccacgtctgtgctctgtccttgtgtaatggaatgcaaaaaagccaagccctccgcctagaggtcccctcacgtgaccagccccgtgtagccccgggctgacccagtgtgtgctcagcagccccaccccaccctgccccttgtcctctcagagcctcagcttctgggggagacatgctctccccacaggggggaggcactaagtcatggtcctggctggaaggtactgaaggcttctgcagctttggctgcacgtcaccctcctgagcctcacctttcctgccgtccctcctgttgtgaaatcaccacattctgtctctgcttggcttcccctccaccctaaagtctcaggtgacggactcagactcctggcttcatgtggcattctctctgctcagtgatctcacttaaatctatatacaaagccttggtcccgtgaaaacactcgtgtgcccaccagcggccttgaagaggcaggtctgggccagatgctgggcaggaaaccccagcggcagatgggcctgtgtgcacccaacgtgatgctatgcatgtctgaccgacgatccctcgaccagaatcagattcaggagctcagtttctttttcacttgggtctctggattcctgtcatagggaaggtatatcaggaggggaagaggcctttctagaattttctttgagcaggtttacaatttagcttacatttttcgactgtgaacgtgaataggc

SEQ ID NO: 1138 - DNA, 1332 bp, Homo sapiens
  source 1..1332: mol_type = unassigned DNA
aggttcttattctccggaaccatgggctcgtgtcagttggagagagcgttgaggaggccttctattacatccataaccttgtggttgcctgtgagatccaggttcgaactctggccagtgcaggaggaccagacaacttagtcctgctgaatcctgagaagtacaaagccaagtcccgttccccagggtctccggtaggggaaggcactggatcgcctcccaagtggcagattggtgagcaggaatttgaagccctcatgcggatgctcgataatctgggctacagaactggctacccttatcgataccctgctctgagagagaagtctaaaaaatacagcgatgtggaggttcctgctagtgtcacaggttactcctttgctagtgacggtgattcgggcacttgctccccactcagacacagttttcagaagcagcagcgggagaagacaagatggctgaactctggccggggcgacgaagcttccgaggaagggcagaatggaagcagtcccaagtcgaagactaaggtgtggacgaacattacacacgatcacgtgaaacccttgctgcagtctctctcgtccggtgtctgcgtgccaagctgtattaccaactgcttgtggactaaagaggatggacatagaacttccacctctgctgtccctaacctgtttgttccattgaacactaacccaaaagaggtccaggagatgaggaacaagatccgagagcagaatttacaggacattaagacggctggccctcagtcccaggttttgtgtggtgtagtgatggacaggagcctcgtccagggagagctggtgacggcctccaaggccatcattgaaaaggagtaccagccccacgtcattgtgagcaccacgggccccaaccccttcaccacactcacagaccgtgagctggaggagtaccgcagggaggtggagaggaagcagaagggctctgaagagaatctggacgaggctagagaacagaaagaaaagagtcctccagaccagcctgcggtcccccacccgcctcccagcactcccatcaagctggaggaagaccttgtgccggagccgactactggagatgacagtgatgctgccacctttaagccaactctccccgatctgtcccctgatgaaccttcagaagcactcggcttcccaatgttagagaaggaggaggaagcccatagacccccaagccccactgaggcccctactgaggccagccccgagccagccccagacccagccccggtggctgaagaggctgccccctcagctgtcgaggagggggccgccgcggaccctggcagcg

SEQ ID NO: 1139 - DNA, 5856 bp, Homo sapiens
  source 1..5856: mol_type = unassigned DNA
gggaaatggctttaattctgacggcagggctgtgagggactagcgggaacccgagccttttgtcaaggaactgcggcgtcggtggccagtcatccccgccgccgcggagccgctgcactgctgggggatctcccagcagctctgacgagcgcgggctgcagcatgggcagaaaacgctgccctgcagattagctgggtggattttttaagcgcaccccaccccccaaacccataaaataacaaaaccaacccgcagtggccgaccggagatagctaagatgccgcgcaggagtttccacctggatgtttgaggttgtgtagatgtggccggcacccttgagagtggagctagggggtgcagactgagcagtgaacagaaggagccttggacagggctgggccagcctcccgagttccaggagcgaattgcaaacccaccgggaaaatgagcgaagagacggtccccgaggctgcctcgccgccgcccccgcaggggcagccttactttgaccgcttctcagaggacgaccccgagtacatgcgccttcgcaaccgggcggcggacctgcggcaggacttcaacctgatggagcagaagaagcgcgtcaccatgatcctgcagagtccctctttcagggaggagctggaaggcctcatccaggagcagatgaagaaggggaacaactcctccaacatctgggccctgcgacagatcgcggacttcatggccagcacctcccacgcagtcttcccgacatcttccatgaatgtctccatgatgacgcctatcaatgacctccacacagctgactccctgaacctggccaaaggggagcggctcatgcggtgcaagatcagcagtgtctaccgactcctggacctctatggctgggcccagctgagtgacacctatgtcacgttgagagtcagcaaggagcaggaccacttcctgatcagccctaagggagtttcttgcagtgaagtcacagcgtccagcctgatcaaggtgaacattctgggagaggtggtggagaagggcagcagctgcttcccagtggacaccacaggcttctgtctgcactcggccatctatgcagcgaggcccgacgtgcgctgcatcatccacctgcacacaccggccacagcagcggtgtcggccatgaagtggggcctcctgcctgtctcccacaatgccctgctggtgggggacatggcctattatgacttcaatggggaaatggagcaggaagccgatcggatcaacctgcagaagtgccttggacccacctgcaagatcctggtgctaagaaaccatggagtggttgctctgggtgacacggtagaggaggcattttacaagatcttccacctgcaggctgcatgtgagatacaggtgtcggctctgtccagtgccgggggagtggagaacctcatcctcctggagcaggagaagcaccggccccatgaggtgggctccgtgcagtgggccgggagcacctttgggcctatgcagaagagtcggctgggggagcatgagtttgaggccctcatgaggatgctggacaacctgggctacagaacaggttacacgtatcgccacccctttgttcaagagaaaaccaaacacaaaagtgaggtggagattccagccacggtcacagccttcgtgtttgaggaggacggtgccccggtgcccgccctgcgacagcatgcccagaagcagcagaaggagaagacccgctggctcaatacgcccaacacctacctgcgggtcaatgtggccgatgaggtccagaggagcatgggcagcccccgacccaagaccacgtggatgaaggctgacgaggtggagaaatccagcagtggcatgccgattcgcatcgaaaacccaaaccaatttgtgcctctctatactgacccccaggaagtactggagatgaggaacaagattcgagaacaaaaccgacaagatgtgaagtcagcggggcctcagtcccagctcctggcgagcgtcattgccgagaagagccgaagcccgtctacagagagccagctgatgtccaagggagacgaggataccaaagacgattcagaggagacggtgcccaaccccttcagccaactcactgaccaggagttggaggagtacaagaaagaggtggagaggaagaaactagaacttgatggagagaaagaaactgccccagaagagcctggctcacctgcaaagtctgcacctgcttctccagtgcagagcccagcgaaggaggcagagacaaagagccctttagtctctccttccaagtctttagaggaaggtactaagaagacagaaacaagcaaagccgccaccacagagcccgaaacaacccagccggaaggggtggtggtcaacgggagggaggaggagcagacggcagaggaaatcctcagcaaaggcctgagccagatgaccaccagtgctgacacggatgttgatacctctaaggacaaaaccgagtcggtcaccagcggccccatgtccccagagggctcaccttccaagtctccctcaaagaagaaaaagaaattccgaaccccctccttcctgaaaaagagcaaaaagaaggagaaagtggagtcctgattcatgacacccttgggctccctcctgcctcctctctctcctccccttcccttctcccatctctgtccctgcaagcacagggctaaggagggatagagtaggaccctggaccacattcggaaggggaacttagagatcacccgaccaacccttcgttttacagttgcccaagagaaatcaggtgacttgcccaaggtcacacagctagttagcggcagagcctgcactcgaattcaggtctcctgacttccagtccagtgctccttctactacacaacactgcctagttgtgggctgcctttgtttggatgctgtccaccaatctgagcctagggcaagaaggccagaaatgggccgtgagctctcacaggctcagactaaatcagaggtcaaggcttcccctgagtaaggtccatttcttcccaggaatccaatctcctgtggatggagctatctctacatttaaaaatctcttctcttttccactttgggtccctgccctgctgctcaaagtgactagccaaattgacccctccaacagaaagtaatctttgttcccaagggctgatggcttagcttgtactaccccaaacattaaccctgagctttcttcatggaacctcttgaatgatggatggaagagctataagaggtggtaggcataggggcaagccatgtaagctgaggattggggatggtttcatcaacataagaggccaggaacttgacccctttgaattgtgcatctcaggcacttcaaaactaaaaccaaatttagcataggaaaaagttgtttaatgctcagggcagaaatttggggaagttgaaatcctctgttggctttgggttgtataaggaggatcaaaacaacagaggaaatgctgactttctagctttgcatgacacctggagcaatgcactgtacctgcctcactcctgtccagtggtcaggtttcccctgaccttccctcacccccagaaacacttgcttacagaccgaaactggcatcttactcttggcaccttgacttgcaccctctgaggttccaactcagtcattctttgtccagcagaggagaatcagaaatgagcccttcaggattaatcctcttgcaccagctctcagagaaatgctgggtatccctgtccttgtccctatctgtccatcctggggcctggtaatggccacagttattgttttaaatgccaacactgtcttctcatgttcttccgtggggcattgattaatgagcatttgttggctcctaaaaattagacaatccattctcttgaaagcaccgtgtcttgaaagaatatttttccttttgatctgactatcgtgaaaatatttttgaaagttcttaatcatagttttccacttttgagcacttgctatctatagacactgtgcaggcttcacatacattacattctttaaccctcacagtaatcctttgaggggggtaagatcattcccattttgtgggtgaggaaattgaccccctaaaatgataattgacttgtcccagctgacttggctagaaagatctggatcctggatttgaatccaggtcagtctgagtccagagcccttgctcttaacagctatggtgaacagacaactttaatccccaggggtggtggttttcatccaggatttgtctctatgactgttctccattgcataatgttagcacgtgaagcaaaggtagggaacaccctgtgctcatcctcatcactgcacgtgaagttcctggtcaatgtggactgtggtgatgctactgtgtgcctctgacaaaggagaggcaagagccttctggttggggcgggaaataccatccatagttggctatttcttgagaaggaaggaaactgacctaggaccaaggtaaacctgacactgtgtctctctagtgcagattcctaactgctaccccaggctccatctctgttctacttcctgattgggtcaaattttaggagggacaacccactcatgcctcagaaaaatctgtcatatgggaaatgcctttaaaagccaatcccttgatgccttcttttaaaaagtagatttcacacttattcatttatccttacatggtatttgttaaggatccactgagcaccaggcattatgctgacgttgaaagagagccatcattatgactagaataataagtggcaaacgatgttgtgagaatggtgaacacgacctctgatgcagccttttgtgtgcgagttgttctacttcgggggtgatgttgattgcctctgcattcaacacactctattcccttgacaatgaggcctcacttaggcctcattgggtggagtcttgctgcagcattattctgggaatttatgccatgggcccactttctattgatagatgaacctgtcagttggttcattcctcatgcattccaaaaacatgcattgagcttgggtcaagggccaggcatgaggataggcatagttcctgccctcaagaagttcatgagcataggaggtgtatagacaaattgcaaaacaggcaagggtaccaaggtggcataagaaagcatcaattaactatcttggggaccagagaaaccctgagagaagcaatggctgctaaggttttaaaacaaagagtaaatttccagtagaatgaaaggattggcagggcatgccacaatgagggaagaatgtgcaaaggtgtggacgcatgaaatgccatgatgggttccgctgagcaacgtggcattgccagagcatgatgtggaagctcaggggttgaggggtcccttcataggtaggcagggctgaatcctaaggaaactggtaggaagtgtggaggagctagacttgtcatggaaggggtttggagccactggagcctttaaatcaggatagagtcatgatcagaattgcattttaggaaaatccctttggtggctgaatggagactgtggactggatgggcgtgggatggtggcatgggagctatgaggcctttttgaaatgtcaatactaaaacatagttgatggcctgctttacacgatgtttcctctacagcagatagtgagtttccaacacaaaatttatttccataaaagtctttggataaagcaccttaagagggattttcaacaaggagaggggagcattcaaagagctaatgtttccagttttattttgtcttggtgtagaattgctgggagaggtgtccagccatcctgccatttct

SEQ ID NO: 1140 - DNA, 739 bp, Homo sapiens
  source 1..739: mol_type = unassigned DNA
gggaaatggctttaattctgacggcagggctgtgagggactagcgggaacccgagccttttgtcaaggaactgcggcgtcggtggccagtcatccccgccgccgcggagccgctgcactgctgggggatctcccagcagctctgacgagcgcgggctgcagcatgggcagaaaacgctgccctgcagattagctgggtggattttttaagcgcaccccaccccccaaacccataaaataacaaaaccaacccgcagtggccgaccggagatagctaagatgccgcgcaggagtttccacctggatgtttgaggttgtgtagatgtggccggcacccttgagagtggagctagggggtgcagactgagcagtgaacagaaggagccttggacagggctgggccagcctcccgagttccaggagcgaattgcaaacccaccgggaaaatgagcgaagagacggtccccgaggctgcctcgccgccgcccccgcaggggcagccttactttgaccgcttctcagaggacgaccccgagtacatgcgccttcgcaaccgggcggcggacctgcggcaggacttcaacctgatggagcagaagaagcgcgtcaccatgatcctgcagagtccctctttcagggaggagctggaaggcctcatccaggagcagatgaagaaggagtacaagaaagaggtggagaggaagaaactagaacttgatgctcctggctggttctcttca

SEQ ID NO: 1141 - DNA, 2226 bp, Homo sapiens
  source 1..2226: mol_type = unassigned DNA
atttcctcccagcctcgtgcgggaaatggctttaattctgacggcagggctgtgagggactagcgggaacccgagccttttgtcaaggaactgcggcgtcggtggccagtcatccccgccgccgcggagccgctgcactgctgggggatctcccagcagctctgacgagcgcgggctgcagcatgggcagaaaacgctgccctgcagattagctgggtggattttttaagcgcaccccaccccccaaacccataaaataacaaaaccaacccgcagtggccgaccggagatagctaagatgccgcgcaggagtttccacctggatgtttgaggttgtgtagatgtggccggcacccttgagagtggagctagggggtgcagactgagcagtgaacagaaggagccttggacagggctgggccagcctcccgagttccaggagcgaattgcaaacccaccgggaaaatgagcgaagagacggtccccgaggctgcctcgccgccgcccccgcaggggcagccttactttgaccgcttctcagaggacgaccccgagtacatgcgccttcgcaaccgggcggcggacctgcggcaggacttcaacctgatggagcagaagaagcgcgtcaccatgatcctgcagagtccctctttcagggaggagctggaaggcctcatccaggagcagatgaagaaggggaacaactcctccaacatctgggccctgcgacagatcgcggacttcatggccagcacctcccacgcagtcttcccgacatcttccatgaatgtctccatgatgacgcctatcaatgacctccacacagctgactccctgaacctggccaaaggggagcggctcatgcggtgcaagatcagcagtgtctaccgactcctggacctctatggctgggcccagctgagtgacacctatgtcacgttgagagtcagcaaggagcaggaccacttcctgatcagccctaagggagtttcttgcagtgaagtcacagcgtccagcctgatcaaggtgaacattctgggagaggtggtggagaagggcagcagctgcttcccagtggacaccacaggcttctgtctgcactcggccatctatgcagcgaggcccgacgtgcgctgcatcatccacctgcacacaccggccacagcagcggtgtcggccatgaagtggggcctcctgcctgtctcccacaatgccctgctggtgggggacatggcctattatgacttcaatggggaaatggagcaggaagccgatcggatcaacctgcagaagtgccttggacccacctgcaagatcctggtgctaagaaaccatggagtggttgctctgggtgacacggtagaggaggcattttacaagatcttccacctgcaggctgcatgtgagatacaggtgtcggctctgtccagtgccgggggagtggagaacctcatcctcctggagcaggagaagcaccggccccatgaggtgggctccgtgcagtgggccgggagcacctttgggcctatgcagaagagtcggctgggggagcatgagtttgaggccctcatgaggatgctggacaacctgggctacagaacaggttacacgtatcgccacccctttgttcaagagaaaaccaaacacaaaagtgaggtggagattccagccacggtcacagccttcgtgtttgaggaggacggtgccccggtgcccgccctgcgacagcatgcccagaagcagcagaaggagaagacccgctggctcaatacgcccaacacctacctgcgggtcaatgtggccgatgaggtccagaggagcatgggcagcccccgacccaagaccacgtggatgaaggctgacgaggtggagaaatccagcagtggcatgccgattcgcatcgaaaacccaaaccaatttgtgcctctctatactgacccccaggaagtactggagatgaggaacaagattcgagaacaaaaccgacaagatgtgaagtcagcggggcctcagtcccagctcctggcgagcgtcattgccgagaagagccgaagcccgtctacagagagccagctgatgtccaagggagacgaggataccaaagacgattcagaggagacggtgcccaaccccttcagccaactcactgaccaggagttggaggagtacaagaaagaggtggagaggaagaaactagaacttgatgctcctggctggttctcttca

SEQ ID NO: 1142 - DNA, 3745 bp, Homo sapiens
  source 1..3745: mol_type = unassigned DNA
catttcctcccagcctcgtgcgggaaatggctttaattctgacggcagggctgtgagggactagcgggaacccgagccttttgtcaaggaactgcggcgtcggtggccagtcatccccgccgccgcggagccgctgcactgctgggggatctcccagcagctctgacgagcgcgggctgcagcatgggcagaaaacgctgccctgcagattagctgggtggattttttaagcgcaccccaccccccaaacccataaaataacaaaaccaacccgcagtggccgaccggagatagctaagatgccgcgcaggagtttccacctggatgtttgaggttgtgtagatgtggccggcacccttgagagtggagctagggggtgcagactgagcagtgaacagaaggagccttggacagggctgggccagcctcccgagttccaggagcgaattgcaaacccaccgggaaaatgagcgaagagacggtccccgaggctgcctcgccgccgcccccgcaggggcagccttactttgaccgcttctcagaggacgaccccgagtacatgcgccttcgcaaccgggcggcggacctgcggcaggacttcaacctgatggagcagaagaagcgcgtcaccatgatcctgcagagtccctctttcagggaggagctggaaggcctcatccaggagcagatgaagaaggggaacaactcctccaacatctgggccctgcgacagatcgcggacttcatggccagcacctcccacgcagtcttcccgacatcttccatgaatgtctccatgatgacgcctatcaatgacctccacacagctgactccctgaacctggccaaaggggagcggctcatgcggtgcaagatcagcagtgtctaccgactcctggacctctatggctgggcccagctgagtgacacctatgtcacgttgagagtcagcaaggagcaggaccacttcctgatcagccctaagggagtttcttgcagtgaagtcacagcgtccagcctgatcaaggtgaacattctgggagaggtggtggagaagggcagcagctgcttcccagtggacaccacaggcttctgtctgcactcggccatctatgcagcgaggcccgacgtgcgctgcatcatccacctgcacacaccggccacagcagcggtgtcggccatgaagtggggcctcctgcctgtctcccacaatgccctgctggtgggggacatggcctattatgacttcaatggggaaatggagcaggaagccgatcggatcaacctgcagaagtgccttggacccacctgcaagatcctggtgctaagaaaccatggagtggttgctctgggtgacacggtagaggaggcattttacaagatcttccacctgcaggctgcatgtgagatacaggtgtcggctctgtccagtgccgggggagtggagaacctcatcctcctggagcaggagaagcaccggccccatgaggtgggctccgtgcagtgggccgggagcacctttgggcctatgcagaagagtcggctgggggagcatgagtttgaggccctcatgaggatgctggacaacctgggctacagaacaggttacacgtatcgccacccctttgttcaagagaaaaccaaacacaaaagtgaggtggagattccagccacggtcacagccttcgtgtttgaggaggacggtgccccggtgcccgccctgcgacagcatgcccagaagcagcagaaggagaagacccgctggctcaatacgcccaacacctacctgcgggtcaatgtggccgatgaggtccagaggagcatgggcagcccccgacccaagaccacgtggatgaaggctgacgaggtggagaaatccagcagtggcatgccgattcgcatcgaaaacccaaaccaatttgtgcctctctatactgacccccaggaagtactggagatgaggaacaagattcgagaacaaaaccgacaagatgtgaagtcagcggggcctcagtcccagctcctggcgagcgtcattgccgagaagagccgaagcccgtctacagagagccagctgatgtccaagggagacgaggataccaaagacgattcagaggagacggtgcccaaccccttcagccaactcactgaccaggagttggaggagtacaagaaagaggtggagaggaagaaactagaacttgatggagagaaagaaactgccccagaagagcctggctcacctgcaaagtctgcacctgcttctccagtgcagagcccagcgaaggaggcagagacaaagagccctttagtctctccttccaagtctttagaggaaggtactaagaagacagaaacaagcaaagccgccaccacagagcccgaaacaacccagccggaaggggtggtggtcaacgggagggaggaggagcagacggcagaggaaatcctcagcaaaggcctgagccagatgaccaccagtgctgacacggatgttgatacctctaaggacaaaaccgagtcggtcaccagcggccccatgtccccagagggctcaccttccaagtctccctcaaagaagaaaaagaaattccgaaccccctccttcctgaaaaagagcaaaaagaaggagaaagtggagtcctgattcatgacacccttgggctccctcctgcctcctctctctcctccccttcccttctcccatctctgtccctgcaagcacagggctaaggagggatagagtaggaccctggaccacattcggaaggggaacttagagatcacccgaccaacccttcgttttacagttgcccaagagaaatcagattacctgagactgggtcatttataatgaacacagatttatttctctcacatctggaagctgggaagtccaagatcaaggcaccagcatttggtgaagccttctttctgtgtcatcccatggcagaagacagaagggcaagagaggaaaccggtccaagcaggatgccttcctttttctgacaggcagcccccagcagtaccatcacaaaccttggtctcttcttgtcaccagcaaagggatgaaggataagtgatgaggagactgaagcacagaggtgaagcagcttgcccaacgtcacactgctgcttagtgatagaggcagtgctagaccccggggctcctgaatgttactgttggaggctcttaacccactgggatcaagaaggtgtcaagagctagactctccctccaggagaatgaacacagacacaaaaccttgcatatatgcttccgggtaaagaacctgcctgcattttggtaccactacgtgctggcctgtcctgggcatgttatatcatgagaaggcagggaaggctgaatcattaaggacatgaatcagattgattctcgtggctttaaaaacaaacactacaggaccagcatgacccgccagcctgttatccacagaggcttgtggtctccattgaaaagaagcaaagacagcacgtcccaactcaaaagattgtgtcatcctaaaggtgaaaggaagagatgatccaagcaaatttaggaccaatagcagactcttcacactgcctggggatagagggaccaccctgggctcctcttactcctggatttacttggatgaccagactcaggacttcatttaaatagaatttggtttcataatggaatcttcagcttgaaatataaatttgtttctgtctccctctgccatctcagcctttcttg

SEQ ID NO: 1143 - DNA, 3741 bp, Homo sapiens
  source 1..3741: mol_type = unassigned DNA
aaaggtttctggtgatgatgtagcatccgaggctcttaggaaatcggggctgcaagcactggcccctgcttggggatggtgggaccctcgcccggagcgtaacgcctgacagtttccacctggatgtttgaggttgtgtagatgtggccggcacccttgagagtggagctagggggtgcagactgagcagtgaacagaaggagccttggacagggctgggccagcctcccgagttccaggagcgaattgcaaacccaccgggaaaatgagcgaagagacggtccccgaggctgcctcgccgccgcccccgcaggggcagccttactttgaccgcttctcagaggacgaccccgagtacatgcgccttcgcaaccgggcggcggacctgcggcaggacttcaacctgatggagcagaagaagcgcgtcaccatgatcctgcagagtccctctttcagggaggagctggaaggcctcatccaggagcagatgaagaaggggaacaactcctccaacatctgggccctgcgacagatcgcggacttcatggccagcacctcccacgcagtcttcccgacatcttccatgaatgtctccatgatgacgcctatcaatgacctccacacagctgactccctgaacctggccaaaggggagcggctcatgcggtgcaagatcagcagtgtctaccgactcctggacctctatggctgggcccagctgagtgacacctatgtcacgttgagagtcagcaaggagcaggaccacttcctgatcagccctaagggagtttcttgcagtgaagtcacagcgtccagcctgatcaaggtgaacattctgggagaggtggtggagaagggcagcagctgcttcccagtggacaccacaggcttctgtctgcactcggccatctatgcagcgaggcccgacgtgcgctgcatcatccacctgcacacaccggccacagcagcggtgtcggccatgaagtggggcctcctgcctgtctcccacaatgccctgctggtgggggacatggcctattatgacttcaatggggaaatggagcaggaagccgatcggatcaacctgcagaagtgccttggacccacctgcaagatcctggtgctaagaaaccatggagtggttgctctgggtgacacggtagaggaggcattttacaagatcttccacctgcaggctgcatgtgagatacaggtgtcggctctgtccagtgccgggggagtggagaacctcatcctcctggagcaggagaagcaccggccccatgaggtgggctccgtgcagtgggccgggagcacctttgggcctatgcagaagagtcggctgggggagcatgagtttgaggccctcatgaggatgctggacaacctgggctacagaacaggttacacgtatcgccacccctttgttcaagagaaaaccaaacacaaaagtgaggtggagattccagccacggtcacagccttcgtgtttgaggaggacggtgccccggtgcccgccctgcgacagcatgcccagaagcagcagaaggagaagacccgctggctcaatacgcccaacacctacctgcgggtcaatgtggccgatgaggtccagaggagcatgggcagcccccgacccaagaccacgtggatgaaggctgacgaggtggagaaatccagcagtggcatgccgattcgcatcgaaaacccaaaccaatttgtgcctctctatactgacccccaggaagtactggagatgaggaacaagattcgagaacaaaaccgacaagatgtgaagtcagcggggcctcagtcccagctcctggcgagcgtcattgccgagaagagccgaagcccgtctacagagagccagctgatgtccaagggagacgaggataccaaagacgattcagaggagacggtgcccaaccccttcagccaactcactgaccaggagttggaggagtacaagaaagaggtggagaggaagaaactagaacttgatggagagaaagaaactgccccagaagagcctggctcacctgcaaagtctgcacctgcttctccagtgcagagcccagcgaaggaggcagagacaaagagccctttagtctctccttccaagtctttagaggaaggtactaagaagacagaaacaagcaaagccgccaccacagagcccgaaacaacccagccggaaggggtggtggtcaacgggagggaggaggagcagacggcagaggaaatcctcagcaaaggcctgagccagatgaccaccagtgctgacacggatgttgatacctctaaggacaaaaccgagtcggtcaccagcggccccatgtccccagagggctcaccttccaagtctccctcaaagaagaaaaagaaattccgaaccccctccttcctgaaaaagagcaaaaagaaggagaaagtggagtcctgattcatgacacccttgggctccctcctgcctcctctctctcctccccttcccttctcccatctctgtccctgcaagcacagggctaaggagggatagagtaggaccctggaccacattcggaaggggaacttagagatcacccgaccaacccttcgttttacagttgcccaagagaaatcaggtgacttgcccaaggtcacacagctagttagcggcagagcctgcactcgaattcaggtctcctgacttccagtccagtgctccttctactacacaacactgcctagttgtgggctgcctttgtttggatgctgtccaccaatctgagcctagggcaagaaggccagaaatgggccgtgagctctcacaggctcagactaaatcagaggtcaaggcttcccctgagtaaggtccatttcttcccaggaatccaatctcctgtggatggagctatctctacatttaaaaatctcttctcttttccactttgggtccctgccctgctgctcaaagtgactagccaaattgacccctccaacagaaagtaatctttgttcccaagggctgatggcttagcttgtactaccccaaacattaaccctgagctttcttcatggaacctcttgaatgatggatggaagagctataagaggtggtaggcataggggcaagccatgtaagctgaggattggggatggtttcatcaacataagaggccaggaacttgacccctttgaattgtgcatctcaggcacttcaaaactaaaaccaaatttagcataggaaaaagttgtttaatgctcagggcagaaatttggggaagttgaaatcctctgttggctttgggttgtataaggaggatcaaaacaacagaggaaatgctgactttctagctttgcatgacacctggagcaatgcactgtacctgcctcactcctgtccagtggtcaggtttcccctgaccttccctcacccccagaaacacttgcttacagaccgaaactggcatcttactcttggcaccttgacttgcaccctctgaggttccaactcagtcattctttgtccagcagaggagaatcagaaatgagcccttcaggattaatcctcttgcaccagctctcagagaaatgctgggtatccctgtccttgtccctatctgtccatcctggggcctggtaatggccacagttattgttttaaatgccaacactgtcttctcatgttcttccgtggggcattgattaatgagcatttgttggctcctaaaaattagacaatccattctcttgaaa

SEQ ID NO: 1144 - DNA, 3776 bp, Homo sapiens
  source 1..3776: mol_type = unassigned DNA
gccaggagagctctcatttcctcccagcctcgtgcgggaaatggctttaattctgacggcagggctgtgagggactagcgggaacccgagccttttgtcaaggaactgcggcgtcggtggccagtcatccccgccgccgcggagccgctgcactgctgggggatctcccagcagctctgacgagcgcgggctgcagcatgggcagaaaacgctgccctgcagattagctgggtggattttttaagcgcaccccaccccccaaacccataaaataacaaaaccaacccgcagtggccgaccggagatagctaagatgccgcgcaggagtttccacctggatgtttgaggttgtgtagatgtggccggcacccttgagagtggagctagggggtgcagactgagcagtgaacagaaggagccttggacagggctgggccagcctcccgagttccaggagcgaattgcaaacccaccgggaaaatgagcgaagagacggtccccgaggctgcctcgccgccgcccccgcaggggcagccttactttgaccgcttctcagaggacgaccccgagtacatgcgccttcgcaaccgggcggcggacctgcggcaggacttcaacctgatggagcagaagaagcgcgtcaccatgatcctgcagagtccctctttcagggaggagctggaaggcctcatccaggagcagatgaagaaggggaacaactcctccaacatctgggccctgcgacagatcgcggacttcatggccagcacctcccacgcagtcttcccgacatcttccatgaatgtctccatgatgacgcctatcaatgacctccacacagctgactccctgaacctggccaaaggggagcggctcatgcggtgcaagatcagcagtgtctaccgactcctggacctctatggctgggcccagctgagtgacacctatgtcacgttgagagtcagcaaggagcaggaccacttcctgatcagccctaagggagtttcttgcagtgaagtcacagcgtccagcctgatcaaggtgaacattctgggagaggtggtggagaagggcagcagctgcttcccagtggacaccacaggcttctgtctgcactcggccatctatgcagcgaggcccgacgtgcgctgcatcatccacctgcacacaccggccacagcagcggtgtcggccatgaagtggggcctcctgcctgtctcccacaatgccctgctggtgggggacatggcctattatgacttcaatggggaaatggagcaggaagccgatcggatcaacctgcagaagtgccttggacccacctgcaagatcctggtgctaagaaaccatggagtggttgctctgggtgacacggtagaggaggcattttacaagatcttccacctgcaggctgcatgtgagatacaggtgtcggctctgtccagtgccgggggagtggagaacctcatcctcctggagcaggagaagcaccggccccatgaggtgggctccgtgcagtgggccgggagcacctttgggcctatgcagaagagtcggctgggggagcatgagtttgaggccctcatgaggatgctggacaacctgggctacagaacaggttacacgtatcgccacccctttgttcaagagaaaaccaaacacaaaagtgaggtggagattccagccacggtcacagccttcgtgtttgaggaggacggtgccccggtgcccgccctgcgacagcatgcccagaagcagcagaaggagaagacccgctggctcaatacgcccaacacctacctgcgggtcaatgtggccgatgaggtccagaggagcatgggcagcccccgacccaagaccacgtggatgaaggctgacgaggtggagaaatccagcagtggcatgccgattcgcatcgaaaacccaaaccaatttgtgcctctctatactgacccccaggaagtactggagatgaggaacaagattcgagaacaaaaccgacaagatgtgaagtcagcggggcctcagtcccagctcctggcgagcgtcattgccgagaagagccgaagcccggtagagcagaggctgcccctgactggcggggaaacgtgtttgccttcggggtcttctgtgcctggggctgggttgcaggacccctgagtcctcatacccaccttcccctgtgatcttgggtgccggtgctcttgctgcaaaatggaggccaacctcacaggggtgctgtgaggaccagggaggacaatgtctgatggcccctgtgggcactgggctggagaacagcagcccagcctgcctgcaggagtgatgcggccggcttccgtacctcctgccatggaactccactctgtcctcccttactaccccgtgaagtggggactcataggcttggggctggagactcccaggtgccccaggtgtgcccagccctgagagtctctgacctctgagcctggtatgacatcatccaaccagagctctggaaagatgatcatgtacccatagagaaggggtatatagacaggacccatgctcctacaggatgggaagggacaatattacccacacaaacccacattgagttagaaagtattgtaattgtttttgtgcttgagatagaacagtgttttgtctagtgcttagcaaaaggggtgaagttcagaattctggcatgtgtttgaaatcactgctgctccttgcaaggtagcaatgggcatgacattttccttagcagtaaaaattggggaaatacaggaaatgttcctctctgcagggcaaattgtgatgatgcaatgatttcaggtcaagactgcagcccacagggtgggtgcccattggcaggagaagtgtgaaagttgtatcatcacacttacctccccccaaccccaactcagccaagatggggaacactgaatatcccgcagggtcaagtatagaaatagccatgttctggcgggaggtgagagttcattacaatgagcaacactgttaaaaaaacaaacaaaaatctcccctgccatttataccaagtgctcttctcggagtccctcttcttgggtttttggtcttggattctcggttgactccatgattccctacattaggcctactgtggcctcccttttggaaggggcccaggggcagaagacctggcgggccagggcagggaggactggcagcctccaggctcacctccctttggcttcactctctttgctcctcagcttcagagcactgcatcctcaaaggccaagatgaggatgctgaattaggaaaaaaggctgtggagtctgaattttagttcctatcttgggctagaggggtcaaagaattcctgaagcttatgtaagggccggctggtcagctccctagaaccacgggctccacagaggtggcaaaacccagtgattttgccagtatccctgcagggacctgcggtacaggcaggttgaagatctgagactcaggaaccttggcccctttgtcacttacaactgtgtgtgaaacaggactaacagtttggactgagagcactgaagctgctgtgtgttgtgcatataacttaatgctgtgtgttgtggcttgcactgctgtgggggcggggagggcagtggtggggaatggctggcatgaagcttgcttgagccaatgctatgcttgctgggctttggctgactggctttgggccaccaactgtatttgcatagtgatggcttggaagtgtccatagaagggattgcaataaaggtgtgtcttccttc

SEQ ID NO: 1145 - DNA, 930 bp, Homo sapiens
  source 1..930: mol_type = unassigned DNA
tcccttattcaactgtcttcatttattctgtaaaagtagcagcagctcagccctgaccatctcctctctcacttgtgggagtctcatttagggatcgtttccacctggatgtttgaggttgtgtagatgtggccggcacccttgagagtggagctagggggtgcagactgagcagtgaacagaaggagccttggacagggctgggccagcctcccgagttccaggagcgaattgcaaacccaccgggaaaatgagcgaagagacggtccccgaggctgcctcgccgccgcccccgcaggggcagccttactttgaccgcttctcagaggacgaccccgagtacatgcgccttcgcaaccgggcggcggacctgcggcaggacttcaacctgatggagcagaagaagcgcgtcaccatgatcctgcagagtccctctttcagggaggagctggaaggcctcatccaggagcagatgaagaaggggaacaactcctccaacatctgggccctgcgacagatcgcggacttcatggccagcacctcccacgcagtcttcccgacatcttccatgaatgtctccatgatgacgcctatcaatgacctccacacagctgactccctgaacctggccaaaggggagcggctcatgcggtgcaagatcagcagtgtctaccgactcctggacctctatggctgggcccagctgagtgacacctatgtcacgttgagagtcagcaaggagcaggaccacttcctgatcagccctaagggagtttcttgcagtgaagtcacagcgtccagcctgatcaaggtgaacattctgggagaggtggtggagaagggcagcagctgcttcccagtggacaccacaggcttctgtctgcactcggccatctatgcagcgaggcccgacgtgcgctgcatcatcca

SEQ ID NO: 1146 - DNA, 721 bp, Homo sapiens
  source 1..721: mol_type = unassigned DNA
cggtgcgaggcgggcttggcggggctgggcgcgtcccccggggcctcgcgatcgctggctgcgcggcgctcagccgcagtggccggccgagcaggtgcggcgtcggcagccgcctacattgagatcggggcaaccggcactttccacctggatgtttgaggttgtgtagatgtggccggcacccttgagagtggagctagggggtgcagactgagcagtgaacagaaggagccttggacagggctgggccagcctcccgagttccaggagcgaattgcaaacccaccgggaaaatgagcgaagagacggtccccgaggctgcctcgccgccgcccccgcaggggcagccttactttgaccgcttctcagaggacgaccccgagtacatgcgccttcgcaaccgggcggcggacctgcggcaggacttcaacctgatggagcagaagaagcgcgtcaccatgatcctgcagagtccctctttcagggaggagctggaaggcctcatccaggagcagatgaagaaggggaacaactcctccaacatctgggccctgcgacagatcgcggacttcatggccagcacctcccacgcagtcttcccgacatcttccatgaatgtctccatgatgacgcctatcaatgacctccacacagctgactccctgaacctggccaaaggggagcggctcatgcggtgcaagatcagcagtgtctaccgact

SEQ ID NO: 1147 - DNA, 2332 bp, Homo sapiens
  source 1..2332: mol_type = unassigned DNA
atttcctcccagcctcgtgcgggaaatggctttaattctgacggcagggctgtgagggactagcgggaacccgagccttttgtcaaggaactgcggcgtcggtggccagtcatccccgccgccgcggagccgctgcactgctgggggatctcccagcagctctgacgagcgcgggctgcagcatgggcagaaaacgctgccctgcagattagctgggtggattttttaagcgcaccccaccccccaaacccataaaataacaaaaccaacccgcagtggccgaccggagatagctaagatgccgcgcaggagagttccaggagcgaattgcaaacccaccgggaaaatgagcgaagagacggtccccgaggctgcctcgccgccgcccccgcaggggcagccttactttgaccgcttctcagaggacgaccccgagtacatgcgccttcgcaaccgggcggcggacctgcggcaggacttcaacctgatggagcagaagaagcgcgtcaccatgatcctgcagagtccctctttcagggaggagctggaaggcctcatccaggagcagatgaagaaggggaacaactcctccaacatctgggccctgcgacagatcgcggacttcatggccagcacctcccacgcagtcttcccgacatcttccatgaatgtctccatgatgacgcctatcaatgacctccacacagctgactccctgaacctggccaaaggggagcggctcatgcggtgcaagatcagcagtgtctaccgactcctggacctctatggctgggcccagctgagtgacacctatgtcacgttgagagtcagcaaggagcaggaccacttcctgatcagccctaagggagtttcttgcagtgaagtcacagcgtccagcctgatcaaggtgaacattctgggagaggtggtggagaagggcagcagctgcttcccagtggacaccacaggcttctgtctgcactcggccatctatgcagcgaggcccgacgtgcgctgcatcatccacctgcacacaccggccacagcagcggtgtcggccatgaagtggggcctcctgcctgtctcccacaatgccctgctggtgggggacatggcctattatgacttcaatggggaaatggagcaggaagccgatcggatcaacctgcagaagtgccttggacccacctgcaagatcctggtgctaagaaaccatggagtggttgctctgggtgacacggtagaggaggcattttacaagatcttccacctgcaggctgcatgtgagatacaggtgtcggctctgtccagtgccgggggagtggagaacctcatcctcctggagcaggagaagcaccggccccatgaggtgggctccgtgcagtgggccgggagcacctttgggcctatgcagaagagtcggctgggggagcatgagtttgaggccctcatgaggatgctggacaacctgggctacagaacaggttacacgtatcgccacccctttgttcaagagaaaaccaaacacaaaagtgaggtggagattccagccacggtcacagccttcgtgtttgaggaggacggtgccccggtgcccgccctgcgacagcatgcccagaagcagcagaaggagaagacccgctggctcaatacgcccaacacctacctgcgggtcaatgtggccgatgaggtccagaggagcatgggcagcccccgacccaagaccacgtggatgaaggctgacgaggtggagaaatccagcagtggcatgccgattcgcatcgaaaacccaaaccaatttgtgcctctctatactgacccccaggaagtactggagatgaggaacaagattcgagaacaaaaccgacaagatgtgaagtcagcggggcctcagtcccagctcctggcgagcgtcattgccgagaagagccgaagcccggtagagcagaggctgcccctgactggcggggaaacgtgtttgccttcggggtcttctgtgcctggggctgggttgcaggacccctgagtcctcatacccaccttcccctgtgatcttgggtgccggtgctcttgctgcaaaatggaggccaacctcacaggggtgctgtgaggaccagggaggacaatgtctgatggcccctgtgggcactgggctggagaacagcagcccagcctgcctgcaggagtgatgcggccggcttccgtacctcctgccatggaactccactctgtcctcccttactaccccgtgaagtggggactcataggcttggggctggagactcccaggtgccccaggtgtgcccagccctgagagtctctgacctctgag

SEQ ID NO: 1148 - DNA, 580 bp, Homo sapiens
  source 1..580: mol_type = unassigned DNA
tttcctcccagcctcgtgcgggaaatggctttaattctgacggcagggctgtgagggactagcgggaacccgagccttttgtcaaggaactgcggcgtcggtggccagtcatccccgccgccgcggagccgctgcactgctgggggatctcccagcagctctgacgagcgcgggctgcagcatgggcagaaaacgctgccctgcagattagctgggtggattttttaagcgcaccccaccccccaaacccataaaataacaaaaccaacccgcagtggccgaccggagatagctaagatgccgcgcaggagagcaccactaacacgaagctcttctgcacatcagactcttaatcaaaggattgggcatatcagaagtttccacctggatgtttgaggttgtgtagatgtggccggcacccttgagagtggagctagggggtgcagactgagcagtgaacagaaggagccttggacagggctgggccagcctcccgttccaggagcgaattgcaaacccaccgggaaaatgagcgaagagacggtccccgaggctgcctcgccgccgcccccgcaggggc

SEQ ID NO: 1149 - DNA, 1308 bp, Homo sapiens
  source 1..1308: mol_type = unassigned DNA
atttcctcccagcctcgtgcgggaaatggctttaattctgacggcagggctgtgagggactagcgggaacccgagccttttgtcaaggaactgcggcgtcggtggccagtcatccccgccgccgcggagccgctgcactgctgggggatctcccagcagctctgacgagcgcgggctgcagcatgggcagaaaacgctgccctgcagattagctgggtggattttttaagcgcaccccaccccccaaacccataaaataacaaaaccaacccgcagtggccgaccggagatagctaagatgccgcgcaggagtttccacctggatgtttgaggttgtgtagatgtggccggcacccttgagagtggagctagggggtgcagactgagcagtgaacagaaggagccttggacagggctgggccagcctcccgagttccaggagcgaattgcaaacccaccgggaaaatgagcgaagagacggtccccgaggctgcctcgccgccgcccccgcaggggcagccttactttgaccgcttctcagaggacgaccccgagtacatgcgccttcgcaaccgggcggcggacctgcggcaggacttcaacctgatggagcagaagaagcgcgtcaccatgatcctgcagagtccctctttcagggaggagctggaaggcctcatccaggagcagatgaagaaggggaacaactcctccaacatctgggccctgcgacagatcgcggacttcatggccagcacctcccacgcagtcttcccgacatcttccatgaatgtctccatgatgacgcctatcaatgacctccacacagctgactccctgaacctggccaaaggggagcggctcatgcggtgcaagatcagcagtgtctaccgactcctggacctctatggctgggcccagctgagtgacacctatgtcacgttgagagtcagcaaggagcaggaccacttcctgatcagccctaagggagtttcttgcagtgaagtcacagcgtccagcctggtgagtgaagtactggagatgaggaacaagattcgagaacaaaaccgacaagatgtgaagtcagcggggcctcagtcccagctcctggcgagcgtcattgccgagaagagccgaagcccgtctacagagagccagctgatgtccaagggagacgaggataccaaagacgattcagaggagacggtgcccaaccccttcagccaactcactgaccaggagttggaggagtacaagaaagaggtggagaggaagaaactagaacttgatgctcctggctggttctcttca

SEQ ID NO: 1150 - DNA, 2654 bp, Homo sapiens
  source 1..2654: mol_type = unassigned DNA
gggaaatggctttaattctgacggcagggctgtgagggactagcgggaacccgagccttttgtcaaggaactgcggcgtcggtggccagtcatccccgccgccgcggagccgctgcactgctgggggatctcccagcagctctgacgagcgcgggctgcagcatgggcagaaaacgctgccctgcagattagctgggtggattttttaagcgcaccccaccccccaaacccataaaataacaaaaccaacccgcagtggccgaccggagatagctaagatgccgcgcaggagtttccacctggatgtttgaggttgtgtagatgtggccggcacccttgagagtggagctagggggtgcagactgagcagtgaacagaaggagccttggacagggctgggccagcctcccgagttccaggagcgaattgcaaacccaccgggaaaatgagcgaagagacggtccccgaggctgcctcgccgccgcccccgcaggggcagccttactttgaccgcttctcagaggacgaccccgagtacatgcgccttcgcaaccgggcggcggacctgcggcaggacttcaacctgatggagcagaagaagcgcgtcaccatgatcctgcagagtccctctttcagggaggagctggaaggcctcatccaggagcagatgaagaaggggaacaactcctccaacatctgggccctgcgacagatcgcggacttcatggccagcacctcccacgcagtcttcccgacatcttccatgaatgtctccatgatgacgcctatcaatgacctccacacagctgactccctgaacctggccaaaggggagcggctcatgcggtgcaagatcagcagtgtctaccgactcctggacctctatggctgggcccagctgagtgacacctatgtcacgttgagagtcagcaaggagcaggaccacttcctgatcagccctaagggagtttcttgcagtgaagtcacagcgtccagcctgatcaaggtgaacattctgggagaggtggtggagaagggcagcagctgcttcccagtggacaccacaggcttctgtctgcactcggccatctatgcagcgaggcccgacgtgcgctgcatcatccacctgcacacaccggccacagcagcggtgtcggccatgaagtggggcctcctgcctgtctcccacaatgccctgctggtgggggacatggcctattatgacttcaatggggaaatggagcaggaagccgatcggatcaacctgcagaagtgccttggacccacctgcaagatcctggtgctaagaaaccatggagtggttgctctgggtgacacggtagaggaggcattttacaagatcttccacctgcaggctgcatgtgagatacaggtgtcggctctgtccagtgccgggggagtggagaacctcatcctcctggagcaggagaagcaccggccccatgaggtgggctccgtgcagtgggccgggagcacctttgggcctatgcagaagagtcggctgggggagcatgagtttgaggccctcatgaggatgctggacaacctgggctacagaacaggttacacgtatcgccacccctttgttcaagagaaaaccaaacacaaaagtgaggtggagattccagccacggtcacagccttcgtgtttgaggaggacggtgccccggtgcccgccctgcgacagcatgcccagaagcagcagaaggagaagacccgctggctcaatacgcccaacacctacctgcgggtcaatgtggccgatgaggtccagaggagcatgggcagcccccgacccaagaccacgtggatgaaggctgacgaggtggagaaatccagcagtggcatgccgattcgcatcgaaaacccaaaccaatttgtgcctctctatactgacccccaggaagtactggagatgaggaacaagattcgagaacaaaaccgacaagatgtgaagtcagcggggcctcagtcccagctcctggcgagcgtcattgccgagaagagccgaagcccgtctacagagagccagctgatgtccaagggagacgaggataccaaagacgattcagaggagacggtgcccaaccccttcagccaactcactgaccaggagttggaggagtacaagaaagaggtggagaggaagaaactagaacttgatgagacaggacaggaacgagagccaggctctggtccggccgtgtgcgagttcttcagcgttgccctccacatctggagtaacatattggagagaaagaaactgccccagaagagcctggctcacctgcaaagtctgcacctgcttctccagtgcagagcccagcgaaggaggcagagacaaagagccctttagtctctccttccaagtctttagaggaaggtactaagaagacagaaacaagcaaagccgccaccacagagcccgaaacaacccagccggaaggggtggtggtcaacgggagggaggaggagcagacggcagaggaaatcctcagcaaaggcctgagccagatgaccaccagtgctgacacggatgttgatacctctaaggacaaaaccgagtcggtcaccagcggccccatgtccccagagggctcaccttccaagtctccctcaaagaagaaaaagaa

SEQ ID NO: 1151 - DNA, 4337 bp, Homo sapiens
  source 1..4337: mol_type = unassigned DNA
ggcgctcggctagtcccgccagagcgcgagccgccagcccgtaacggtcgccagtgtgaggggcgggagggaaagaagaggggtttaaattagattttttaaaacacagagcaagcgccagaggcgtcggcatcccaggtgtcgccgcttcctgctgcacagggctcggcgtacaggtccctccctcctcaagccccctccccttctcccgccctaccctctggggctctgcggcgcttaagaggcggccgcagcggcggatccggcggctgctgcagcccgggcggctgccgagaaggagggaggggaaacacaaagccggctacgcgctgcgagataacaagagtaatccacagacttaaaacatgagctcagatgccagccaaggcgtgattaccactcctcctcctcccagcatgcctcacaaagagagatattttgaccgcatcaatgaaaatgacccagaatacattagggagaggaacatgtctcctgatctacgacaagacttcaacatgatggagcagaggaaacgagttactcagatcctgcaaagtcctgcctttcgggaagacttggaatgccttattcaagaacagatgaagaaaggccacaacccaactggattactagcattacagcagattgcagattacatcatggccaattctttctcgggtttttcttcacctcctctcagtcttggcatggtcacacctatcaatgaccttcctggtgcagatacatcctcatatgtgaagggagaaaaacttactcgctgtaaacttgccagcctgtacagacttgtagacttgtttggatgggcacacctggcaaatacctatatctcagtaagaataagtaaggagcaagaccacattataataattcccagaggcctatctttttctgaagctacagcctccaatttggtgaaagtcaatataataggagaagtggttgaccagggaagtaccaatttgaaaattgaccatacaggattcagtccccatgctgcaatctattcaacacgtcctgatgttaagtgtgtgatacacatccatacccttgcaacagcagctgtatcctccatgaaatgtgggatccttccaatttctcaagagtctcttcttctgggagatgttgcctattatgactaccaagggtcacttgaagaacaggaggagagaattcaactgcagaaggttctgggaccaagttgtaaggtgctggtactcaggaatcatggtgtggttgcacttggagaaacattagaggaggcttttcattatatttttaatgtgcaactagcctgtgagattcaggtgcaggccctagcaggtgcaggtggagtagacaatctccatgtactggactttcagaagtataaagctttcacttacactgtagcagcgtctggtggaggaggtgtgaatatgggttcccatcaaaaatggaaggttggcgaaattgagtttgaagggcttatgaggactctggacaacttggggtatagaacaggctatgcttacaggcatcctctcattcgagagaagcctaggcacaagagtgatgtggaaatcccagcaactgtgactgctttttcctttgaagacgatacagtgccactctctcctctcaaatacatggcacagaggcaacagcgtgaaaaaacaagatggctgaactcaccaaatacttacatgaaagtgaatgtgcctgaggagtctcggaacggagaaaccagtccccgaaccaaaatcacgtggatgaaagcagaagactcatctaaagttagtggtggaacacctatcaaaattgaagatccaaatcagtttgttcctttaaacacaaacccgaatgaggtactagaaaagagaaataagattcgggaacaaaatcgatatgacttgaaaacagcaggaccacaatctcagttgcttgctggaattgttgtggataagccaccttctactatgcaatttgaagatgatgatcatggcccaccagctcctcctaacccatttagtcatctcacagaaggagaacttgaagagtataagaggacaatcgaacgtaaacaacaaggcctagaagaaaaccatgagctgttttccaagagcttcatctccatggaagtgcctgtcatggtagtaaatggcaaggatgatatgcatgatgttgaagatgagcttgctaagcgagtgagtaggttaagcacaagtacaaccatagaaaacatcgagattactattaagtctccagagaaaatcgaagaagtcctgtcacctgaaggctccccttcaaaatcgccatccaagaaaaagaagaaattccgcactccttcttttctgaaaaagaacaaaaaaaaggagaaagttgaggcctaaataaagtctttttataattattattataacaatgtgacattgcacatctaaataccacatttaagttgatcattaatatgcaatggtagatcagattgggggatgtagcaaactggactttaagaactggaaagaggttttacaaaagaaaaactttcagattcatctctcattttatatgtccagaaatggctttgaattttaagcaattactagttttaattagctctgccctcatgaagtattattataattcaccataaacagctatctgtctgaattacttcaggccttctccataatatctgttagaaagaaattgccagtgagcaagtgagaatttttatttctcaatacctgcttcacttgataatcatattataattttttatcatgattattgactatatttttggagtcccattgtttcagtgggcattaacagaatgctttaaaaacttctaagacaagaatctatagcattagtatacactggcacataattttttaaaaagttttaagaaaagattcatttggaattttattcacagtataaaatttcctcacctgaagtaactttgtttgccaaaaaagttgttttaataaactataatttttgaaaacttccttttttattagtttagaaagccccttatttttcaacaaaggggattttgtacacataacatgggttatttagtttaactctggcaaaaaaaaaaaaaaaaattttgtatgttgatgtttgtataccgttcagtataaaagtgtcctaagcatattagccaatcttttcacagtagagcatacttaaggctgcttggtactgagtatacttaaatataactccagaatccagggacttggtgttaaaacaggattagagcatgtaaaggtacatctagattcatatttgaatcttaaactgtatttttctcttagtattgctaatgagtaaagaaaagtctcataaggtagccaaatgaaaaagaatgaaagggaaagtgaaaaattaaggggacaaaagatgggatgtgaaaagaagaattctagtttgatggtgactcatattcacgataggatacaaagtgtgatttgttggaaacatgtcccaaatttctaaaattctgcttctctgccaaaagcaatgtctttcttggttgatatttgagttttaaaagggtcaaatctttctaattttttgtatctttagagggcagcactagaagaaatcagcaggtctaatcccaccagtaagaaaactaccacttcttgatttttacagatttaaaaaaatcttttcagtgacctttctttttaatgtaaatacaaatttaaacctaggcttaatataggcgtttcccctttcacccaagtgatgtcacagttcgatgcaaaatcaatgatccagaatgatcgtgggtaaaaataactcaaagtgtttcttaagggtgagttggcatgcaaaaaattacattgattacagtgtgttttggagctggctctgtttgtgtgcatatgataatgcagagttgagccagagcctggaaatgtcattctagatctcactaactactggaatcagtgttttaatctcttggtggaaactttcagttgcttaactctctattggaagatttttttaatgttctacatcatttatgttgtattacaatgtatgtagaaatagtaacctgtgaactatgcttttccataactttttaaaaatatatatatctaaatgaatgcaatgtgcataaatattttttaaacataacagtgaactattgcaccttttgctaatgcctctatttacttgctttggcataaagaatgagccaatgaacctctgtgtcctgtggaaaaatgtataaatgttatctgatattgctcttagatgtaatgctaattaatgttaaatcacaaataaacagtattttaaatata

SEQ ID NO: 1152 - DNA, 3081 bp, Homo sapiens
  source 1..3081: mol_type = unassigned DNA
ggggcgctcggctagtcccgccagagcgcgagccgccagcccgtaacggtcgccagtgtgaggggcgggagggaaagaagaggggtttaaattagattttttaaaacacagagcaagcgccagaggcgtcggcatcccaggtgtcgccgcttcctgctgcacagggctcggcgtacaggtccctccctcctcaagccccctccccttctcccgccctaccctctggggctctgcggcgcttaagaggcggccgcagcggcggatccggcggctgctgcagcccgggcggctgccgagaaggagggaggggaaacacaaagccggctacgcgctgcgagataacaagagtaatccacagacttaaaacatgagctcagatgccagccaaggcgtgattaccactcctcctcctcccagcatgcctcacaaagagagatattttgaccgcatcaatgaaaatgacccagaatacattagggagaggaacatgtctcctgatctacgacaagacttcaacatgatggagcagaggaaacgagttactcagatcctgcaaagtcctgcctttcgggaagacttggaatgccttattcaagaacagatgaagaaaggccacaacccaactggattactagcattacagcagattgcagattacatcatggccaattctttctcgggtttttcttcacctcctctcagtcttggcatggtcacacctatcaatgaccttcctggtgcagatacatcctcatatgtgaagggagaaaaacttactcgctgtaaacttgccagcctgtacagacttgtagacttgtttggatgggcacacctggcaaatacctatatctcagtaagaataagtaaggagcaagaccacattataataattcccagaggcctatctttttctgaagctacagcctccaatttggtgaaagtcaatataataggagaagtggttgaccagggaagtaccaatttgaaaattgaccatacaggattcagtccccatgctgcaatctattcaacacgtcctgatgttaagtgtgtgatacacatccatacccttgcaacagcagctgtatcctccatgaaatgtgggatccttccaatttctcaagagtctcttcttctgggagatgttgcctattatgactaccaagggtcacttgaagaacaggaggagagaattcaactgcagaaggttctgggaccaagttgtaaggtgctggtactcaggaatcatggtgtggttgcacttggagaaacattagaggaggcttttcattatatttttaatgtgcaactagcctgtgagattcaggtgcaggccctagcaggtgcaggtggagtagacaatctccatgtactggactttcagaagtataaagctttcacttacactgtagcagcgtctggtggaggaggtgtgaatatgggttcccatcaaaaatggaaggttggcgaaattgagtttgaagggcttatgaggactctggacaacttggggtatagaacaggctatgcttacaggcatcctctcattcgagagaagcctaggcacaagagtgatgtggaaatcccagcaactgtgactgctttttcctttgaagacgatacagtgccactctctcctctcaaatacatggcacagaggcaacagcgtgaaaaaacaagatggctgaactcaccaaatacttacatgaaagtgaatgtgcctgaggagtctcggaacggagaaaccagtccccgaaccaaaatcacgtggatgaaagcagaagactcatctaaagttagtggtggaacacctatcaaaattgaagatccaaatcagtttgttcctttaaacacaaacccgaatgaggtactagaaaagagaaataagattcgggaacaaaatcgatatgacttgaaaacagcaggaccacaatctcagttgcttgctggaattgttgtggataagccaccttctactatgcaatttgaagatgatgatcatggcccaccagctcctcctaacccatttagtcatctcacagaaggagaacttgaagagtataagaggacaatcgaacgtaaacaacaaggcctagaagatgctgagcaggaattactctcagatgacgcttcatctgtttcacaaattcagtctcaaactcagtcaccgcaaaatgtccctgaaaaattagaagaaaaccatgagctgttttccaagagcttcatctccatggaagtgcctgtcatggtagtaaatggcaaggatgatatgcatgatgttgaagatgagcttgctaagcgagtgagtaggttaagcacaagtacaaccatagaaaacatcgagattactattaagtctccagagaaaatcgaagaagtcctgtcacctgaaggctccccttcaaaatcgccatccaagaaaaagaagaaattccgcactccttcttttctgaaaaagaacaaaaaaaaggagaaagttgaggcctaaataaagtctttttataattattattataacaatgtgacattgcacatctaaataccacatttaagttgatcattaatatgcaatggtagatcagattgggggatgtagcaaactggactttaagaactggaaagaggttttacaaaagaaaaactttcagattcatctctcattttatatgtccagaaatggctttgaattttaagcaattactagttttaattagctctgccctcatgaagtattattataattcaccataaacagctatctgtctgaattacttcaggccttctccataatatctgttagaaagaaattgccagtgagcaagtgagaatttttatttctcaatacctgcttcacttgataatcatattataattttttatcatgattattgactatatttttggagtcccattgtttcagtgggcattaacagaatgctttaaaaacttctaagacaagaatctatagcattagtatacactggcacataattttttaaaaagttttaagaaaagattcatttggaattttattcacagtataaaatttcctcacctgaagtaactttgtttgccaaaaaa

SEQ ID NO: 1153 - DNA, 3114 bp, Homo sapiens
  source 1..3114: mol_type = unassigned DNA
agtccacaaaactccctgattccatcctctctgcctcttatgaagcaatactagagaggaaaaacaaaacccattcctttaagaaagattccgcctcctctcataagcaagcgcctaatggtaattgtagagtttactaagtcaaacacttactactcagcattgagagaagctgctgctgctaatgctgctgctgctgctgccgccgccgccgctgctgctgctgctgttggtctgaggctgcagtaggtttctgtgcagcattgcagaatccacacctagagaacagaagacacagacacgtacgtctactacccttgttagaaggaagctttggatcttcggtggataacaagagtaatccacagacttaaaacatgagctcagatgccagccaaggcgtgattaccactcctcctcctcccagcatgcctcacaaagagagatattttgaccgcatcaatgaaaatgacccagaatacattagggagaggaacatgtctcctgatctacgacaagacttcaacatgatggagcagaggaaacgagttactcagatcctgcaaagtcctgcctttcgggaagacttggaatgccttattcaagaacagatgaagaaaggccacaacccaactggattactagcattacagcagattgcagattacatcatggccaattctttctcgggtttttcttcacctcctctcagtcttggcatggtcacacctatcaatgaccttcctggtgcagatacatcctcatatgtgaagggagaaaaacttactcgctgtaaacttgccagcctgtacagacttgtagacttgtttggatgggcacacctggcaaatacctatatctcagtaagaataagtaaggagcaagaccacattataataattcccagaggcctatctttttctgaagctacagcctccaatttggtgaaagtcaatataataggagaagtggttgaccagggaagtaccaatttgaaaattgaccatacaggattcagtccccatgctgcaatctattcaacacgtcctgatgttaagtgtgtgatacacatccatacccttgcaacagcagctgtatcctccatgaaatgtgggatccttccaatttctcaagagtctcttcttctgggagatgttgcctattatgactaccaagggtcacttgaagaacaggaggagagaattcaactgcagaaggttctgggaccaagttgtaaggtgctggtactcaggaatcatggtgtggttgcacttggagaaacattagaggaggcttttcattatatttttaatgtgcaactagcctgtgagattcaggtgcaggccctagcaggtgcaggtggagtagacaatctccatgtactggactttcagaagtataaagctttcacttacactgtagcagcgtctggtggaggaggtgtgaatatgggttcccatcaaaaatggaaggttggcgaaattgagtttgaagggcttatgaggactctggacaacttggggtatagaacaggctatgcttacaggcatcctctcattcgagagaagcctaggcacaagagtgatgtggaaatcccagcaactgtgactgctttttcctttgaagacgatacagtgccactctctcctctcaaatacatggcacagaggcaacagcgtgaaaaaacaagatggctgaactcaccaaatacttacatgaaagtgaatgtgcctgaggagtctcggaacggagaaaccagtccccgaaccaaaatcacgtggatgaaagcagaagactcatctaaagttagtggtggaacacctatcaaaattgaagatccaaatcagtttgttcctttaaacacaaacccgaatgaggtactagaaaagagaaataagattcgggaacaaaatcgatatgacttgaaaacagcaggaccacaatctcagttgcttgctggaattgttgtggataagccaccttctactatgcaatttgaagatgatgatcatggcccaccagctcctcctaacccatttagtcatctcacagaaggagaacttgaagagtataagaggacaatcgaacgtaaacaacaaggcctagaagaaaaccatgagctgttttccaagagcttcatctccatggaagtgcctgtcatggtagtaaatggcaaggatgatatgcatgatgttgaagatgagcttgctaagcgagtgagtaggttaagcacaagtacaaccatagaaaacatcgagattactattaagtctccagagaaaatcgaagaagtcctgtcacctgaaggctccccttcaaaatcgccatccaagaaaaagaagaaattccgcactccttcttttctgaaaaagaacaaaaaaaaggagaaagttgaggcctaaataaagtctttttataattattattataacaatgtgacattgcacatctaaataccacatttaagttgatcattaatatgcaatggtagatcagattgggggatgtagcaaactggactttaagaactggaaagaggttttacaaaagaaaaactttcagattcatctctcattttatatgtccagaaatggctttgaattttaagcaattactagttttaattagctctgccctcatgaagtattattataattcaccataaacagctatctgtctgaattacttcaggccttctccataatatctgttagaaagaaattgccagtgagcaagtgagaatttttatttctcaatacctgcttcacttgataatcatattataattttttatcatgattattgactatatttttggagtcccattgtttcagtgggcattaacagaatgctttaaaaacttctaagacaagaatctatagcattagtatacactggcacataattttttaaaaagttttaagaaaagattcatttggaattttattcacagtataaaatttcctcacctgaagtaactttgtttgccaaaaaagttgttttaataaactataatttttgaaaacttccttttttattagtttagaaagccccttatttttcaacaaaggggattttgtacacataacatgggttatttagtttaactctggc

SEQ ID NO: 1154 - DNA, 807 bp, Homo sapiens
  source 1..807: mol_type = unassigned DNA
gcgctcgggctgccgctggctcttcgcacgcggccatggccgactccgagctgcagctggttgagcagcggatccgcagcttccccgacttccccaccccaggcgtggtattcagggacatctcgcccgtcctgaaggaccccgcctccttccgcgccgccatcggcctcctggcgcgacacctgaaggcgacccacgggggccgcatcgactacatcgcaggcctagactcccgaggcttcctctttggcccctccctggcccaggagcttggactgggctgcgtgctcatccgaaagcgggggaagctgccaggccccactctgtgggcctcctattccctggagtacgggaaggctgagctggagattcagaaagacgccctggagccaggacagagggtggtcgtcgtggatgatctgctggccactggtggaaccatgaacgctgcctgtgagctgctgggccgcctgcaggctgaggtcctggagtgcgtgagcctggtggagctgacctcgcttaagggcagggagaagctggcacctgtacccttcttctctctcctgcagtatgagtgaccacagggcctcccagcccaacatctccagctggatcccagggaaatatcagccttgggcaactgcagtgaccaggggcaccggctgcccacagggaacacattcctttgctggggttcagcgcctctcctggggctggaagtgccaaagcctggggcaaagctgtgtttcagccacactgaacccaattacacacagcgggagaacgcagtaaacagctttcccacaa

SEQ ID NO: 1155 - DNA, 673 bp, Homo sapiens
  source 1..673: mol_type = unassigned DNA
gcgctcgggctgccgctggctcttcgcacgcggccatggccgactccgagctgcagctggttgagcagcggatccgcagcttccccgacttccccaccccaggcgtggtattcagggacatctcgcccgtcctgaaggaccccgcctccttccgcgccgccatcggcctcctggcgcgacacctgaaggcgacccacgggggccgcatcgactacatcgcaggcctagactcccgaggcttcctctttggcccctccctggcccaggagcttggactgggctgcgtgctcatccgaaagcgggggaagctgccaggccccactctgtgggcctcctattccctggagtacgggaaggctgagctggagattcagaaagacgccctggagccaggacagagggtggtcgtcgtggatgatctgctggccactggtgtatgagtgaccacagggcctcccagcccaacatctccagctggatcccagggaaatatcagccttgggcaactgcagtgaccaggggcaccggctgcccacagggaacacattcctttgctggggttcagcgcctctcctggggctggaagtgccaaagcctggggcaaagctgtgtttcagccacactgaacccaattacacacagcgggagaacgcagtaaacagctttcccacaa

SEQ ID NO: 1156 - DNA, 10151 bp, Homo sapiens
  source 1..10151: mol_type = unassigned DNA
gcagcgccgcctgcccaggcccggaccgggctttgtccgccccggagcccctgcccgcgccgcggagaccccggagcccgcgcgctccgaggccaccccgggccgggatttccggtggggcccgcggagccgcgcagagggaggaggccccagacccaggcgccccgccagcccagctgcacgtaagcggacgctgcaggagctgaagatggcgagctccgtggcgccctacgagcagctggtgaggcaggtggaggccttgaaggctgagaacagccacctgaggcaggagctaagggacaactccagccacctgtccaagctggagacagagacgtcgggcatgaaggaggtcctgaagcacctacagggaaaactggagcaggaggcccgagtgctggtgtcctcggggcagacggaggtgctggagcagctgaaggccctacagatggacatcaccagcctgtacaacctcaagttccagccgcccaccctgggcccggagcctgccgcccggacccccgagggcagcccagtacacggctccgggccctccaaggacagctttggggagctgagccgggccaccatccggctgctggaggaactggaccgggaacggtgtttcctgctgaatgagattgagaaggaggagaaggagaagctctggtactactctcagctgcagggcctgtccaagcgcctggacgagctgccgcacgtggagacgcagttctcgatgcagatggacctgatccggcagcagcttgagttcgaggcccagcacatccgctcgctgatggaggagcgcttcggcacctcggacgagatggtgcagcgggcacagatccgcgcctcgcgcctggagcagattgacaaggagctgctggaggcgcaggaccgagtgcagcagacggagccccaggccttgctggcggtgaagtcggtgccggtggacgaggaccccgagacagaggtccccacacaccctgaggatggcacccctcagccgggcaacagcaaggtggaggtggtcttctggctgttgtccatgttggcgacgcgcgaccaggaggatacagcgcgcacgctgctggccatgtccagctcgcccgagagctgcgtggccatgcgccgctcgggctgtctgcctctgctgctgcaaatcctccacggcaccgaggccgcggccgggggtcgcgccggggccccaggggcaccgggcgccaaggacgcacgcatgcgcgccaacgcggcgctgcacaacatcgtcttctcgcagccggaccagggcctggcgcgcaaggagatgcgcgtcctgcacgtgctggagcagatccgggcctactgcgagacctgctgggactggctgcaggcccgagacggcgggcccgagggaggtggcgccggcagcgccccgatccccatcgagccgcagatctgccaggccacctgtgctgttatgaagctgtcctttgatgaggagtaccgccgtgccatgaacgagctaggtgggctgcaggccgtggcagagctgctgcaggttgactatgagatgcacaagatgacccgggacccgctgaacctggcgctgcgccgctacgcgggcatgaccctcaccaacctcacctttggggacgttgccaacaaggccaccctgtgtgcgcgccgcggctgcatggaggccatcgtggcccagctggcctccgacagtgaggagctccaccaggtggtgtccagcatccttcggaacttgtcctggagggccgacatcaacagcaagaaggtgctgagggaggcgggcagcgtgactgccctggtgcagtgtgtcctgcgggccaccaaggagtccaccctgaagagcgtgctgagcgccctgtggaatctgtctgcacacagcacagagaacaaggcggccatctgccaggtggatggcgccctgggcttcctggtgagcaccctgacctacaagtgtcagagcaactcgctggccatcatcgagagcggcggcggcatcctccgcaatgtgtccagcctcgtcgccacccgtgaggactacaggcaggtgctccgggatcacaactgtctgcagacgctgctgcagcatctgacttcgcacagcctgaccatcgtgagcaacgcgtgcggcacgctctggaacctgtcggcccgcagcgcccgtgaccaggagctgctgtgggacctgggcgccgtgggcatgctgcgtaatctggtgcactccaagcacaagatgatcgccatgggcagcgccgccgccctgcgcaacctgctggcccatcggcccgccaagcaccaggcggccgccaccgccgtgtccccaggcagctgcgtgcccagcctgtacgtgcgcaagcagcgggcgctggaggccgagctggacgcacggcacctcgcgcaggcgctggagcacctggagaagcagggcccgccggcagccgaggccgccactaagaagccgctgccgcccctgcgacacctggacggcctggcccaagactatgcttccgattcgggctgctttgacgacgacgatgcaccgtcatccctggctgcggccgcggccaccggggagccagccagccctgccgcgctgtccctcttcctgggcagccccttcctgcaggggcaggcgctggctcgcaccccgcccacccgccgaggcggcaaggaggcagagaaggacaccagtggggaggcagccgtggcggccaaggccaaggccaagctggcgcttgcagtggcgcgcatcgaccagctggtggaggacatctccgccctgcacacctcgtccgacgatagcttcagcctcagctctggagacccgggacaggaggcgccacgggagggccgcgcccagtcctgctcgccatgccgcggcccggagggcgggcggcgagaggcaggaagccgggcgcacccgctgctgcggctcaaggcggcccacgccagcctctccaacgacagcctcaacagcggcagtgccagcgacgggtactgcccacgcgaacatatgctgccctgcccgctggccgcactggcttcgcgccgcgaggaccccaggtgtgggcagcctcggcccagccggcttgaccttgacctgcccggctgccaggccgagcccccggcccgcgaggccacctccgccgacgcccgcgtgcgcaccatcaagctgtcgcctacctatcagcacgtgccactgcttgagggtgcctcaagggcgggtgcagagcccctcgcggggcctggaatctctccaggggcccggaagcaggcctggctgccggcagaccacctgagcaaggttcccgagaagctggcggctgccccgctgtctgtggccagcaaggcactgcagaaactggcggcgcaagaggggccactctcgctgtcccgatgcagctccctttcctcgctgtcctcggccggccgcccaggccccagcgagggtggtgacctggatgacagtgactcctccctggaggggctggaggaggccggccccagcgaggctgagctggacagcacgtggcgggcgcccggggccacctcgctgcccgtagccattccggctccccggcgtaaccgaggccggggcctgggggtggaagacgccacgccgtccagctcgtcggagaactacgtgcaggagacaccgcttgtgctgagccgctgcagctctgtgagctcgctgggcagcttcgagagcccgtccatcgccagctccatccccagtgaaccttgcagcgggcagggcagcggcaccatcagccctagcgagctgcccgacagccccggacagaccatgcctcccagccggagcaagacgccaccgctggcgcccgcgccacagggtccccccgaggccacccagttcagcctgcagtgggagagctacgtgaagcgcttcctggacatcgccgactgccgggagcgctgccggctgccatctgagctggacgcaggcagcgtgcgctttaccgtggagaagccagacgagaacttctcgtgcgcctccagcctcagcgcgctggccttgcacgagcactacgtgcagcaggacgtggagctgcggctgctgccctcggcctgccccgagcgcggcgggggcgccgggggcgccggcctccactttgcagggcaccggcggcgggaggaggggccggcgcccacgggttctcgccctcgcggcgccgcggaccaggagctggaactgctgcgggagtgcctgggagccgccgtgcctgcccggctgcgcaaggtggcctccgcgctggtgccaggtcgccgcgcactccccgtgcccgtctacatgttggtgcccgccccggccccggcccaggaggacgactcctgcactgactccgcggagggcacgccggtcaacttctctagcgccgcctcgctcagcgacgagacgctgcagggaccccccagggaccagcccgggggaccagcgggcaggcaaagacccaccggccgccccacctctgccagacaggccatggggcaccggcacaaggcgggaggcgccggccgcagcgcggagcagtctcggggcgcgggcaagaacagagcagggctggagctgcccctgggccggcccccgagcgcccccgcagacaaggacggctcaaagcccggccggacccgcggggacggggcgctccagtcgctgtgcctcacgacgcccactgaggaggccgtgtactgcttctacggcaacgactcggacgaggagcccccggcggccgcgcccacgccaacccaccggcgcacatcggccatccctcgcgcttttacgcgggagcgtccgcagggccggaaggaggcccctgccccgtccaaggctgcaccagctgccccgccgcccgcccggacccagcccagcctcattgctgacgagaccccgccctgctactccctgagctcctccgccagctccctcagcgagcccgagccctcggagccgccggccgtccatccacgaggccgggagcccgcggtcaccaaggacccgggcccaggaggcggacgcgacagctcgcccagcccgcgggccgcggaggagcttctgcagcggtgcatcagctcggccctgcccaggcgccggccccccgtgtctggcctgcggcgccgcaagccccgagccacccggctggatgagcggcccgcagaggggtcccgggaacgcggcgaggaggcagcgggctcggaccgggcctccgacctggatagcgtggagtggcgcgccatccaggagggcgccaattcaattgtcacgtggctgcaccaggcagcagctgccacgcgggaggcctcgtccgagtccgactccatcctgtccttcgtatccgggctgtcagtgggatccaccctacagccccccaagcacaggaagggacgacaggcggagggagaaatgggcagtgcccggcggccagagaaaaggggcgcagcctcagtcaagaccagcgggagcccccgttcccctgcaggccccgagaagccacgtggcacacagaagaccacgcccggggtgccagctgtgctccggggacgaacagtgatctacgtccccagcccggcaccccgtgcccagcccaaagggacccccggcccccgcgccacaccgcggaaggtggcgcccccttgcctggcacagcccgcggctccagccaaagtcccgagccccgggcagcagcggtcgcggagcctacaccggcctgccaagacctcggagctggcgacgctgagccagccccccagaagcgccacaccgcccgcccgcctcgccaagaccccctcctccagctcctcccagacctcgcccgcctcccagcccctgcccagaaagcgccccccggtcacccaggctgctggggccctgcccggccccggagcctccccggtgcccaaaacgccggcgcgcacccttctggcgaagcagcacaagacgcagagatcgcccgtgcggatcccgttcatgcagaggccggcccggcgtgggccgccaccgctggctcgggcagtcccggagccgggccccaggggccgggcggggaccgaggcgggcccgggggcgcgcgggggccgcctgggcctggtgcgtgtggcctcagccctctccagcggcagcgagtcctccgaccgctcgggcttccggcgacagctaaccttcatcaaggagtcgccgggcttgcggcgccgccgctccgagctgtcctcggccgagtccgcggcctctgccccccagggcgcctcgccccgccgcggccggcccgcgctgcccgccgtcttcctctgctcctcgcgctgcgaagagctccgagcggcaccccggcagggcccggccccggcccggcagcggccccccgcggcccgacccagccctggcgagcgccctgcccggcgcaccacctccgagagcccgtcccgcctgcctgtgcgcgcgcccgccgcccggccggagactgtcaagcgctacgcgtcgctgccgcacatcagcgtggcccgcaggcccgacggcgccgtccccgcggcccctgcctcagccgacgccgcgcgccgcagcagcgacggggagccccggccgctccccagggtggccgcgccgggcacgacctggcggcgcatccgagatgaggacgtgccccacatcctgcgcagcacgcttcccgccacggccctgccactgcggggctccacgcccgaggacgccccggccgggcccccgccgcgcaagaccagcgacgccgtggtccagaccgaggaggtcgccgcccccaagaccaactccagcacgtccccgagcctggagaccagggagccccccggggcccccgccggcggccagctctccctcctcggcagcgacgtggacggtcccagcctcgccaaggctcccatctccgcacccttcgtgcacgagggcctgggggtcgccgtggggggcttccccgccagccggcacggctcccccagccgctcggcccgagtaccccccttcaactatgtgcccagccccatggtggtcgcagccaccaccgactcggccgcggagaaagccccggccactgcctccgccaccctcctggaatagtggcctaggccggccttctggaacgttctctcccggccctgcggcgcggtctggctgccccatgggcctgcgctgtagacgtcccccataggtcgccccagggcctctgcccacccgagccccaccactctcagaacccccgcccagcgcacggcgacctcgcgcctcaccggaagaccttgcctctgtgccgcggaggtccaggaggaaacggggcggccgctaggcctcaagtcccgaccgtggagcgctggcaagggcgtcctggcccagccctgagcgcgcggcccttcccctgtcggaagccgttgcttgaccccgggcgagggaggcggtagcctccgggtccgggtctgggtctgggtccgctgcttcgcagggacagcgctggggaggtgacggcgcccgccgcaggtggggcgaggctgggggagggcggcgccgcggcgggcctgccagctgggggcctttgcggcgcgcaggggcgaagcctgtaatcactgcagccgccggtaattcgctaatgagggctttgcagggattgttttcattctcagccccagctgtgggagtgcgggtgggggtgtggccgagccccggcaggaagccccgcccagacggtgttcagggaacccggagcccaagcgctccggcggagcccaaaagggtgggggtgggaggggcagaggccaacggatccccctgcctgtcgcaccccttggcgggagacgggaaggcagcgggctgcgtacgatgggaccctggtgcagacgccgggccggctgacatttggaccccatcccagaggagatgctggctaccagctggggcgaccccaagggtcgctggagtcagtatcggcccggcgcagccgcggcgggcgaggccaatggaaaggagactgaggggagtcccggcagtgagcccgaggccctgggacctggagcccgcgctggcctctccccagcggagcctgcacgttacggagaccatcacatgtgggcgtggtcagtgcccaggaccgcaccgctgctcatcttgtcccttttcaattcccttctggttcatgatgcataaagcgctaggccctagaactccagaaacagcacagctggggcggggacccagccttgccctccacccgaggctctgggacaaggcgggaggttcgggggccttccggcaggtgaacgcagggctggagagtatttggtgccagatgaggtgaaagcttatagaagggcctgaggggctcggctgcctcatcccctggcgggggaggctgggagctgggcctcctgcgtggggtgggactcgcaggggccgggtctccgtgactggggcaacgcctcgtcctgcagagggagccgacgacctcttttctgcagaaaagctccagcaggcgctgccttcacccacggatctgcccaggctgaaggcacacgctcaatgccccacgtgccttctccaggaggaacgaagcagggtttgagggttgggtggatggagctcagaaggaaaccccagccccaccacggatgacaccatccctcccgtcccatccccagcatgggcaaggccagcctttctggcagaaggagctgtcctcaactcagggccgctgtgagcaaagctgaccccagcccccacccccagttaacactgctgcttctctgaatgcatgtcacgctgcaccccatgctccgggcccacaccctgcaggacaaggagctccagacaggacgtccataagtcaccgaggtgtgccacccagcaggtgctggaggtgcccaatgctccctcctaggacctcgcagccaggcaaggctgtcaggttgttttgggggaagagggggtcatggatggctgagcagagagcggggaaaatgcaggctgagtggggcgacctcctgcctgccaggagccccctttcaggacacagcgggggtctcacacttgctgtccccatccatggcccgagggggaacctggtggtctcttctgagcttttggacttggggatgccaaacacgtgctcaccctcacactcgccccggcccgctgcgcccctaattgccaaagggtagggaaatggcgaagccagccaccaggtcgctggtgacagggccagggttatgcaggaaggtggtgcggcattgccttccacatatgtaagtctctgggcggcgccctcccagctccctgcctctgtttccccatgtgggccgtggggaactcccagagctacctcttgggggagcgtggtggcagcgatgatggggagacgcctggaagctcacagaacttgggtctggctggctcctgcccgtgacgccttgcccagcagcaaggtgcgcaacatggctgccagccccgcctcccacccccaccccgagtcctgagctcactttcgccttctccatcccctgccgtgggggccacagccacacctcaccgcccagtccagctgtctccagaaggggacaggcagtccgcggtctctggacaatcaactcaaggtacgcccactgcaaggcctccctcccaccgcggcccctgcctggccacctggcctctctgcaccagggtgacaaggggtcctcgtctgccccccaatgctccagggccagtcctaaggagctgagggtctgaggacgcagggagggtggaggtgtcctgaggctgatggacagtgaccgccactggcccccaacatgaccacacgtgggtgctgaactcggggcgccgtgcccaccggcatggtcctcccgagctccgacagcattacctcacccggccccatctgttgccccggtccagccctgatggcgcgcgcctggtctgtctgattcccctagccgccaccccacgtttctgtaccgggtctctgcagtgttaaacggacgtgtaaatagtggtaaatagtgaaagcctgtccttccctaaatgtaaagccatctgtccggcgtaaggacgacaccgtcagctgtccgactcgcacacatttaataaactgagctcttgcattgcc

SEQ ID NO: 1157 - DNA, 9329 bp, Homo sapiens
  source 1..9329: mol_type = unassigned DNA
gcagcgccgcctgcccaggcccggaccgggctttgtccgccccggagcccctgcccgcgccgcggagaccccggagcccgcgcgctccgaggccaccccgggccgggatttccggtggggcccgcggagccgcgcagagggaggaggccccagacccaggcgccccgccagcccagctgcacgtaagcggacgctgcaggagctgaagatggcgagctccgtggcgccctacgagcagctggtgaggcaggtggaggccttgaaggctgagaacagccacctgaggcaggagctaagggacaactccagccacctgtccaagctggagacagagacgtcgggcatgaaggaggtcctgaagcacctacagggaaaactggagcaggaggcccgagtgctggtgtcctcggggcagacggaggtgctggagcagctgaaggccctacagatggacatcaccagcctgtacaacctcaagttccagccgcccaccctgggcccggagcctgccgcccggacccccgagggcagcccagtacacggctccgggccctccaaggacagctttggggagctgagccgggccaccatccggctgctggaggaactggaccgggaacggtgtttcctgctgaatgagattgagaaggaggagaaggagaagctctggtactactctcagctgcagggcctgtccaagcgcctggacgagctgccgcacgttgactatgagatgcacaagatgacccgggacccgctgaacctggcgctgcgccgctacgcgggcatgaccctcaccaacctcacctttggggacgttgccaacaaggccaccctgtgtgcgcgccgcggctgcatggaggccatcgtggcccagctggcctccgacagtgaggagctccaccaggtggtgtccagcatccttcggaacttgtcctggagggccgacatcaacagcaagaaggtgctgagggaggcgggcagcgtgactgccctggtgcagtgtgtcctgcgggccaccaaggagtccaccctgaagagcgtgctgagcgccctgtggaatctgtctgcacacagcacagagaacaaggcggccatctgccaggtggatggcgccctgggcttcctggtgagcaccctgacctacaagtgtcagagcaactcgctggccatcatcgagagcggcggcggcatcctccgcaatgtgtccagcctcgtcgccacccgtgaggactacaggcaggtgctccgggatcacaactgtctgcagacgctgctgcagcatctgacttcgcacagcctgaccatcgtgagcaacgcgtgcggcacgctctggaacctgtcggcccgcagcgcccgtgaccaggagctgctgtgggacctgggcgccgtgggcatgctgcgtaatctggtgcactccaagcacaagatgatcgccatgggcagcgccgccgccctgcgcaacctgctggcccatcggcccgccaagcaccaggcggccgccaccgccgtgtccccaggcagctgcgtgcccagcctgtacgtgcgcaagcagcgggcgctggaggccgagctggacgcacggcacctcgcgcaggcgctggagcacctggagaagcagggcccgccggcagccgaggccgccactaagaagccgctgccgcccctgcgacacctggacggcctggcccaagactatgcttccgattcgggctgctttgacgacgacgatgcaccgtcatccctggctgcggccgcggccaccggggagccagccagccctgccgcgctgtccctcttcctgggcagccccttcctgcaggggcaggcgctggctcgcaccccgcccacccgccgaggcggcaaggaggcagagaaggacaccagtggggaggcagccgtggcggccaaggccaaggccaagctggcgcttgcagtggcgcgcatcgaccagctggtggaggacatctccgccctgcacacctcgtccgacgatagcttcagcctcagctctggagacccgggacaggaggcgccacgggagggccgcgcccagtcctgctcgccatgccgcggcccggagggcgggcggcgagaggcaggaagccgggcgcacccgctgctgcggctcaaggcggcccacgccagcctctccaacgacagcctcaacagcggcagtgccagcgacgggtactgcccacgcgaacatatgctgccctgcccgctggccgcactggcttcgcgccgcgaggaccccaggtgtgggcagcctcggcccagccggcttgaccttgacctgcccggctgccaggccgagcccccggcccgcgaggccacctccgccgacgcccgcgtgcgcaccatcaagctgtcgcctacctatcagcacgtgccactgcttgagggtgcctcaagggcgggtgcagagcccctcgcggggcctggaatctctccaggggcccggaagcaggcctggctgccggcagaccacctgagcaaggttcccgagaagctggcggctgccccgctgtctgtggccagcaaggcactgcagaaactggcggcgcaagaggggccactctcgctgtcccgatgcagctccctttcctcgctgtcctcggccggccgcccaggccccagcgagggtggtgacctggatgacagtgactcctccctggaggggctggaggaggccggccccagcgaggctgagctggacagcacgtggcgggcgcccggggccacctcgctgcccgtagccattccggctccccggcgtaaccgaggccggggcctgggggtggaagacgccacgccgtccagctcgtcggagaactacgtgcaggagacaccgcttgtgctgagccgctgcagctctgtgagctcgctgggcagcttcgagagcccgtccatcgccagctccatccccagtgaaccttgcagcgggcagggcagcggcaccatcagccctagcgagctgcccgacagccccggacagaccatgcctcccagccggagcaagacgccaccgctggcgcccgcgccacagggtccccccgaggccacccagttcagcctgcagtgggagagctacgtgaagcgcttcctggacatcgccgactgccgggagcgctgccggctgccatctgagctggacgcaggcagcgtgcgctttaccgtggagaagccagacgagaacttctcgtgcgcctccagcctcagcgcgctggccttgcacgagcactacgtgcagcaggacgtggagctgcggctgctgccctcggcctgccccgagcgcggcgggggcgccgggggcgccggcctccactttgcagggcaccggcggcgggaggaggggccggcgcccacgggttctcgccctcgcggcgccgcggaccaggagctggaactgctgcgggagtgcctgggagccgccgtgcctgcccggctgcgcaaggtggcctccgcgctggtgccaggtcgccgcgcactccccgtgcccgtctacatgttggtgcccgccccggccccggcccaggaggacgactcctgcactgactccgcggagggcacgccggtcaacttctctagcgccgcctcgctcagcgacgagacgctgcagggaccccccagggaccagcccgggggaccagcgggcaggcaaagacccaccggccgccccacctctgccagacaggccatggggcaccggcacaaggcgggaggcgccggccgcagcgcggagcagtctcggggcgcgggcaagaacagagcagggctggagctgcccctgggccggcccccgagcgcccccgcagacaaggacggctcaaagcccggccggacccgcggggacggggcgctccagtcgctgtgcctcacgacgcccactgaggaggccgtgtactgcttctacggcaacgactcggacgaggagcccccggcggccgcgcccacgccaacccaccggcgcacatcggccatccctcgcgcttttacgcgggagcgtccgcagggccggaaggaggcccctgccccgtccaaggctgcaccagctgccccgccgcccgcccggacccagcccagcctcattgctgacgagaccccgccctgctactccctgagctcctccgccagctccctcagcgagcccgagccctcggagccgccggccgtccatccacgaggccgggagcccgcggtcaccaaggacccgggcccaggaggcggacgcgacagctcgcccagcccgcgggccgcggaggagcttctgcagcggtgcatcagctcggccctgcccaggcgccggccccccgtgtctggcctgcggcgccgcaagccccgagccacccggctggatgagcggcccgcagaggggtcccgggaacgcggcgaggaggcagcgggctcggaccgggcctccgacctggatagcgtggagtggcgcgccatccaggagggcgccaattcaattgtcacgtggctgcaccaggcagcagctgccacgcgggaggcctcgtccgagtccgactccatcctgtccttcgtatccgggctgtcagtgggatccaccctacagccccccaagcacaggaagggacgacaggcggagggagaaatgggcagtgcccggcggccagagaaaaggggcgcagcctcagtcaagaccagcgggagcccccgttcccctgcaggccccgagaagccacgtggcacacagaagaccacgcccggggtgccagctgtgctccggggacgaacagtgatctacgtccccagcccggcaccccgtgcccagcccaaagggacccccggcccccgcgccacaccgcggaaggtggcgcccccttgcctggcacagcccgcggctccagccaaagtcccgagccccgggcagcagcggtcgcggagcctacaccggcctgccaagacctcggagctggcgacgctgagccagccccccagaagcgccacaccgcccgcccgcctcgccaagaccccctcctccagctcctcccagacctcgcccgcctcccagcccctgcccagaaagcgccccccggtcacccaggctgctggggccctgcccggccccggagcctccccggtgcccaaaacgccggcgcgcacccttctggcgaagcagcacaagacgcagagatcgcccgtgcggatcccgttcatgcagaggccggcccggcgtgggccgccaccgctggctcgggcagtcccggagccgggccccaggggccgggcggggaccgaggcgggcccgggggcgcgcgggggccgcctgggcctggtgcgtgtggcctcagccctctccagcggcagcgagtcctccgaccgctcgggcttccggcgacagctaaccttcatcaaggagtcgccgggcttgcggcgccgccgctccgagctgtcctcggccgagtccgcggcctctgccccccagggcgcctcgccccgccgcggccggcccgcgctgcccgccgtcttcctctgctcctcgcgctgcgaagagctccgagcggcaccccggcagggcccggccccggcccggcagcggccccccgcggcccgacccagccctggcgagcgccctgcccggcgcaccacctccgagagcccgtcccgcctgcctgtgcgcgcgcccgccgcccggccggagactgtcaagcgctacgcgtcgctgccgcacatcagcgtggcccgcaggcccgacggcgccgtccccgcggcccctgcctcagccgacgccgcgcgccgcagcagcgacggggagccccggccgctccccagggtggccgcgccgggcacgacctggcggcgcatccgagatgaggacgtgccccacatcctgcgcagcacgcttcccgccacggccctgccactgcggggctccacgcccgaggacgccccggccgggcccccgccgcgcaagaccagcgacgccgtggtccagaccgaggaggtcgccgcccccaagaccaactccagcacgtccccgagcctggagaccagggagccccccggggcccccgccggcggccagctctccctcctcggcagcgacgtggacggtcccagcctcgccaaggctcccatctccgcacccttcgtgcacgagggcctgggggtcgccgtggggggcttccccgccagccggcacggctcccccagccgctcggcccgagtaccccccttcaactatgtgcccagccccatggtggtcgcagccaccaccgactcggccgcggagaaagccccggccactgcctccgccaccctcctggaatagtggcctaggccggccttctggaacgttctctcccggccctgcggcgcggtctggctgccccatgggcctgcgctgtagacgtcccccataggtcgccccagggcctctgcccacccgagccccaccactctcagaacccccgcccagcgcacggcgacctcgcgcctcaccggaagaccttgcctctgtgccgcggaggtccaggaggaaacggggcggccgctaggcctcaagtcccgaccgtggagcgctggcaagggcgtcctggcccagccctgagcgcgcggcccttcccctgtcggaagccgttgcttgaccccgggcgagggaggcggtagcctccgggtccgggtctgggtctgggtccgctgcttcgcagggacagcgctggggaggtgacggcgcccgccgcaggtggggcgaggctgggggagggcggcgccgcggcgggcctgccagctgggggcctttgcggcgcgcaggggcgaagcctgtaatcactgcagccgccggtaattcgctaatgagggctttgcagggattgttttcattctcagccccagctgtgggagtgcgggtgggggtgtggccgagccccggcaggaagccccgcccagacggtgttcagggaacccggagcccaagcgctccggcggagcccaaaagggtgggggtgggaggggcagaggccaacggatccccctgcctgtcgcaccccttggcgggagacgggaaggcagcgggctgcgtacgatgggaccctggtgcagacgccgggccggctgacatttggaccccatcccagaggagatgctggctaccagctggggcgaccccaagggtcgctggagtcagtatcggcccggcgcagccgcggcgggcgaggccaatggaaaggagactgaggggagtcccggcagtgagcccgaggccctgggacctggagcccgcgctggcctctccccagcggagcctgcacgttacggagaccatcacatgtgggcgtggtcagtgcccaggaccgcaccgctgctcatcttgtcccttttcaattcccttctggttcatgatgcataaagcgctaggccctagaactccagaaacagcacagctggggcggggacccagccttgccctccacccgaggctctgggacaaggcgggaggttcgggggccttccggcaggtgaacgcagggctggagagtatttggtgccagatgaggtgaaagcttatagaagggcctgaggggctcggctgcctcatcccctggcgggggaggctgggagctgggcctcctgcgtggggtgggactcgcaggggccgggtctccgtgactggggcaacgcctcgtcctgcagagggagccgacgacctcttttctgcagaaaagctccagcaggcgctgccttcacccacggatctgcccaggctgaaggcacacgctcaatgccccacgtgccttctccaggaggaacgaagcagggtttgagggttgggtggatggagctcagaaggaaaccccagccccaccacggatgacaccatccctcccgtcccatccccagcatgggcaaggccagcctttctggcagaaggagctgtcctcaactcagggccgctgtgagcaaagctgaccccagcccccacccccagttaacactgctgcttctctgaatgcatgtcacgctgcaccccatgctccgggcccacaccctgcaggacaaggagctccagacaggacgtccataagtcaccgaggtgtgccacccagcaggtgctggaggtgcccaatgctccctcctaggacctcgcagccaggcaaggctgtcaggttgttttgggggaagagggggtcatggatggctgagcagagagcggggaaaatgcaggctgagtggggcgacctcctgcctgccaggagccccctttcaggacacagcgggggtctcacacttgctgtccccatccatggcccgagggggaacctggtggtctcttctgagcttttggacttggggatgccaaacacgtgctcaccctcacactcgccccggcccgctgcgcccctaattgccaaagggtagggaaatggcgaagccagccaccaggtcgctggtgacagggccagggttatgcaggaaggtggtgcggcattgccttccacatatgtaagtctctgggcggcgccctcccagctccctgcctctgtttccccatgtgggccgtggggaactcccagagctacctcttgggggagcgtggtggcagcgatgatggggagacgcctggaagctcacagaacttgggtctggctggctcctgcccgtgacgccttgcccagcagcaaggtgcgcaacatggctgccagccccgcctcccacccccaccccgagtcctgagctcactttcgccttctccatcccctgccgtgggggccacagccacacctcaccgcccagtccagctgtctccagaaggggacaggcagtccgcggtctctggacaatcaactcaaggtacgcccactgcaaggcctccctcccaccgcggcccctgcctggccacctggcctctctgcaccagggtgacaaggggtcctcgtctgccccccaatgctccagggccagtcctaaggagctgagggtctgaggacgcagggagggtggaggtgtcctgaggctgatggacagtgaccgccactggcccccaacatgaccacacgtgggtgctgaactcggggcgccgtgcccaccggcatggtcctcccgagctccgacagcattacctcacccggccccatctgttgccccggtccagccctgatggcgcgcgcctggtctgtctgattcccctagccgccaccccacgtttctgtaccgggtctctgcagtgttaaacggacgtgtaaatagtggtaaatagtgaaagcctgtccttccctaaatgtaaagccatctgtccggcgtaaggacgacaccgtcagctgtccgactcgcacacatttaataaactgagctcttgcattgcc

SEQ ID NO: 1158 - DNA, 11650 bp, Homo sapiens
  source 1..11650: mol_type = unassigned DNA
gggtttggggagcaggaggcagacatgtgttgctttgcacgtcatctggtccttccacctggctgggcatgggatggtgacctcagctggaacatggggctcgagccagaccccagggtctccctgcgtgtagcccccaaccccaagcctgatccccactggagacctgaacagccttggacatcatcggatcagggtgggaggtgccagcctctgccacctgacttccagtccctgtgcccctcccaccctgcccttgggcactcctgccctgcaggttcctcagaggggcaacccaaagccagagaggggcgggtcttgtcgggcctccagcctggacttcccagcccctctggggcagcatctgggtgccagacctcggttcctagggcctcgtttctccctctgggaacagccaaatggtggtccctgagactcaggacagaccaagaaggagccggatgacatggcaagccacacactgcgtcccctgagcaggacgggacagcccgactccatcctcccacctgcgactgagcccccacccctactcctgtcccagccgtgcccctggtgacatttgggtgggaggggaggggatgagggggcacctgggggtcagagaacaaatgacgggtgaatacatgtgtgtggccaggtggaggagggaggggaggagcaggtgggctggacagggccggtgtgaggaaggggctcaggctggcagggggaggtggcagagggatgggctgccattggtgcgtctgagacaaaggcggagggaggaggcgagcgctgatgggaaaggaacaaagagggaaggggggcgtgaaggggggctccggcgggagggccgagccgagggaggaggcgccggccagctggacagagggaggaggccaggccagagccagaagacggccagaggcacaaagaagccagcgcgctggcagagtcaagggatggggcaggggctgccggggccagcagggaccagctgaaggctgcgcagggggtgcgggccacacaggtagccaccctgagctcagccaccgatggagggtcgtggggctgctgcggtgatggcggtgggcttgggtccatctgtcctgccgtttctgcacagcttaggtgtcacccactggccttcgtggtgttttcattgtccatcggcagggacagctggtggtctgtccgccccgcgtgtctggctgtcagcctctgggcaggcttgcttttatgggggagggtcctgtctgtctgtctgtcgccctctctggctgtgagcctgggggtgctgggctggccagtcggcttgctgggttaggctgtcccagctgtctgtgtgtttgtccggctgtcaggatgtgtcctgggggctgggaaggagaggccgacccatcgtctgtcggtcgactggtcagttggacgttcagctgtctgtacgtctgtctgctggcccctctgtctccccttggggccacctctcactccacctgcccctctgcgccccggattgcctggccaccaccacgtgggcctgtacttgtccacaccagtgactcctgcctgagaccccccccaacccaggatcaggcaggacggctggggcttaggtcaggggccgtctgtccggaaggcatcaccgcgccctccccagaccatcagctgaaccctctgaccctgtgatcccagacgctgcaggagctgaagatggcgagctccgtggcgccctacgagcagctggtgaggcaggtggaggccttgaaggctgagaacagccacctgaggcaggagctaagggacaactccagccacctgtccaagctggagacagagacgtcgggcatgaaggaggtcctgaagcacctacagggaaaactggagcaggaggcccgagtgctggtgtcctcggggcagacggaggtgctggagcagctgaaggccctacagatggacatcaccagcctgtacaacctcaagttccagccgcccaccctgggcccggagcctgccgcccggacccccgagggcagcccagtacacggctccgggccctccaaggacagctttggggagctgagccgggccaccatccggctgctggaggaactggaccgggaacggtgtttcctgctgaatgagattgagaaggaggagaaggagaagctctggtactactctcagctgcagggcctgtccaagcgcctggacgagctgccgcacgtggagacgcagttctcgatgcagatggacctgatccggcagcagcttgagttcgaggcccagcacatccgctcgctgatggaggagcgcttcggcacctcggacgagatggtgcagcgggcacagatccgcgcctcgcgcctggagcagattgacaaggagctgctggaggcgcaggaccgagtgcagcagacggagccccaggccttgctggcggtgaagtcggtgccggtggacgaggaccccgagacagaggtccccacacaccctgaggatggcacccctcagccgggcaacagcaaggtggaggtggtcttctggctgttgtccatgttggcgacgcgcgaccaggaggatacagcgcgcacgctgctggccatgtccagctcgcccgagagctgcgtggccatgcgccgctcgggctgtctgcctctgctgctgcaaatcctccacggcaccgaggccgcggccgggggtcgcgccggggccccaggggcaccgggcgccaaggacgcacgcatgcgcgccaacgcggcgctgcacaacatcgtcttctcgcagccggaccagggcctggcgcgcaaggagatgcgcgtcctgcacgtgctggagcagatccgggcctactgcgagacctgctgggactggctgcaggcccgagacggcgggcccgagggaggtggcgccggcagcgccccgatccccatcgagccgcagatctgccaggccacctgtgctgttatgaagctgtcctttgatgaggagtaccgccgtgccatgaacgagctaggtgggctgcaggccgtggcagagctgctgcaggttgactatgagatgcacaagatgacccgggacccgctgaacctggcgctgcgccgctacgcgggcatgaccctcaccaacctcacctttggggacgttgccaacaaggccaccctgtgtgcgcgccgcggctgcatggaggccatcgtggcccagctggcctccgacagtgaggagctccaccaggtggtgtccagcatccttcggaacttgtcctggagggccgacatcaacagcaagaaggtgctgagggaggcgggcagcgtgactgccctggtgcagtgtgtcctgcgggccaccaaggagtccaccctgaagagcgtgctgagcgccctgtggaatctgtctgcacacagcacagagaacaaggcggccatctgccaggtggatggcgccctgggcttcctggtgagcaccctgacctacaagtgtcagagcaactcgctggccatcatcgagagcggcggcggcatcctccgcaatgtgtccagcctcgtcgccacccgtgaggactacaggcaggtgctccgggatcacaactgtctgcagacgctgctgcagcatctgacttcgcacagcctgaccatcgtgagcaacgcgtgcggcacgctctggaacctgtcggcccgcagcgcccgtgaccaggagctgctgtgggacctgggcgccgtgggcatgctgcgtaatctggtgcactccaagcacaagatgatcgccatgggcagcgccgccgccctgcgcaacctgctggcccatcggcccgccaagcaccaggcggccgccaccgccgtgtccccaggcagctgcgtgcccagcctgtacgtgcgcaagcagcgggcgctggaggccgagctggacgcacggcacctcgcgcaggcgctggagcacctggagaagcagggcccgccggcagccgaggccgccactaagaagccgctgccgcccctgcgacacctggacggcctggcccaagactatgcttccgattcgggctgctttgacgacgacgatgcaccgtcatccctggctgcggccgcggccaccggggagccagccagccctgccgcgctgtccctcttcctgggcagccccttcctgcaggggcaggcgctggctcgcaccccgcccacccgccgaggcggcaaggaggcagagaaggacaccagtggggaggcagccgtggcggccaaggccaaggccaagctggcgcttgcagtggcgcgcatcgaccagctggtggaggacatctccgccctgcacacctcgtccgacgatagcttcagcctcagctctggagacccgggacaggaggcgccacgggagggccgcgcccagtcctgctcgccatgccgcggcccggagggcgggcggcgagaggcaggaagccgggcgcacccgctgctgcggctcaaggcggcccacgccagcctctccaacgacagcctcaacagcggcagtgccagcgacgggtactgcccacgcgaacatatgctgccctgcccgctggccgcactggcttcgcgccgcgaggaccccaggtgtgggcagcctcggcccagccggcttgaccttgacctgcccggctgccaggccgagcccccggcccgcgaggccacctccgccgacgcccgcgtgcgcaccatcaagctgtcgcctacctatcagcacgtgccactgcttgagggtgcctcaagggcgggtgcagagcccctcgcggggcctggaatctctccaggggcccggaagcaggcctggctgccggcagaccacctgagcaaggttcccgagaagctggcggctgccccgctgtctgtggccagcaaggcactgcagaaactggcggcgcaagaggggccactctcgctgtcccgatgcagctccctttcctcgctgtcctcggccggccgcccaggccccagcgagggtggtgacctggatgacagtgactcctccctggaggggctggaggaggccggccccagcgaggctgagctggacagcacgtggcgggcgcccggggccacctcgctgcccgtagccattccggctccccggcgtaaccgaggccggggcctgggggtggaagacgccacgccgtccagctcgtcggagaactacgtgcaggagacaccgcttgtgctgagccgctgcagctctgtgagctcgctgggcagcttcgagagcccgtccatcgccagctccatccccagtgaaccttgcagcgggcagggcagcggcaccatcagccctagcgagctgcccgacagccccggacagaccatgcctcccagccggagcaagacgccaccgctggcgcccgcgccacagggtccccccgaggccacccagttcagcctgcagtgggagagctacgtgaagcgcttcctggacatcgccgactgccgggagcgctgccggctgccatctgagctggacgcaggcagcgtgcgctttaccgtggagaagccagacgagaacttctcgtgcgcctccagcctcagcgcgctggccttgcacgagcactacgtgcagcaggacgtggagctgcggctgctgccctcggcctgccccgagcgcggcgggggcgccgggggcgccggcctccactttgcagggcaccggcggcgggaggaggggccggcgcccacgggttctcgccctcgcggcgccgcggaccaggagctggaactgctgcgggagtgcctgggagccgccgtgcctgcccggctgcgcaaggtggcctccgcgctggtgccaggtcgccgcgcactccccgtgcccgtctacatgttggtgcccgccccggccccggcccaggaggacgactcctgcactgactccgcggagggcacgccggtcaacttctctagcgccgcctcgctcagcgacgagacgctgcagggaccccccagggaccagcccgggggaccagcgggcaggcaaagacccaccggccgccccacctctgccagacaggccatggggcaccggcacaaggcgggaggcgccggccgcagcgcggagcagtctcggggcgcgggcaagaacagagcagggctggagctgcccctgggccggcccccgagcgcccccgcagacaaggacggctcaaagcccggccggacccgcggggacggggcgctccagtcgctgtgcctcacgacgcccactgaggaggccgtgtactgcttctacggcaacgactcggacgaggagcccccggcggccgcgcccacgccaacccaccggcgcacatcggccatccctcgcgcttttacgcgggagcgtccgcagggccggaaggaggcccctgccccgtccaaggctgcaccagctgccccgccgcccgcccggacccagcccagcctcattgctgacgagaccccgccctgctactccctgagctcctccgccagctccctcagcgagcccgagccctcggagccgccggccgtccatccacgaggccgggagcccgcggtcaccaaggacccgggcccaggaggcggacgcgacagctcgcccagcccgcgggccgcggaggagcttctgcagcggtgcatcagctcggccctgcccaggcgccggccccccgtgtctggcctgcggcgccgcaagccccgagccacccggctggatgagcggcccgcagaggggtcccgggaacgcggcgaggaggcagcgggctcggaccgggcctccgacctggatagcgtggagtggcgcgccatccaggagggcgccaattcaattgtcacgtggctgcaccaggcagcagctgccacgcgggaggcctcgtccgagtccgactccatcctgtccttcgtatccgggctgtcagtgggatccaccctacagccccccaagcacaggaagggacgacaggcggagggagaaatgggcagtgcccggcggccagagaaaaggggcgcagcctcagtcaagaccagcgggagcccccgttcccctgcaggccccgagaagccacgtggcacacagaagaccacgcccggggtgccagctgtgctccggggacgaacagtgatctacgtccccagcccggcaccccgtgcccagcccaaagggacccccggcccccgcgccacaccgcggaaggtggcgcccccttgcctggcacagcccgcggctccagccaaagtcccgagccccgggcagcagcggtcgcggagcctacaccggcctgccaagacctcggagctggcgacgctgagccagccccccagaagcgccacaccgcccgcccgcctcgccaagaccccctcctccagctcctcccagacctcgcccgcctcccagcccctgcccagaaagcgccccccggtcacccaggctgctggggccctgcccggccccggagcctccccggtgcccaaaacgccggcgcgcacccttctggcgaagcagcacaagacgcagagatcgcccgtgcggatcccgttcatgcagaggccggcccggcgtgggccgccaccgctggctcgggcagtcccggagccgggccccaggggccgggcggggaccgaggcgggcccgggggcgcgcgggggccgcctgggcctggtgcgtgtggcctcagccctctccagcggcagcgagtcctccgaccgctcgggcttccggcgacagctaaccttcatcaaggagtcgccgggcttgcggcgccgccgctccgagctgtcctcggccgagtccgcggcctctgccccccagggcgcctcgccccgccgcggccggcccgcgctgcccgccgtcttcctctgctcctcgcgctgcgaagagctccgagcggcaccccggcagggcccggccccggcccggcagcggccccccgcggcccgacccagccctggcgagcgccctgcccggcgcaccacctccgagagcccgtcccgcctgcctgtgcgcgcgcccgccgcccggccggagactgtcaagcgctacgcgtcgctgccgcacatcagcgtggcccgcaggcccgacggcgccgtccccgcggcccctgcctcagccgacgccgcgcgccgcagcagcgacggggagccccggccgctccccagggtggccgcgccgggcacgacctggcggcgcatccgagatgaggacgtgccccacatcctgcgcagcacgcttcccgccacggccctgccactgcggggctccacgcccgaggacgccccggccgggcccccgccgcgcaagaccagcgacgccgtggtccagaccgaggaggtcgccgcccccaagaccaactccagcacgtccccgagcctggagaccagggagccccccggggcccccgccggcggccagctctccctcctcggcagcgacgtggacggtcccagcctcgccaaggctcccatctccgcacccttcgtgcacgagggcctgggggtcgccgtggggggcttccccgccagccggcacggctcccccagccgctcggcccgagtaccccccttcaactatgtgcccagccccatggtggtcgcagccaccaccgactcggccgcggagaaagccccggccactgcctccgccaccctcctggaatagtggcctaggccggccttctggaacgttctctcccggccctgcggcgcggtctggctgccccatgggcctgcgctgtagacgtcccccataggtcgccccagggcctctgcccacccgagccccaccactctcagaacccccgcccagcgcacggcgacctcgcgcctcaccggaagaccttgcctctgtgccgcggaggtccaggaggaaacggggcggccgctaggcctcaagtcccgaccgtggagcgctggcaagggcgtcctggcccagccctgagcgcgcggcccttcccctgtcggaagccgttgcttgaccccgggcgagggaggcggtagcctccgggtccgggtctgggtctgggtccgctgcttcgcagggacagcgctggggaggtgacggcgcccgccgcaggtggggcgaggctgggggagggcggcgccgcggcgggcctgccagctgggggcctttgcggcgcgcaggggcgaagcctgtaatcactgcagccgccggtaattcgctaatgagggctttgcagggattgttttcattctcagccccagctgtgggagtgcgggtgggggtgtggccgagccccggcaggaagccccgcccagacggtgttcagggaacccggagcccaagcgctccggcggagcccaaaagggtgggggtgggaggggcagaggccaacggatccccctgcctgtcgcaccccttggcgggagacgggaaggcagcgggctgcgtacgatgggaccctggtgcagacgccgggccggctgacatttggaccccatcccagaggagatgctggctaccagctggggcgaccccaagggtcgctggagtcagtatcggcccggcgcagccgcggcgggcgaggccaatggaaaggagactgaggggagtcccggcagtgagcccgaggccctgggacctggagcccgcgctggcctctccccagcggagcctgcacgttacggagaccatcacatgtgggcgtggtcagtgcccaggaccgcaccgctgctcatcttgtcccttttcaattcccttctggttcatgatgcataaagcgctaggccctagaactccagaaacagcacagctggggcggggacccagccttgccctccacccgaggctctgggacaaggcgggaggttcgggggccttccggcaggtgaacgcagggctggagagtatttggtgccagatgaggtgaaagcttatagaagggcctgaggggctcggctgcctcatcccctggcgggggaggctgggagctgggcctcctgcgtggggtgggactcgcaggggccgggtctccgtgactggggcaacgcctcgtcctgcagagggagccgacgacctcttttctgcagaaaagctccagcaggcgctgccttcacccacggatctgcccaggctgaaggcacacgctcaatgccccacgtgccttctccaggaggaacgaagcagggtttgagggttgggtggatggagctcagaaggaaaccccagccccaccacggatgacaccatccctcccgtcccatccccagcatgggcaaggccagcctttctggcagaaggagctgtcctcaactcagggccgctgtgagcaaagctgaccccagcccccacccccagttaacactgctgcttctctgaatgcatgtcacgctgcaccccatgctccgggcccacaccctgcaggacaaggagctccagacaggacgtccataagtcaccgaggtgtgccacccagcaggtgctggaggtgcccaatgctccctcctaggacctcgcagccaggcaaggctgtcaggttgttttgggggaagagggggtcatggatggctgagcagagagcggggaaaatgcaggctgagtggggcgacctcctgcctgccaggagccccctttcaggacacagcgggggtctcacacttgctgtccccatccatggcccgagggggaacctggtggtctcttctgagcttttggacttggggatgccaaacacgtgctcaccctcacactcgccccggcccgctgcgcccctaattgccaaagggtagggaaatggcgaagccagccaccaggtcgctggtgacagggccagggttatgcaggaaggtggtgcggcattgccttccacatatgtaagtctctgggcggcgccctcccagctccctgcctctgtttccccatgtgggccgtggggaactcccagagctacctcttgggggagcgtggtggcagcgatgatggggagacgcctggaagctcacagaacttgggtctggctggctcctgcccgtgacgccttgcccagcagcaaggtgcgcaacatggctgccagccccgcctcccacccccaccccgagtcctgagctcactttcgccttctccatcccctgccgtgggggccacagccacacctcaccgcccagtccagctgtctccagaaggggacaggcagtccgcggtctctggacaatcaactcaaggtacgcccactgcaaggcctccctcccaccgcggcccctgcctggccacctggcctctctgcaccagggtgacaaggggtcctcgtctgccccccaatgctccagggccagtcctaaggagctgagggtctgaggacgcagggagggtggaggtgtcctgaggctgatggacagtgaccgccactggcccccaacatgaccacacgtgggtgctgaactcggggcgccgtgcccaccggcatggtcctcccgagctccgacagcattacctcacccggccccatctgttgccccggtccagccctgatggcgcgcgcctggtctgtctgattcccctagccgccaccccacgtttctgtaccgggtctctgcagtgttaaacggacgtgtaaatagtggtaaatagtgaaagcctgtccttccctaaatgtaaagccatctgtccggcgtaaggacgacaccgtcagctgtccgactcgcacacatttaataaactgagctcttgc

SEQ ID NO: 1159 - DNA, 2562 bp, Homo sapiens
  source 1..2562: mol_type = unassigned DNA
gaaatatgaagagacgctgcagctgcggtggcggtggcggccactgcagctcagagcggcgcacgcggcggccggggcgggacgcggggccgggcgcggagaagtcggggcgggcggcagagaggccgggacgcggaccgggccggggcgcccacagccgcccgacggcgcccagagagcgcgcgccccgcagccccgcgcctagcccgccgggcatggggcgcgcggcagccgcctgaagccccggcctggcccggccgcacccggccggaggcggagggcagagcgcgcgcccagttgcccgggcaccaaatcggagcgcggcgtgcgggaggccccagagcaggactggaaatgtcctggccgcgccgcctcctgctcagatacctgttcccggccctcctgcttcacgggctgggagagggttctgccctccttcatccagacagcaggtctcatcctaggtccttagagaaaagtgcctggagggcttttaaggagtcacagtgccatcacatgctcaaacatctccacaatggtgcaaggatcacagtgcagatgccacctacaatcgagggccactgggtctccacaggctgtgaagtaaggtcaggcccagagttcatcacaaggtcctacagattctaccacaataacaccttcaaggcctaccaattttattatggcagcaaccggtgcacaaatcccacttatactctcatcatccggggcaagatccgcctccgccaggcctcctggatcatccgagggggcacggaagccgactaccagctgcacaacgtccaggtgatctgccacacagaggcggtggccgagaagctcggccagcaggtgaaccgcacatgcccgggcttcctcgcagacgggggtccctgggtgcaggacgtggcctatgacctctggcgagaggagaacggctgtgagtgcaccaaggccgtgaactttgccatgcatgaacttcagctcatccgggtggagaagcagtaccttcaccacaacctcgaccacctggtcgaggagctcttccttggtgacattcacactgatgccacccagaggatgttctaccggccctccagttaccagccccctctgcagaatgccaagaaccacgaccatgcctgcatcgcctgtcggatcatctatcggtcagacgagcaccaccctcccatcctgcccccaaaggcagacctgaccatcggcctgcacggggagtgggtgagccagcgctgtgaggtgcgccccgaagtcctcttcctcacccgccacttcatcttccatgacaacaacaacacctgggagggccactactaccactactcagacccggtgtgcaagcaccccaccttctccatctacgcccggggccgctacagccgcggcgtcctctcgtccagggtcatgggaggcaccgagttcgtgttcaaagtgaatcacatgaaggtcacccccatggatgcggccacagcctcactgctcaacgtcttcaacgggaatgagtgcggggccgagggctcctggcaggtgggcatccagcaggatgtgacccacaccaatggctgcgtggccctgggcatcaaactacctcacacggagtacgagatcttcaaaatggaacaggatgcccgggggcgctatctgctgttcaacggtcagaggcccagcgacgggtccagcccagacaggccagagaagagagccacgtcctaccagatgcccttggtccagtgtgcctcctcttcgccgagggcagaggacctcgcagaagacagtggaagcagcctgtatggccgggcccctgggaggcacacctggtccctgctgctggctgcacttgcctgccttgtccctctgctgcattggaacatccgcagatagaagttttagaaagttctatttttccaaaccaggattccttactattgacagatttgctttaccaaaagaaaagacatttattcttttgatgcacttgaatgccagagaactgtccttctttttctcctctccctccctcccagcccctgagtcatgaacagcaaggagtgtttgaagtttctgctttgaactccgtccagcctgatccctggcctgagcaacttcacaacagtaattgcactttaagacagcctagagttctggacgagcgtgtttggtagcagggatgaaagctagggcctcttatttttttctcttaattattattatatttctgagttaaacttagaagaaacaactatcaagctacaacttttcctgccattttcctgtggttgcagcctgtcttcctttgaaattgttttactctctgagttttatatgctggaatccaatgcagagttggtttgggactgtgatcaagacaccttttattaataaagaagagacacaggtgtagatatgtatatacaaaaagatgtacggtctggccaaaccaccttcccagcctttatgcaaaaaaaggggagaatcaaagctttcatttcagaaatgttgcgtggaaaagtatctgtaattaaagtttcgaagtaatttaaccta

SEQ ID NO: 1160 - DNA, 2360 bp, Homo sapiens
  source 1..2360: mol_type = unassigned DNA
atgaagagacgctgcagctgcggtggcggtggcggccactgcagctcagagcggcgccgcacccggccggaggcggagggcagagcgcgcgcccagttgcccgggcaccaaatcggagcgcggcgtgcgggaggccccagagcaggactggaaatgtcctggccgcgccgcctcctgctcagatacctgttcccggccctcctgcttcacgggctgggagagggttctgccctccttcatccagacagcaggtctcatcctaggtccttagagaaaagtgcctggagggcttttaaggagtcacagtgccatcacatgctcaaacatctccacaatggtgcaaggatcacagtgcagatgccacctacaatcgagggccactgggtctccacaggctgtgaagtaaggtcaggcccagagttcatcacaaggtcctacagattctaccacaataacaccttcaaggcctaccaattttattatggcagcaaccggtgcacaaatcccacttatactctcatcatccggggcaagatccgcctccgccaggcctcctggatcatccgagggggcacggaagccgactaccagctgcacaacgtccaggtgatctgccacacagaggcggtggccgagaagctcggccagcaggtgaaccgcacatgcccgggcttcctcgcagacgggggtccctgggtgcaggacgtggcctatgacctctggcgagaggagaacggctgtgagtgcaccaaggccgtgaactttgccatgcatgaacttcagctcatccgggtggagaagcagtaccttcaccacaacctcgaccacctggtcgaggagctcttccttggtgacattcacactgatgccacccagaggatgttctaccggccctccagttaccagccccctctgcagaatgccaagaaccacgaccatgcctgcatcgcctgtcggatcatctatcggtcagacgagcaccaccctcccatcctgcccccaaaggcagacctgaccatcggcctgcacggggagtgggtgagccagcgctgtgaggtgcgccccgaagtcctcttcctcacccgccacttcatcttccatgacaacaacaacacctgggagggccactactaccactactcagacccggtgtgcaagcaccccaccttctccatctacgcccggggccgctacagccgcggcgtcctctcgtccagggtcatgggaggcaccgagttcgtgttcaaagtgaatcacatgaaggtcacccccatggatgcggccacagcctcactgctcaacgtcttcaacgggaatgagtgcggggccgagggctcctggcaggtgggcatccagcaggatgtgacccacaccaatggctgcgtggccctgggcatcaaactacctcacacggagtacgagatcttcaaaatggaacaggatgcccgggggcgctatctgctgttcaacggtcagaggcccagcgacgggtccagcccagacaggccagagaagagagccacgtcctaccagatgcccttggtccagtgtgcctcctcttcgccgagggcagaggacctcgcagaagacagtggaagcagcctgtatggccgggcccctgggaggcacacctggtccctgctgctggctgcacttgcctgccttgtccctctgctgcattggaacatccgcagatagaagttttagaaagttctatttttccaaaccaggattccttactattgacagatttgctttaccaaaagaaaagacatttattcttttgatgcacttgaatgccagagaactgtccttctttttctcctctccctccctcccagcccctgagtcatgaacagcaaggagtgtttgaagtttctgctttgaactccgtccagcctgatccctggcctgagcaacttcacaacagtaattgcactttaagacagcctagagttctggacgagcgtgtttggtagcagggatgaaagctagggcctcttatttttttctcttaattattattatatttctgagttaaacttagaagaaacaactatcaagctacaacttttcctgccattttcctgtggttgcagcctgtcttcctttgaaattgttttactctctgagttttatatgctggaatccaatgcagagttggtttgggactgtgatcaagacaccttttattaataaagaagagacacaggtgtagatatgtatatacaaaaagatgtacggtctggccaaaccaccttcccagcctttatgcaaaaaaaggggagaatcaaagctttcatttcagaaatgttgcgtggaaaagtatctgtaattaaagtttcgaagtaatttaacct

SEQ ID NO: 1161 - DNA, 2896 bp, Homo sapiens
  source 1..2896: mol_type = unassigned DNA
atgagtgtcagaagtgtgaagggtgcctgttctgaatcccagagcctcctctccctctgtgaggctggcaggtgaggaagggtttaacctcactggaaggaatccctggagctagcggctgctgaaggcgtcgaggtgtgggggcacttggacagaacagtcaggcagccgggagctctgccagctttggtgaccttgggccgggctgggagcgctgcggcgggagccggaggactatgagctgccgcgcgttgtccagagcccagcccagccctaccgcgcgcggcccggagctctgttccctggaactttgggcactgcctctgggacccctgccggccagcaggcaggatggtgcttgcctcgtgccccttggtgcccgtctgctgatgtgcccagcctgtgcccgccatgccgccctccatctcagctttccaggccgcctacatcggcatcgaggtgctcatcgccctggtctctgtgcccgggaacgtgctggtgatctgggcggtgaaggtgaaccaggcgctgcgggatgccaccttctgcttcatcgtgtcgctggcggtggctgatgtggccgtgggtgccctggtcatccccctcgccatcctcatcaacattgggccacagacctacttccacacctgcctcatggttgcctgtccggtcctcatcctcacccagagctccatcctggccctgctggcaattgctgtggaccgctacctccgggtcaagatccctctccggtacaagatggtggtgaccccccggagggcggcggtggccatagccggctgctggatcctctccttcgtggtgggactgacccctatgtttggctggaacaatctgagtgcggtggagcgggcctgggcagccaacggcagcatgggggagcccgtgatcaagtgcgagttcgagaaggtcatcagcatggagtacatggtctacttcaacttctttgtgtgggtgctgcccccgcttctcctcatggtcctcatctacctggaggtcttctacctaatccgcaagcagctcaacaagaaggtgtcggcctcctccggcgacccgcagaagtactatgggaaggagctgaagatcgccaagtcgctggccctcatcctcttcctctttgccctcagctggctgcctttgcacatcctcaactgcatcaccctcttctgcccgtcctgccacaagcccagcatccttacctacattgccatcttcctcacgcacggcaactcggccatgaaccccattgtctatgccttccgcatccagaagttccgcgtcaccttccttaagatttggaatgaccatttccgctgccagcctgcacctcccattgacgaggatctcccagaagagaggcctgatgactagaccccgccttccgctcccaccagcccacatccagtggggtctcagtccagtcctcacatgcccgctgtcccaggggtctccctgagcctgccccagctgggctgttggctgggggcatgggggaggctctgaagagatacccacagagtgtggtccctccactaggagttaactaccctacacctctgggccctgcaggaggcctgggagggcaagggtcctacggagggaccaggtgtctagaggcaacagtgttctgagcccccacctgcctgaccatcccatgagcagtccagagcttcagggctgggcaggtcctggggaggctgagactgcagaggagccacctgggctgggagaaggtgcttgggcttctgcggtgaggcaggggagtctgcttgtcttagatgttggtggtgcagccccaggaccaagcttaaggagaggagagcatctgctctgagacggatggaaggagagaggttgaggatgcactggcctgttctgtaggagagactggccagaggcagctaaggggcaggaatcaaggagcctccgttcccacctctgaggactctggaccccaggccataccaggtgctagggtgcctgctctccttgccctgggccagcccaggattgtacgtgggagaggcagaaagggtaggttcagtaatcatttctgatatttgctggagtgctggctccacgccctggggagtgagcttggtgcggtaggtgctggcctcaaacagccacgaggtggtagctctgagccctccttcttgccctgagctttccggggaggagccttggagtgtaattacctgtcatctgggccaccagctccactggcctgcccgttgccgggcctggactgtcctaggtgaccccatctctgctgcttctgggcctgatggagaggagaacactagacatgccaactcgggagcattctgcctgcctgggaacggggtggacgagggagtgtctgtaaggactcagtgttgactgtaggcgcccctggggtgggtttagcaggctgcagcaggcagaggagagtacccccctgagagcatgtgggggaaggccttgctgtcatgtgaatccctcaatacccctagtatctggctgggttttcaggggctttggaagctctgttgcaggtgtccgggggtctaggactttagggatctggggaaggaccaacccatgccctgccaagcctggagcccctgtgttggggggcaaggtgggggagcctggagcccctgtgtgggagggcgaggcgggggagcctggagcccctgtgtgggagggcgaggcgggggatcctggagcccctgtgtcggggggcgagggaggggaggtggccgtcgagttgaccttctgaacatgagtgtcaactccaggacttgcttccaagcccttccctctgttggaaattgggtgtgccctggctcccaagggaggcccatgtgactaataaaaaactgtgaaccct

SEQ ID NO: 1162 - DNA, 2919 bp, Homo sapiens
  source 1..2919: mol_type = unassigned DNA
gtgcggagcccgattgtcactcagctcctgcgccgggggcgacagagccgcaggcgcccgagtcgagtcccagccagctaccatccctctggagcttaccggccggccttggcttccccaggaatccctggagctagcggctgctgaaggcgtcgaggtgtgggggcacttggacagaacagtcaggcagccgggagctctgccagctttggtgaccttgggccgggctgggagcgctgcggcgggagccggaggactatgagctgccgcgcgttgtccagagcccagcccagccctaccgcgcgcggcccggagctctgttccctggaactttgggcactgcctctgggacccctgccggccagcaggcaggatggtgcttgcctcgtgccccttggtgcccgtctgctgatgtgcccagcctgtgcccgccatgccgccctccatctcagctttccaggccgcctacatcggcatcgaggtgctcatcgccctggtctctgtgcccgggaacgtgctggtgatctgggcggtgaaggtgaaccaggcgctgcgggatgccaccttctgcttcatcgtgtcgctggcggtggctgatgtggccgtgggtgccctggtcatccccctcgccatcctcatcaacattgggccacagacctacttccacacctgcctcatggttgcctgtccggtcctcatcctcacccagagctccatcctggccctgctggcaattgctgtggaccgctacctccgggtcaagatccctctccggtacaagatggtggtgaccccccggagggcggcggtggccatagccggctgctggatcctctccttcgtggtgggactgacccctatgtttggctggaacaatctgagtgcggtggagcgggcctgggcagccaacggcagcatgggggagcccgtgatcaagtgcgagttcgagaaggtcatcagcatggagtacatggtctacttcaacttctttgtgtgggtgctgcccccgcttctcctcatggtcctcatctacctggaggtcttctacctaatccgcaagcagctcaacaagaaggtgtcggcctcctccggcgacccgcagaagtactatgggaaggagctgaagatcgccaagtcgctggccctcatcctcttcctctttgccctcagctggctgcctttgcacatcctcaactgcatcaccctcttctgcccgtcctgccacaagcccagcatccttacctacattgccatcttcctcacgcacggcaactcggccatgaaccccattgtctatgccttccgcatccagaagttccgcgtcaccttccttaagatttggaatgaccatttccgctgccagcctgcacctcccattgacgaggatctcccagaagagaggcctgatgactagaccccgccttccgctcccaccagcccacatccagtggggtctcagtccagtcctcacatgcccgctgtcccaggggtctccctgagcctgccccagctgggctgttggctgggggcatgggggaggctctgaagagatacccacagagtgtggtccctccactaggagttaactaccctacacctctgggccctgcaggaggcctgggagggcaagggtcctacggagggaccaggtgtctagaggcaacagtgttctgagcccccacctgcctgaccatcccatgagcagtccagagcttcagggctgggcaggtcctggggaggctgagactgcagaggagccacctgggctgggagaaggtgcttgggcttctgcggtgaggcaggggagtctgcttgtcttagatgttggtggtgcagccccaggaccaagcttaaggagaggagagcatctgctctgagacggatggaaggagagaggttgaggatgcactggcctgttctgtaggagagactggccagaggcagctaaggggcaggaatcaaggagcctccgttcccacctctgaggactctggaccccaggccataccaggtgctagggtgcctgctctccttgccctgggccagcccaggattgtacgtgggagaggcagaaagggtaggttcagtaatcatttctgatatttgctggagtgctggctccacgccctggggagtgagcttggtgcggtaggtgctggcctcaaacagccacgaggtggtagctctgagccctccttcttgccctgagctttccggggaggagccttggagtgtaattacctgtcatctgggccaccagctccactggcctgcccgttgccgggcctggactgtcctaggtgaccccatctctgctgcttctgggcctgatggagaggagaacactagacatgccaactcgggagcattctgcctgcctgggaacggggtggacgagggagtgtctgtaaggactcagtgttgactgtaggcgcccctggggtgggtttagcaggctgcagcaggcagaggagagtacccccctgagagcatgtgggggaaggccttgctgtcatgtgaatccctcaatacccctagtatctggctgggttttcaggggctttggaagctctgttgcaggtgtccgggggtctaggactttagggatctggggaaggaccaacccatgccctgccaagcctggagcccctgtgttggggggcaaggtgggggagcctggagcccctgtgtgggagggcgaggcgggggagcctggagcccctgtgtgggagggcgaggcgggggatcctggagcccctgtgtcggggggcgagggaggggaggtggccgtcgagttgaccttctgaacatgagtgtcaactccaggacttgcttccaagcccttccctctgttggaaattgggtgtgccctggctcccaagggaggcccatgtgactaataaaaaactgtgaaccctg

SEQ ID NO: 1163 - DNA, 2219 bp, Homo sapiens
  source 1..2219: mol_type = unassigned DNA
cggaggactatgagctgccgcgcgttgtccagagcccagcccagccctaccgcgcgcggcccggagctctgttccctggaactttgggcactgcctctgggacccctgccggccagcaggcaggatggtgcttgcctcgtgccccttggtgcccgtctgctgatgtgcccagcctgtgcccgccatgccgccctccatctcagctttccaggccgcctacatcggcatcgaggtgctcatcgccctggtctctgtgcccgggaacgtgctggtgatctgggcggtgaaggtgaaccaggcgctgcgggatgccaccttctgcttcatcgtgtcgctggcggtggctgatgtggccgtgggtgccctggtcatccccctcgccatcctcatcaacattgggccacagacctacttccacacctgcctcatggttgcctgtccggtcctcatcctcacccagagctccatcctggccctgctggcaattgctgtggaccgctacctccgggtcaagatccctctccggagaataagccaatgcatggcaagcactaaatcttagatcctgaagactcagccctcgagcaaaagacatgcacctccccactcaccgggccctggaagaggagggtgctcctcttagaggcccctggaggccaggcgtgcctcagaggggcctttcgaggcagctgggaggcagatcctcacactctgccctcctctcccccaggtacaagatggtggtgaccccccggagggcggcggtggccatagccggctgctggatcctctccttcgtggtgggactgacccctatgtttggctggaacaatctgagtgcggtggagcgggcctgggcagccaacggcagcatgggggagcccgtgatcaagtgcgagttcgagaaggtcatcagcatggagtacatggtctacttcaacttctttgtgtgggtgctgcccccgcttctcctcatggtcctcatctacctggaggtcttctacctaatccgcaagcagctcaacaagaaggtgtcggcctcctccggcgacccgcagaagtactatgggaaggagctgaagatcgccaagtcgctggccctcatcctcttcctctttgccctcagctggctgcctttgcacatcctcaactgcatcaccctcttctgcccgtcctgccacaagcccagcatccttacctacattgccatcttcctcacgcacggcaactcggccatgaaccccattgtctatgccttccgcatccagaagttccgcgtcaccttccttaagatttggaatgaccatttccgctgccagcctgcacctcccattgacgaggatctcccagaagagaggcctgatgactagaccccgccttccgctcccaccagcccacatccagtggggtctcagtccagtcctcacatgcccgctgtcccaggggtctccctgagcctgccccagctgggctgttggctgggggcatgggggaggctctgaagagatacccacagagtgtggtccctccactaggagttaactaccctacacctctgggccctgcaggaggcctgggagggcaagggtcctacggagggaccaggtgtctagaggcaacagtgttctgagcccccacctgcctgaccatcccatgagcagtccagagcttcagggctgggcaggtcctggggaggctgagactgcagaggagccacctgggctgggagaaggtgcttgggcttctgcggtgaggcaggggagtctgcttgtcttagatgttggtggtgcagccccaggaccaagcttaaggagaggagagcatctgctctgagacggatggaaggagagaggttgaggatgcactggcctgttctgtaggagagactggccagaggcagctaaggggcaggaatcaaggagcctccgttcccacctctgaggactctggaccccaggccataccaggtgctagggtgcctgctctccttgccctgggccagcccaggattgtacgtgggagaggcagaaagggtaggttcagtaatcatttctgatatttgctggagtgctggctccacgccctggggagtgagcttggtgcggtaggtgctggcctcaaacagccacgaggtggtagctctgagccctccttcttgccctgagctttccggggaggagccttggagtgtaattacctgtcatctgggccaccagctc

SEQ ID NO: 1164 - DNA, 3407 bp, Homo sapiens
  source 1..3407: mol_type = unassigned DNA
aacatgaggggattggactggatgccttatggcttagcgctgtgctatgaagaggaagaaggaggaaggaaaaggagcgcagagcgggttacactgccaggagatcctgggaagctaggtcacttccctgagcctcagcatccttatctgcaaaatagaaattgctaatagactaaaaggcaattctgaaagatggatgagaaaggaatataatgactcagggtagagcctgcaaaacaatatgggatgagaagatgcagggactggtttcatggagagagcagggttttaggattgggggagggtgccagggctaccgactgctttgggagatcccagagggggcattctgaagtcctgcagaagagatgctgtgccgtgaggggtgaggggtcgctggaggccagaccagggctcccaggagtcctgcattgagaagggagagagtggacacaggaaggatgcgcctctgtccagtcctgaggctgggcgcacacaccaggcccttcgaaaagctcacattttttccagcttttctcacccagtatcacttcctttgttaagaggagggggtgggggaggagacggaggatgaggagggaggggctggcgggtgccgccgccgcccccgccccctcccggtgtgcggagcccgattgtcactcagctcctgcgccgggggcgacagagccgcaggcgcccgagtcgagtcccagccagctaccatccctctggagcttaccggccggccttggcttccccaggaatccctggagctagcggctgctgaaggcgtcgaggtgtgggggcacttggacagaacagtcaggcagccgggagctctgccagctttggtgaccttgggtgcttgcctcgtgccccttggtgcccgtctgctgatgtgcccagcctgtgcccgccatgccgccctccatctcagctttccaggccgcctacatcggcatcgaggtgctcatcgccctggtctctgtgcccgggaacgtgctggtgatctgggcggtgaaggtgaaccaggcgctgcgggatgccaccttctgcttcatcgtgtcgctggcggtggctgatgtggccgtgggtgccctggtcatccccctcgccatcctcatcaacattgggccacagacctacttccacacctgcctcatggttgcctgtccggtcctcatcctcacccagagctccatcctggccctgctggcaattgctgtggaccgctacctccgggtcaagatccctctccggtacaagatggtggtgaccccccggagggcggcggtggccatagccggctgctggatcctctccttcgtggtgggactgacccctatgtttggctggaacaatctgagtgcggtggagcgggcctgggcagccaacggcagcatgggggagcccgtgatcaagtgcgagttcgagaaggtcatcagcatggagtacatggtctacttcaacttctttgtgtgggtgctgcccccgcttctcctcatggtcctcatctacctggaggtcttctacctaatccgcaagcagctcaacaagaaggtgtcggcctcctccggcgacccgcagaagtactatgggaaggagctgaagatcgccaagtcgctggccctcatcctcttcctctttgccctcagctggctgcctttgcacatcctcaactgcatcaccctcttctgcccgtcctgccacaagcccagcatccttacctacattgccatcttcctcacgcacggcaactcggccatgaaccccattgtctatgccttccgcatccagaagttccgcgtcaccttccttaagatttggaatgaccatttccgctgccagcctgcacctcccattgacgaggatctcccagaagagaggcctgatgactagaccccgccttccgctcccaccagcccacatccagtggggtctcagtccagtcctcacatgcccgctgtcccaggggtctccctgagcctgccccagctgggctgttggctgggggcatgggggaggctctgaagagatacccacagagtgtggtccctccactaggagttaactaccctacacctctgggccctgcaggaggcctgggagggcaagggtcctacggagggaccaggtgtctagaggcaacagtgttctgagcccccacctgcctgaccatcccatgagcagtccagagcttcagggctgggcaggtcctggggaggctgagactgcagaggagccacctgggctgggagaaggtgcttgggcttctgcggtgaggcaggggagtctgcttgtcttagatgttggtggtgcagccccaggaccaagcttaaggagaggagagcatctgctctgagacggatggaaggagagaggttgaggatgcactggcctgttctgtaggagagactggccagaggcagctaaggggcaggaatcaaggagcctccgttcccacctctgaggactctggaccccaggccataccaggtgctagggtgcctgctctccttgccctgggccagcccaggattgtacgtgggagaggcagaaagggtaggttcagtaatcatttctgatatttgctggagtgctggctccacgccctggggagtgagcttggtgcggtaggtgctggcctcaaacagccacgaggtggtagctctgagccctccttcttgccctgagctttccggggaggagccttggagtgtaattacctgtcatctgggccaccagctccactggcctgcccgttgccgggcctggactgtcctaggtgaccccatctctgctgcttctgggcctgatggagaggagaacactagacatgccaactcgggagcattctgcctgcctgggaacggggtggacgagggagtgtctgtaaggactcagtgttgactgtaggcgcccctggggtgggtttagcaggctgcagcaggcagaggagagtacccccctgagagcatgtgggggaaggccttgctgtcatgtgaatccctcaatacccctagtatctggctgggttttcaggggctttggaagctctgttgcaggtgtccgggggtctaggactttagggatctggggaaggaccaacccatgccctgccaagcctggagcccctgtgttggggggcaaggtgggggagcctggagcccctgtgtgggagggcgaggcgggggagcctggagcccctgtgtgggagggcgaggcgggggatcctggagcccctgtgtcggggggcgagggaggggaggtggccgtcgagttgaccttctgaacatgagtgtcaactccaggacttgcttccaagcccttccctctgttggaaattgggtgtgccctggctcccaagggaggcccatgtgactaataaaaaactgtgaaccctg

SEQ ID NO: 1165 - DNA, 2560 bp, Homo sapiens
  source 1..2560: mol_type = unassigned DNA
gtacatgtgagcagccgcgtgcagaggggaagctctgcctgggcctcagggactgtgacatggagcaggagccgcccccagccaagctgctttcagcacagcgtgggcccccagcaccttggtgcggggtgcggcccctcggaggagggctgtcaggtgaagcctcgtgtgagggggtgcctcaggaaccctgaagctgggctgagccatgatgctgctgccagaacccctgcagagggcctggtttcaggagactcagagtcctctgtgaaaaagcccttggagagcgccccagcagggctgcacttggctcctgtgaggaaggggctcaggggtctgggcccctccgcctgggccgggctgggagccaggcgggcggctgggctgcagcaatggaccgtgagctggcccagcccgcgtccgtgctgagcctgcctgtcgtctgtggccatgcccatcatgggctcctcggtgtacatcacggtggagctggccattgctgtgctggccatcctgggcaatgtgctggtgtgctgggccgtgtggctcaacagcaacctgcagaacgtcaccaactactttgtggtgtcactggcggcggccgacatcgcagtgggtgtgctcgccatcccctttgccatcaccatcagcaccgggttctgcgctgcctgccacggctgcctcttcattgcctgcttcgtcctggtcctcacgcagagctccatcttcagtctcctggccatcgccattgaccgctacattgccatccgcatcccgctccggtacaatggcttggtgaccggcacgagggctaagggcatcattgccatctgctgggtgctgtcgtttgccatcggcctgactcccatgctaggttggaacaactgcggtcagccaaaggagggcaagaaccactcccagggctgcggggagggccaagtggcctgtctctttgaggatgtggtccccatgaactacatggtgtacttcaacttctttgcctgtgtgctggtgcccctgctgctcatgctgggtgtctatttgcggatcttcctggcggcgcgacgacagctgaagcagatggagagccagcctctgccgggggagcgggcacggtccacactgcagaaggaggtccatgctgccaagtcactggccatcattgtggggctctttgccctctgctggctgcccctacacatcatcaactgcttcactttcttctgccccgactgcagccacgcccctctctggctcatgtacctggccatcgtcctctcccacaccaattcggttgtgaatcccttcatctacgcctaccgtatccgcgagttccgccagaccttccgcaagatcattcgcagccacgtcctgaggcagcaagaacctttcaaggcagctggcaccagtgcccgggtcttggcagctcatggcagtgacggagagcaggtcagcctccgtctcaacggccacccgccaggagtgtgggccaacggcagtgctccccaccctgagcggaggcccaatggctatgccctggggctggtgagtggagggagtgcccaagagtcccaggggaacacgggcctcccagacgtggagctccttagccatgagctcaagggagtgtgcccagagccccctggcctagatgaccccctggcccaggatggagcaggagtgtcctgatgattcatggagtttgccccttcctaagggaaggagatctttatctttctggttggcttgaccagtcacgttgggagaagagagagagtgccaggagaccctgagggcagccggttcctactttggactgagagaagggagccccaggctggagcagcatgaggcccagcaagaagggcttgggttctgaggaagcagatgtttcatgctgtgaggccttgcaccaggtgggggccacagcaccagcagcatctttgctgggcagggcccagccctccactgcagaagcatctggaagcaccaccttgtctccacagagcagcttgggcacagcagactggcctggccctgagactggggagtggctccaacagcctcctgccacccacacaccactctccctagactctcctagggttcaggagctgctgggcccagaggtgacatttgacttttttccaggaaaaatgtaagtgtgaggaaaccctttttattttattacctttcactctctggctgctgggtctgccgtcggtcctgctgctaacctggcaccagagcctctgcccggggagcctcaggcagtcctctcctgctgtcacagctgccatccacttctcagtcccagggccatctcttggagtgacaaagctgggatcaaggacagggagttgtaacagagcagtgccagagcatgggcccaggtcccaggggagaggttggggctggcaggccactggcatgtgctgagtagcgcagagctacccagtgagaggccttgtctaactgcctttccttctaaagggaatgtttttttctgagataaaataaaaacgagccacatcgtgttttaagcttgtccaaatgagaa

SEQ ID NO: 1166 - DNA, 1963 bp, Homo sapiens
  source 1..1963: mol_type = unassigned DNA
gagggcgtgggaggagggaggtgaggcagctccctccgagtggaagctcacagtcagctgcagcgccgcccctgccctgactgcagctgactggcaggggcacctggaggcagcgggttcgggcgcagtatgagagggcttaccctctgcggcagtgggagacaggaccaggcagctccccacatccttccacatccgagctccaggggtctctggcttgtcctttcacagggcggctggtgtcccttaggaaaaaaacagaccacatctgatccttggccctgagtccagagtgggaggcaccgtgacaacaatgcgcagagcagggaatgcagggagccatggatagtgctggggtgcctcaggaaccctgaagctgggctgagccatgatgctgctgccagaacccctgcagagggcctggtttcaggagactcagagtcctctgtgaaaaagcccttggagagcgccccagcagggctgcacttggctcctgtgaggaaggggctcaggggtctgggcccctccgcctgggccgggctgggagccaggcgggcggctgggctgcagcaatggaccgtgagctggcccagcccgcgtccgtgctgagcctgcctgtcgtctgtggccatgcccatcatgggctcctcggtgtacatcacggtggagctggccattgctgtgctggccatcctgggcaatgtgctggtgtgctgggccgtgtggctcaacagcaacctgcagaacgtcaccaactactttgtggtgtcactggcggcggccgacatcgcagtgggtgtgctcgccatcccctttgccatcaccatcagcaccgggttctgcgctgcctgccacggctgcctcttcattgcctgcttcgtcctggtcctcacgcagagctccatcttcagtctcctggccatcgccattgaccgctacattgccatccgcatcccgctccggtacaatggcttggtgaccggcacgagggctaagggcatcattgccatctgctgggtgctgtcgtttgccatcggcctgactcccatgctaggttggaacaactgcggtcagccaaaggagggcaagaaccactcccagggctgcggggagggccaagtggcctgtctctttgaggatgtggtccccatgaactacatggtgtacttcaacttctttgcctgtgtgctggtgcccctgctgctcatgctgggtgtctatttgcggatcttcctggcggcgcgacgacagctgaagcagatggagagccagcctctgccgggggagcgggcacggtccacactgcagaaggaggtccatgctgccaagtcactggccatcattgtggggctctttgccctctgctggctgcccctacacatcatcaactgcttcactttcttctgccccgactgcagccacgcccctctctggctcatgtacctggccatcgtcctctcccacaccaattcggttgtgaatcccttcatctacgcctaccgtatccgcgagttccgccagaccttccgcaagatcattcgcagccacgtcctgaggcagcaagaacctttcaaggcagctggcaccagtgcccgggtcttggcagctcatggcagtgacggagagcaggtcagcctccgtctcaacggccacccgccaggagtgtgggccaacggcagtgctccccaccctgagcggaggcccaatggctatgccctggggctggtgagtggagggagtgcccaagagtcccaggggaacacgggcctcccagacgtggagctccttagccatgagctcaagggagtgtgcccagagccccctggcctagatgaccccctggcccaggatggagcaggagtgtcctgatgattcatggagtttgccccttcctaagggaaggagatctttatctttctggttggcttgaccagtcacgttgggagaagagagagagtgccag

SEQ ID NO: 1167 - DNA, 569 bp, Homo sapiens
  source 1..569: mol_type = unassigned DNA
gactcccaggcccgaggactcctggaagggaggtgcctcaggaaccctgaagctgggctgagccatgatgctgctgccagaacccctgcagagggcctggtttcaggagactcagagtcctctgtgaaaaagcccttggagagcgccccagcagggctgcacttggctcctgtgaggaaggggctcaggggtctgggcccctccgcctgggccgggctgggagccaggcgggcggctgggctgcagcaatggaccgtgagctggcccagcccgcgtccgtgctgagcctgcctgtcgtctgtggccatgcccatcatgggctcctcggtgtacatcacggtggagctggccattgctgtgctggccatcctgggcaatgtgctggtgtgctgggccgtgtggctcaacagcaacctgcagaacgtcaccaactactttgtggtgtcactggcggcggccgacatcgcagtgggtgtgctcgccatcccctttgccatcaccatcagcaccgggttctgcgctgcctgccacggctgcctcttcattgcctgcttcgtcctggtcctcac

SEQ ID NO: 1168 - DNA, 669 bp, Homo sapiens
  source 1..669: mol_type = unassigned DNA
cacagtcagctgcagcgccgcccctgccctgactgcagctgactggcaggggcacctggaggcagcgggttcgggcgcagtatgagagggcttaccctctgcggcagtgggagacaggaccaggcagctccccacatccttccacatccgagctccaggggtctctggcttgtcctttcacagggcggctggtgtcccttaggtgcctcaggaaccctgaagctgggctgagccatgatgctgctgccagaacccctgcagagggcctggtttcaggagactcagagtcctctgtgaaaaagcccttggagagcgccccagcagggctgcacttggctcctgtgaggaaggggctcaggggtctgggcccctccgcctgggccgggctgggagccaggcgggcggctgggctgcagcaatggaccgtgagctggcccagcccgcgtccgtgctgagcctgcctgtcgtctgtggccatgcccatcatgggctcctcggtgtacatcacggtggagctggccattgctgtgctggccatcctgggcaatgtgctggtgtgctgggccgtgtggctcaacagcaacctgcagaacgtcaccaactactttgtggtgtcactggcggcggccgacatcgcagtgggtgtgctcgccatcccctttgccatca

SEQ ID NO: 1169 - DNA, 560 bp, Homo sapiens
  source 1..560: mol_type = unassigned DNA
attggaccaggggaaccagccttgctcagtgacttctctgggtgtcctcctctaaagtgcctcaggaaccctgaagctgggctgagccatgatgctgctgccagaacccctgcagagggcctggtttcaggagactcagagtcctctgtgaaaaagcccttggagagcgccccagcagggctgcacttggctcctgtgaggaaggggctcaggggtctgggcccctccgcctgggccgggctgggagccaggcgggcggctgggctgcagcaatggaccgtgagctggcccagcccgcgtccgtgctgagcctgcctgtcgtctgtggccatgcccatcatgggctcctcggtgtacatcacggtggagctggccattgctgtgctggccatcctgggcaatgtgctggtgtgctgggccgtgtggctcaacagcaacctgcagaacgtcaccaactactttgtggtgtcactggcggcggccgacatcgcagtgggtgtgctcgccatcccctttgccatcaccatcagcaccgggttctgcgctgcctgccacggctg

SEQ ID NO: 1170 - DNA, 1517 bp, Homo sapiens
  source 1..1517: mol_type = unassigned DNA
ccgcgcgctcgcatgaaccttcgcgagctcctccagcagggatggaccgggggcgcagaggcgcttcctgaggggtggcgggccgggccccggggcgagggagattccccaggtggaggagccgggcggagaccggttccccgggaaggtgcctcaggaaccctgaagctgggctgagccatgatgctgctgccagaacccctgcagagggcctggtttcaggagactcagagtcctctgtgaaaaagcccttggagagcgccccagcagggctgcacttggctcctgtgaggaaggggctcaggggtctgggcccctccgcctgggccgggctgggagccaggcgggcggctgggctgcagcaatggaccgtgagctggcccagcccgcgtccgtgctgagcctgcctgtcgtctgtggccatgcccatcatgggctcctcggtgtacatcacggtggagctggccattgctgtgctggccatcctgggcaatgtgctggtgtgctgggccgtgtggctcaacagcaacctgcagaacgtcaccaactactttgtggtgtcactggcggcggccgacatcgcagtgggtgtgctcgccatcccctttgccatcaccatcagcaccgggttctgcgctgcctgccacggctgcctcttcattgcctgcttcgtcctggtcctcacgcagagctccatcttcagtctcctggccatcgccattgaccgctacattgccatccgcatcccgctccggtacaatggcttggtgaccggcacgagggctaagggcatcattgccatctgctgggtgctgtcgtttgccatcggcctgactcccatgctaggttggaacaactgcggtcagccaaaggagggcaagaaccactcccagggctgcggggagggccaagtggcctgtctctttgaggatgtggtccccatgaactacatggtgtacttcaacttctttgcctgtgtgctggtgcccctgctgctcatgctgggtgtctatttgcggatcttcctggcggcgcgacgacagctgaagcagatggagagccagcctctgccgggggagcgggcacggtccacactgcagaaggaggtccatgctgccaagtcactggccatcattgtggggctctttgccctctgctggctgcccctacacatcatcaactgcttcactttcttctgccccgactgcagccacgcccctctctggctcatgtacctggccatcgtcctctcccacaccaattcggttgtgaatcccttcatctacgcctaccgtatccgcgagttccgccagaccttccgcaagatcattcgcagccacgtcctgaggcagcaagaacctttcaaggcagctggcaccagtgcccgggtcttggcagctcatggcagtgacggagagcaggtcagcctccgtctcaacggccacccgccaggagtgtgggccaacggcagtgctccccaccctgagcggaggcccaatggctatgccctggggctg

SEQ ID NO: 1171 - DNA, 2460 bp, Homo sapiens
  source 1..2460: mol_type = unassigned DNA
gtgtacatgtgagcagccgcgtgcagaggggaagctctgcctgggcctcagggactgtgacatggagcaggagccgcccccagccaagctgctttcagcacagcgtgggcccccagcaccttggtgcggggtgcggcccctcggaggagggctgtcaggtgcctcaggaaccctgaagctgggctgagccatgatgctgctgccagaacccctgcagagggcctggtttcaggagactcagagtcctctgtgaaaaagcccttggagagcgccccagcagggctgcacttggctcctgtgaggaaggggctcaggggtctgggcccctccgcctgggccgggctgggagcctgcctgtcgtctgtggccatgcccatcatgggctcctcggtgtacatcacggtggagctggccattgctgtgctggccatcctgggcaatgtgctggtgtgctgggccgtgtggctcaacagcaacctgcagaacgtcaccaactactttgtggtgtcactggcggcggccgacatcgcagtgggtgtgctcgccatcccctttgccatcaccatcagcaccgggttctgcgctgcctgccacggctgcctcttcattgcctgcttcgtcctggtcctcacgcagagctccatcttcagtctcctggccatcgccattgaccgctacattgccatccgcatcccgctccggtacaatggcttggtgaccggcacgagggctaagggcatcattgccatctgctgggtgctgtcgtttgccatcggcctgactcccatgctaggttggaacaactgcggtcagccaaaggagggcaagaaccactcccagggctgcggggagggccaagtggcctgtctctttgaggatgtggtccccatgaactacatggtgtacttcaacttctttgcctgtgtgctggtgcccctgctgctcatgctgggtgtctatttgcggatcttcctggcggcgcgacgacagctgaagcagatggagagccagcctctgccgggggagcgggcacggtccacactgcagaaggaggtccatgctgccaagtcactggccatcattgtggggctctttgccctctgctggctgcccctacacatcatcaactgcttcactttcttctgccccgactgcagccacgcccctctctggctcatgtacctggccatcgtcctctcccacaccaattcggttgtgaatcccttcatctacgcctaccgtatccgcgagttccgccagaccttccgcaagatcattcgcagccacgtcctgaggcagcaagaacctttcaaggcagctggcaccagtgcccgggtcttggcagctcatggcagtgacggagagcaggtcagcctccgtctcaacggccacccgccaggagtgtgggccaacggcagtgctccccaccctgagcggaggcccaatggctatgccctggggctggtgagtggagggagtgcccaagagtcccaggggaacacgggcctcccagacgtggagctccttagccatgagctcaagggagtgtgcccagagccccctggcctagatgaccccctggcccaggatggagcaggagtgtcctgatgattcatggagtttgccccttcctaagggaaggagatctttatctttctggttggcttgaccagtcacgttgggagaagagagagagtgccaggagaccctgagggcagccggttcctactttggactgagagaagggagccccaggctggagcagcatgaggcccagcaagaagggcttgggttctgaggaagcagatgtttcatgctgtgaggccttgcaccaggtgggggccacagcaccagcagcatctttgctgggcagggcccagccctccactgcagaagcatctggaagcaccaccttgtctccacagagcagcttgggcacagcagactggcctggccctgagactggggagtggctccaacagcctcctgccacccacacaccactctccctagactctcctagggttcaggagctgctgggcccagaggtgacatttgacttttttccaggaaaaatgtaagtgtgaggaaaccctttttattttattacctttcactctctggctgctgggtctgccgtcggtcctgctgctaacctggcaccagagcctctgcccggggagcctcaggcagtcctctcctgctgtcacagctgccatccacttctcagtcccagggccatctcttggagtgacaaagctgggatcaaggacagggagttgtaacagagcagtgccagagcatgggcccaggtcccaggggagaggttggggctggcaggccactggcatgtgctgagtagcgcagagctacccagtgagaggccttgtctaactgcctttccttctaaagggaatgtttttttctgagataaaataaaaacgagccacatcgtgtttt

SEQ ID NO: 1172 - DNA, 1735 bp, Homo sapiens
  source 1..1735: mol_type = unassigned DNA
gggcaatttgttagttatccgccgccaccaagacgcggcacggcgcctggaccggaggggccccgcgcgggcgcgaactttgggctcgggcgagtgggtggtgctccgcccagcccgagacgggcgggcgcgcgggccaatgggtgccgcctcttggccgcggggggccccgacccgtgggtcccggccaccagcgccccagccccgaggctcagaagcggcaggcggaggcgcggtccgggcgctatggccatgcccggcgggtctcacgcggctgcccctcgcccggcgcgccttcggtagggggcgcccggggcccagctggcccggccatgctgctggagacacaggacgcgctgtacgtggcgctggagctggtcatcgccgcgctttcggtggcgggcaacgtgctggtgtgcgccgcggtgggcacggcgaacactctgcagacgcccaccaactacttcctggtgtccctggctgcggccgacgtggccgtggggctcttcgccatcccctttgccatcaccatcagcctgggcttctgcactgacttctacggctgcctcttcctcgcctgcttcgtgctggtgctcacgcagagctccatcttcagccttctggccgtggcagtcgacagatacctggccatctgtgtcccgctcaggtataaaagtttggtcacggggacccgagcaagaggggtcattgctgtcctctgggtccttgcctttggcatcggattgactccattcctggggtggaacagtaaagacagtgccaccaacaactgcacagaaccctgggatggaaccacgaatgaaagctgctgccttgtgaagtgtctctttgagaatgtggtccccatgagctacatggtatatttcaatttctttgggtgtgttctgcccccactgcttataatgctggtgatctacattaagatcttcctggtggcctgcaggcagcttcagcgcactgagctgatggaccactcgaggaccaccctccagcgggagatccatgcagccaagtcactggccatgattgtggggatttttgccctgtgctggttacctgtgcatgctgttaactgtgtcactcttttccagccagctcagggtaaaaataagcccaagtgggcaatgaatatggccattcttctgtcacatgccaattcagttgtcaatcccattgtctatgcttaccggaaccgagacttccgctacacttttcacaaaattatctccaggtatcttctctgccaagcagatgtcaagagtgggaatggtcaggctggggtacagcctgctctcggtgtgggcctatgatctaggctctcgcctcttccaggagaagatacaaatccacaagaaacaaagaggacacggctggttttcattgtgaaagatagctacacctcacaaggaaatggactgcctctcttgagcacttccctggagctaccacgtatctagctaatatgtatgtgtcagtagtaggctccaaggattgacaaatatatttatgatctattcagctgcttttactgtgtggattatgccaacagcttgaatggattctaacagactcttttgtttttaaaagtctgccttgtttatggtggaaaattactgaaactattttactgtgaaacagtgtgaactattataatgcaaatactttttaacttagaggcaatggaaaaataaaagttgactgtactaaaaatgta

SEQ ID NO: 1173 - DNA, 1884 bp, Homo sapiens
  source 1..1884: mol_type = unassigned DNA
ctcacttcctgaaacacccctgaagagggttgcttatcttgatggaactcaaaaagccaaaaagctgcaggcagaggcgttgaggacatctgtttggggaactaagagcagcagcactttcagattcagtccatatagagctgtcctacagcattctggaaacttgaggatgtgcggtgcataaaggggctggaagtgacccacctgtgatgagccctttctaaggagaagggtttccaagagatcaccccaccagaaaagggtaggaatgagcaagttgggaattttagactgtcactgcacatggacctctgggaagacgtctggcgagagctaggcccactggccctacagacggatcttgctggctcacctgtccctgtggaggttcccctgggaaggcaagatgcccaacaacagcactgctctgtcattggccaatgttacctacatcaccatggaaattttcattggactctgcgccatagtgggcaacgtgctggtcatctgcgtggtcaagctgaaccccagcctgcagaccaccaccttctatttcattgtctctctagccctggctgacattgctgttggggtgctggtcatgcctttggccattgttgtcagcctgggcatcacaatccacttctacagctgcctttttatgacttgcctactgcttatctttacccacgcctccatcatgtccttgctggccatcgctgtggaccgatacttgcgggtcaagcttaccgtcagatacaagagggtcaccactcacagaagaatatggctggccctgggcctttgctggctggtgtcattcctggtgggattgacccccatgtttggctggaacatgaaactgacctcagagtaccacagaaatgtcaccttcctttcatgccaatttgtttccgtcatgagaatggactacatggtatacttcagcttcctcacctggattttcatccccctggttgtcatgtgcgccatctatcttgacatcttttacatcattcggaacaaactcagtctgaacttatctaactccaaagagacaggtgcattttatggacgggagttcaagacggctaagtccttgtttctggttcttttcttgtttgctctgtcatggctgcctttatctatcatcaactgcatcatctactttaatggtgaggtaccacagcttgtgctgtacatgggcatcctgctgtcccatgccaactccatgatgaaccctatcgtctatgcctataaaataaagaagttcaaggaaacctaccttttgatcctcaaagcttgtgtggtctgccatccctctgattctttggacacaagcattgagaagaattctgagtagttatccatcagagatgactctgtctcattgaccttcagattccccatcaacaaacacttgagggcctgtatgcctgggccaagggatttttacatccttgattacttccactgaggtgggagcatctccagtgctccccaattatatctcccccactccactactctcttcctccacttcatttttcccttgtcctttctctctaattcagtgttttggaggcctgacttggggacaacgtattattgatattattgtctgttttccttcttcccaatagaagaataagtcatggagcctgaagggtgcctagttgacttactgacaaaaggctccagttgggctgaacatgtgtgtggtggtgactcatttccataccattgtggaattgagcagagaacctgctctcggaggatgcctaggagatgttgggaacagaaaaaataaactgagtttaagggggacttaaactgctgaattcacctgtggatgtttttgagtaaataaaagctaatagctaa

SEQ ID NO: 1174 - DNA, 897 bp, Homo sapiens
  source 1..897: mol_type = unassigned DNA
ggtagagaccaccagttggaccaatggaagggtctccagcaggacccattgagcagaaggaggccaggtgggaaagctcctgggaagagcagccagactggacactgggctgcttgagtcctgagtcacacaccaatcatgtggccctgagggacacagggaaccagctcattgtcactatgtcctgcctgaccaaagaggacacgggctggtactggtgtggcatccagcgggactttgccagggatgacatggattttacagagctgattgtaactgacgacaaaggaaccctggccaatgacttttggtctgggaaagacctatcaggcaacaaaaccagaagctgcaaggctcccaaagttgtccgcaaggctgaccgctccaggacgtccattctcatcatttgcatactgatcacgggtttgggaatcatctctgtaatcagtcatttgaccaaaaggaggagaagtcaaaggaatagaagggtaggcaacactttgaagcccttctcgcgtgtcctgactccaaaggaaatggctcctactgaacagatgtgactgaagatttttttaatttagttcataaagtgatgctacaacagaataatcaccatgacaactggcccacacctcagagactgattctgatctcccaggaattctgaaggaccctctatccttgacaacaatcatttgcagccaggtagcaacggcggtagtcagaggagctatgatagaccacacccaagcaaggctgccctcaaataacatctcaagatcttagttcttatgcattccatcagtcagaagtgaagaagaggtggagaatctggattggggaccaggaaatcacttgtattttgttagccaataaattcctagccagtgttgaatg

SEQ ID NO: 1175 - DNA, 1517 bp, Homo sapiens
  source 1..1517: mol_type = unassigned DNA
gcaagttgggaattttagactgtcactgcacatggacctctgggaagacgtctggcgagagctaggcccactggccctacagacggatcttgctggctcacctgtccctgtggaggttcccctgggaaggcaagatgcccaacaacagcactgctctgtcattggccaatgttacctacatcaccatggaaattttcattggactctgcgccatagtgggcaacgtgctggtcatctgcgtggtcaagctgaaccccagcctgcagaccaccaccttctatttcattgtctctctagccctggctgacattgctgttggggtgctggtcatgcctttggccattgttgtcagcctgggcatcacaatccacttctacagctgcctttttatgacttgcctactgcttatctttacccacgcctccatcatgtccttgctggccatcgctgtggaccgatacttgcgggtcaagcttaccgtcagattcagaattcctgggctccctgggtgcattctatcattccagttgaaagtttgcttccttccagtcatgtggctcttcattctactctccttggctctcatttcagatgccatggtcatggatgaaaaggtcaagagaagctttgtgctggacacggcttctgccatctgcaactacaatgcccactacaagaatcaccccaaatactggtgccgaggctatttccgtgactactgcaacatcatcgccttctcccctaacagcaccaatcatgtggccctgagggacacagggaaccagctcattgtcactatgtcctgcctgaccaaagaggacacgggctggtactggtgtggcatccagcgggactttgccagggatgacatggattttacagagctgattgtaactgacgacaaaggaaccctggccaatgacttttggtctgggaaagacctatcaggcaacaaaaccagaagctgcaaggctcccaaagttgtccgcaaggctgaccgctccaggacgtccattctcatcatttgcatactgatcacgggtttgggaatcatctctgtaatcagtcatttgaccaaaaggaggagaagtcaaaggaatagaagggtaggcaacactttgaagcccttctcgcgtgtcctgactccaaaggaaatggctcctactgaacagatgtgactgaagatttttttaatttagttcataaagtgatgctacaacagaataatcaccatgacaactggcccacacctcagagactgattctgatctcccaggaattctgaaggaccctctatccttgacaacaatcatttgcagccaggtagcaacggcggtagtcagaggagctatgatagaccacacccaagcaaggctgccctcaaataacatctcaagatcttagttcttatgcattccatcagtcagaagtgaagaagaggtggagaatctggattggggaccaggaaatcacttgtattttgttagccaataaattcctagccagtgttgaatgaa

SEQ ID NO: 1176 - DNA, 1150 bp, Homo sapiens
  source 1..1150: mol_type = unassigned DNA
agttggaccaatggaagggtctccagcaggacccattgagcagaaggaggccaggtgggaaagctcctgggaagagcagccagactggacactgggctgcttgagtcctgagtcacaattcagaattcctgggctccctgggtgcattctatcattccagttgaaagtttgcttccttccagtcatgtggctcttcattctactctccttggctctcatttcagatgccatggtcatggatgaaaaggtcaagagaagctttgtgctggacacggcttctgccatctgcaactacaatgcccactacaagaatcaccccaaatactggtgccgaggctatttccgtgactactgcaacatcatcgccttctcccctaacagcaccaatcatgtggccctgagggacacagggaaccagctcattgtcactatgtcctgcctgaccaaagaggacacgggctggtactggtgtggcatccagcgggactttgccagggatgacatggattttacagagctgattgtaactgacgacaaaggaaccctggccaatgacttttggtctgggaaagacctatcaggcaacaaaaccagaagctgcaaggctcccaaagttgtccgcaaggctgaccgctccaggacgtccattctcatcatttgcatactgatcacgggtttgggaatcatctctgtaatcagtcatttgaccaaaaggaggagaagtcaaaggaatagaagggtaggcaacactttgaagcccttctcgcgtgtcctgactccaaaggaaatggctcctactgaacagatgtgactgaagatttttttaatttagttcataaagtgatgctacaacagaataatcaccatgacaactggcccacacctcagagactgattctgatctcccaggaattctgaaggaccctctatccttgacaacaatcatttgcagccaggtagcaacggcggtagtcagaggagctatgatagaccacacccaagcaaggctgccctcaaataacatctcaagatcttagttcttatgcattccatcagtcagaagtgaagaagaggtggagaatctggattggggaccaggaaatcacttgtattttgttagccaataaattcctagccagtgttgaatgaa

SEQ ID NO: 1177 - DNA, 962 bp, Homo sapiens
  source 1..962: mol_type = unassigned DNA
agcctcaggctcttcaaggccctccgtcaagcaatgatgccatggtcatggatgaaaaggtcaagagaagctttgtgctggacacggcttctgccatctgcaactacaatgcccactacaagaatcaccccaaatactggtgccgaggctatttccgtgactactgcaacatcatcgccttctcccctaacagcaccaatcatgtggccctgagggacacagggaaccagctcattgtcactatgtcctgcctgaccaaagaggacacgggctggtactggtgtggcatccagcgggactttgccagggatgacatggattttacagagctgattgtaactgacgacaaaggaaccctggccaatgacttttggtctgggaaagacctatcaggcaacaaaaccagaagctgcaaggctcccaaagttgtccgcaaggctgaccgctccaggacgtccattctcatcatttgcatactgatcacgggtttgggaatcatctctgtaatcagtcatttgaccaaaaggaggagaagtcaaaggaatagaagggtaggcaacactttgaagcccttctcgcgtgtcctgactccaaaggaaatggctcctactgaacagatgtgactgaagatttttttaatttagttcataaagtgatgctacaacagaataatcaccatgacaactggcccacacctcagagactgattctgatctcccaggaattctgaaggaccctctatccttgacaacaatcatttgcagccaggtagcaacggcggtagtcagaggagctatgatagaccacacccaagcaaggctgccctcaaataacatctcaagatcttagttcttatgcattccatcagtcagaagtgaagaagaggtggagaatctggattggggaccaggaaatcacttgtattttgttagccaataaattcctagccagtgttgaatgaa

SEQ ID NO: 1178 - DNA, 345 bp, Homo sapiens
  source 1..345: mol_type = unassigned DNA
ttccttccagtcatgtggctcttcattctactctccttggctctcatttcagcaccaatcatgtggccctgagggacacagggaaccagctcattgtcactatgtcctgcctgaccaaagaggacacgggctggtactggtgtggcatccagcgggactttgccagggatgacatggattttacagagctgattgtaactgacgacaaaggaaccctggccaatgacttttggtctgggaaagacctatcaggcaacaaaaccagaagctgcaaggctcccaaagttgtccgcaaggctgaccgctccaggacgtccattctcatcatttgcatactgatcacgg

SEQ ID NO: 1179 - DNA, 637 bp, Homo sapiens
  source 1..637: mol_type = unassigned DNA
ggacccattgagcagaaggaggccaggtgggaaagctcctgggaagagcagccagactggacactgggctgcttgagtcctgagtcacacaccaatcatgtggccctgagggacacagggaaccagctcattgtcactatgtcctgcctgaccaaagaggacacgggctggtactggtgtggcatccagcgggactttgccagggatgacatggattttacagagctgattgtaactgacgacaaaggaaccctggccaatgacttttggtctgggaaagacctatcaggcaacaaaaccagaagctgcaaggctcccaaagttgtccgcaaggctgaccgctccaggacgtccattctcatcatttgcatactgatcacgggtttgggaatcatctctgtaatcagtcatttgaccaaaaggaggagaagtcaaaggaatagaagggtaggcaacactttgaagcccttctcgcgtgtcctgactccaaaggaaatggctcctactgaacagatgtgactgaagatttttttaatttagttcataaagtgatgctacaacagaataatcaccatgacaactggcccacacctcagagactgattctgatctcccaggaattctgaaggaccctcta

SEQ ID NO: 1180 - DNA, 1539 bp, Homo sapiens
  source 1..1539: mol_type = unassigned DNA
ggggcccggcccgttaagaagagcgtggccggccgcggccaccgctggccccagggaaagccgagcggccaccgagccggcagagacccaccgagcggcggcggagggagcagcgccggggcgcacgagggcaccatggcccagacgcccgccttcgacaagcccaaagtggaactgcatgtccacctagacggatccatcaagcctgaaaccatcttatactatggcaggaggagagggatcgccctcccagctaacacagcagaggggctgctgaacgtcattggcatggacaagccgctcacccttccagacttcctggccaagtttgactactacatgcctgctatcgcgggctgccgggaggctatcaaaaggatcgcctatgagtttgtagagatgaaggccaaagagggcgtggtgtatgtggaggtgcggtacagtccgcacctgctggccaactccaaagtggagccaatcccctggaaccaggctgaaggggacctcaccccagacgaggtggtggccctagtgggccagggcctgcaggagggggagcgagacttcggggtcaaggcccggtccatcctgtgctgcatgcgccaccagcccaactggtcccccaaggtggtggagctgtgtaagaagtaccagcagcagaccgtggtagccattgacctggctggagatgagaccatcccaggaagcagcctcttgcctggacatgtccaggcctaccaggaggctgtgaagagcggcattcaccgtactgtccacgccggggaggtgggctcggccgaagtagtaaaagaggctgtggacatactcaagacagagcggctgggacacggctaccacaccctggaagaccaggccctttataacaggctgcggcaggaaaacatgcacttcgagatctgcccctggtccagctacctcactggtgcctggaagccggacacggagcatgcagtcattcggctcaaaaatgaccaggctaactactcgctcaacacagatgacccgctcatcttcaagtccaccctggacactgattaccagatgaccaaacgggacatgggctttactgaagaggagtttaaaaggctgaacatcaatgcggccaaatctagtttcctcccagaagatgaaaagagggagcttctcgacctgctctataaagcctatgggatgccaccttcagcctctgcagggcagaacctctgaagacgccactcctccaagccttcaccctgtggagtcaccccaactctgtggggctgagcaacatttttacatttattccttccaagaagaccatgatctcaatagtcagttactgatgctcctgaaccctatgtgtccatttctgcacacacgtatacctcggcatggccgcgtcacttctctgattatgtgccctggccagggaccagcgcccttgcacatgggcatggttgaatctgaaaccctccttctgtggcaacttgtactgaaaatctggtgctcaataaagaagcccatggctggtggcatgca

SEQ ID NO: 1181 - DNA, 1961 bp, Homo sapiens
  source 1..1961: mol_type = unassigned DNA
aaacaggaaggccacagtggaggccaagccttccccatgggcaccttctcagattgcgattgtggatgaaatgagggattttcttgaaacaaccctcacgcaggtgacgcaagacgcggagctcggctgcacgacgctggcgcaagcgcgggggcaagagcgccggcctccgagacggtgagaaaatggctagcaacaatcattggtttcagagttcgcaggtccccagctttgcccagatgctgaaaaagaacctgccagttcaaccagcgacaaagacgataactacacccacaggatggtcctcagaaagttacggcctgtccaagatggcatccaaggttacgcaagtaacgggtaattttccagagccgttgctttccaagaatctttcatctatttcaaatcctgtccttcctccaaaaaaaatacctaaggaatttataatgaaatacaaacgtggagagataaatcctgtgtcagccttgcaccagtttgcacaaatgcagcgagttcagcttgaccttaaggaaactgtgacaacaggtaatgttatgggaccatattttgccttttgtgctgtggtggatggtattcagtacaagactggactgggacaaaataaaaaggagtctagatccaatgcagcaaaattagctcttgatgagcttctacaactggatgaacctgaaccacgaattttagaaacatcaggtcctcctcctttccctgcagaacctgttgttttatctgaactagcatatgtttcaaaagtacattatgaagggagacatattcaatatgcaaagatttcacagatcgttaaagaaagatttaatcaactaatttctaatcgttcagaatacctgaaatatagcagttcattggctgcttttataattgaaagagctggacaacatgaggttgtagctataggcacaggtgaatacaattacagccaggacattaagccagatggaagagtattgcatgacactcatgctgttgttacagcaagaaggtctcttcttaggtacttttatagacaacttctgctcttctacagcaaaaatcctgctatgatggaaaaatcaatattttgtacagaaccaacttctaatctactcactcttaaacagaatatcaacatttgcctttacatgaaccagttgcctaaaggatcagcccagattaagtcacagttacgtcttaatccacattctatatctgcatttgaagccaatgaagaactctgtctccacgtggctgttgaaggcaaaatttatctgactgtttactgtcctaaagatggtgttaatagaataagcagtatgtcctcaagtgacaaattgaccagatgggaagtgcttggtgtacagggagcattgctgagtcattttatacagccagtttacatcagcagtatacttattggtgatgggaattgcagtgataccagaggcttagaaatcgctataaagcaacgtgttgatgatgcactcacttcaaaacttccaatgttttacttagtcaacagacctcatattagtttagtaccctctgcatatccccttcaaatgaacttggaatataaatttctgagtctgaattgggcacaaggagatgtttctttggagattgtggatggcctgagtgggaagatcactgaaagttccccatttaaaagtggtatgtcaatggcaagtcggctttgtaaggctgcaatgttaagtcggtttaacctgcttgccaaagaagctaaaaaagaattacttgaagctggtacatatcatgcagctaagtgtatgtctgcctcctatcaagaagctaaatgtaagttgaaatcctacttacaacaacatggctatggatcctggattgtgaaatctccctgcatagagcaatttaacatgtgaaataggcaatccattatcacattaaaaatcttgttttgtttggtg

SEQ ID NO: 1182 - DNA, 1912 bp, Homo sapiens
  source 1..1912: mol_type = unassigned DNA
acggttagtgattggacgaagcagggcgcgggggcgcaagcccgggtcctgcaggggcgacgcgaggcctcttttgaaagatgcggccctgaccctgtgaacctcgcgcagagcggcctgaagcgagaggttgaggctgggaggtgagaaaatggctagcaacaatcattggtttcagagttcgcaggtccccagctttgcccagatgctgaaaaagaacctgccagttcaaccagcgacaaagacgataactacacccacaggatggtcctcagaaagttacggcctgtccaagatggcatccaaggttacgcaagtaacgggtaattttccagagccgttgctttccaagaatctttcatctatttcaaatcctgtccttcctccaaaaaaaatacctaaggaatttataatgaaatacaaacgtggagagataaatcctgtgtcagccttgcaccagtttgcacaaatgcagcgagttcagcttgaccttaaggaaactgtgacaacaggtaatgttatgggaccatattttgccttttgtgctgtggtggatggtattcagtacaagactggactgggacaaaataaaaaggagtctagatccaatgcagcaaaattagctcttgatgagcttctacaactggatgaacctgaaccacgaattttagaaacatcaggtcctcctcctttccctgcagaacctgttgttttatctgaactagcatatgtttcaaaagtacattatgaagggagacatattcaatatgcaaagatttcacagatcgttaaagaaagatttaatcaactaatttctaatcgttcagaatacctgaaatatagcagttcattggctgcttttataattgaaagagctggacaacatgaggttgtagctataggcacaggtgaatacaattacagccaggacattaagccagatggaagagtattgcatgacactcatgctgttgttacagcaagaaggtctcttcttagcaaaaatcctgctatgatggaaaaatcaatattttgtacagaaccaacttctaatctactcactcttaaacagaatatcaacatttgcctttacatgaaccagttgcctaaaggatcagcccagattaagtcacagttacgtcttaatccacattctatatctgcatttgaagccaatgaagaactctgtctccacgtggctgttgaaggcaaaatttatctgactgtttactgtcctaaagatggtgttaatagaataagcagtatgtcctcaagtgacaaattgaccagatgggaagtgcttggtgtacagggagcattgctgagtcattttatacagccagtttacatcagcagtatacttattggtgatgggaattgcagtgataccagaggcttagaaatcgctataaagcaacgtgttgatgatgcactcacttcaaaacttccaatgttttacttagtcaacagacctcatattagtttagtaccctctgcatatccccttcaaatgaacttggaatataaatttctgagtctgaattgggcacaaggagatgtttctttggagattgtggatggcctgagtgggaagatcactgaaagttccccatttaaaagtggtatgtcaatggcaagtcggctttgtaaggctgcaatgttaagtcggtttaacctgcttgccaaagaagctaaaaaagaattacttgaagctggtacatatcatgcagctaagtgtatgtctgcctcctatcaagaagctaaatgtaagttgaaatcctacttacaacaacatggctatggatcctggattgtgaaatctccctgcatagagcaatttaacatgtgaaataggcaatccattatcacattaaaaatcttgttttgtttggtgtgttttgactagtaaaaa

SEQ ID NO: 1183 - DNA, 977 bp, Homo sapiens
  source 1..977: mol_type = unassigned DNA
gagacggttagtgattggacgaagcagggcgcgggggcgcaagcccgggtcctgcaggggcgacgcgaggcctcttttgaaagatgcggccctgaccctgtgaacctcgcgcagagcggcctgaagcgagaggttgaggctgggaggtgggagcaacggcggcggcggccgcctgcgagcccccggcctgaggcgcagcagcagctgcccgtcttcccacatagagggcaggaaggacaactttggtgagaaaatggctagcaacaatcattggtttcagagttcgcaggtccccagctttgcccagatgctgaaaaagaacctgccagttcaaccagcgacaaagacgataactacacccacaggatggtcctcagaaagttacggcctgtccaagatggcatccaaggttacgcaagtaacgggtaattttccagagccgttgctttccaagaatctttcatctatttcaaatcctgtccttcctccaaaaaaaatacctaaggaatttataatgaaatacaaacgtggagagataaatcctgtgtcagccttgcaccagtttgcacaaatgcagcgagttcagcttgaccttaaggaaactgtgacaacaggtaatgttatgggaccatattttgccttttgtgctgtggtggatggtattcagtacaagactggactgggacaaaataaaaaggagtctagatccaatgcagcaaaattagctcttgatgagcttctacaactggatgaacctgaaccacgaattttagaaacatcaggtcctcctcctttccctgcagaacctgttgttttatctgaactagcatatgtttcaaaagtacattatgaagggagacatattcaatatgcaaagatttcacagatcgttaaagaaagatttaatcaactaatttctaatcgttcagaatacctgaaatatagcagttcattggctgcttttataattgaaagag

SEQ ID NO: 1184 - DNA, 627 bp, Homo sapiens
  source 1..627: mol_type = unassigned DNA
gttcgctcactggccaagcttcaggacgtgtgaggtagtttttctgtaaacaggaaggccacagtggaggccaagccttccccatgggcaccttctcagattgcgattgtggatgaaatgagggattttcttgaaacaaccctcacgcaggtgagaaaatggctagcaacaatcattggtttcagagttcgcaggtccccagctttgcccagatgctgaaaaagaacctgccagttcaaccagcgacaaagacgataactacacccacaggatggtcctcagaaagttacggcctgtccaagatggcatccaaggttacgcaagtaacgggtaattttccagagccgttgctttccaagaatctttcatctatttcaaatcctgtccttcctccaaaaaaaatacctaaggaatttataatgaaatacaaacgtggagagataaatcctgtgtcagccttgcaccagtttgcacaaatgcagcgagttcagcttgaccttaaggaaactgtgacaacaggtaatgttatgggaccatattttgccttttgtgctgtggtggatggtattcagtacaagactggactgggacaaaataaaaaggagtctagatccaatgcagcaaaat

SEQ ID NO: 1185 - DNA, 1918 bp, Homo sapiens
  source 1..1918: mol_type = unassigned DNA
ttgaaagatgcggccctgaccctgtgaacctcgcgcagagcggcctgaagcgagaggttgaggctgggaggtgggagcaacggcggcggcggccgcctgcgagcccccggcctgaggcgcagcagcagctgcccgtcttcccacatagagggcaggaaggacaactttgagttcgcaggtccccagctttgcccagatgctgaaaaagaacctgccagttcaaccagcgacaaagacgataactacacccacaggatggtcctcagaaagttacggcctgtccaagatggcatccaaggttacgcaagtaacgggtaattttccagagccgttgctttccaagaatctttcatctatttcaaatcctgtccttcctccaaaaaaaatacctaaggaatttataatgaaatacaaacgtggagagataaatcctgtgtcagccttgcaccagtttgcacaaatgcagcgagttcagcttgaccttaaggaaactgtgacaacaggtaatgttatgggaccatattttgccttttgtgctgtggtggatggtattcagtacaagactggactgggacaaaataaaaaggagtctagatccaatgcagcaaaattagctcttgatgagcttctacaactggatgaacctgaaccacgaattttagaaacatcaggtcctcctcctttccctgcagaacctgttgttttatctgaactagcatatgtttcaaaagtacattatgaagggagacatattcaatatgcaaagatttcacagatcgttaaagaaagatttaatcaactaatttctaatcgttcagaatacctgaaatatagcagttcattggctgcttttataattgaaagagctggacaacatgaggttgtagctataggcacaggtgaatacaattacagccaggacattaagccagatggaagagtattgcatgacactcatgctgttgttacagcaagaaggtctcttcttaggtacttttatagacaacttctgctcttctacagcaaaaatcctgctatgatggaaaaatcaatattttgtacagaaccaacttctaatctactcactcttaaacagaatatcaacatttgcctttacatgaaccagttgcctaaaggatcagcccagattaagtcacagttacgtcttaatccacattctatatctgcatttgaagccaatgaagaactctgtctccacgtggctgttgaaggcaaaatttatctgactgtttactgtcctaaagatggtgttaatagaataagcagtatgtcctcaagtgacaaattgaccagatgggaagtgcttggtgtacagggagcattgctgagtcattttatacagccagtttacatcagcagtatacttattggtgatgggaattgcagtgataccagaggcttagaaatcgctataaagcaacgtgttgatgatgcactcacttcaaaacttccaatgttttacttagtcaacagacctcatattagtttagtaccctctgcatatccccttcaaatgaacttggaatataaatttctgagtctgaattgggcacaaggagatgtttctttggagattgtggatggcctgagtgggaagatcactgaaagttccccatttaaaagtggtatgtcaatggcaagtcggctttgtaaggctgcaatgttaagtcggtttaacctgcttgccaaagaagctaaaaaagaattacttgaagctggtacatatcatgcagctaagtgtatgtctgcctcctatcaagaagctaaatgtaagttgaaatcctacttacaacaacatggctatggatcctggattgtgaaatctccctgcatagagcaatttaacatgtgaaataggcaatccattatcacattaaaaatcttgttttgtttggtg

SEQ ID NO: 1186 - DNA, 6554 bp, Homo sapiens
  source 1..6554: mol_type = unassigned DNA
atgatgtcaccaatctgcgaccagaccattgattcccgactgaaggtagagaaggctacgtggtgggggagggtggggggagggtcgcggccgcactggcagtctccgggtgtccggccgtgtcccgaggaagtgcaagacccggggtattccctcagcggatactacacccatccatttcaaggctatgagcacagacagctcaggtaccagcagcctgggccaggatcttcccccagtagtttcctgcttaagcaaatagaatttctcaaggggcagctcccagaagcaccggtgattggaaagcagacaccgtcactgccaccttccctcccaggactccggccaaggtttccagtactacttgcctccagtaccagaggcaggcaagtggacatcaggggtgtccccaggggcgtgcatctcagaagtcaggggctccagagagggttccagcatccttcaccacgtggcaggagtctgccacagagaggtgttgattgcctttcctcacatttccaggaactgagtatctaccaagatcaggaacaaaggatcttaaagttcctggaagagcttggggaagggaaggccaccacagcacatgatctgtctgggaaacttgggactccgaagaaagaaatcaatcgagttttatactccctggcaaagaagggcaagctacagaaagaggcaggaacaccccctttgtggaaaatcgcggtctccactcaggcttggaaccagcacagcggagtggtaagaccagacggtcatagccaaggagccccaaactcagacccgagtttggaaccggaagacagaaactccacatctgtctcagaagatcttcttgagccttttattgcagtctcagctcaggcttggaaccagcacagcggagtggtaagaccagacagtcatagccaaggatccccaaactcagacccaggtttggaacctgaagacagcaactccacatctgccttggaagatcctcttgagtttttagacatggccgagatcaaggagaaaatctgcgactatctcttcaatgtgtctgactcctctgccctgaatttggctaaaaatattggccttaccaaggcccgagatataaatgctgtgctaattgacatggaaaggcagggggatgtctatagacaagggacaacccctcccatatggcatttgacagacaagaagcgagagaggatgcaaatcaagagaaatacgaacagtgttcctgaaaccgctccagctgcaatccctgagaccaaaagaaacgcagagttcctcacctgtaatatacccacatcaaatgcctcaaataacatggtaaccacagaaaaagtggagaatgggcaggaacctgtcataaagttagaaaacaggcaagaggccagaccagaaccagcaagactgaaaccacctgttcattacaatggcccctcaaaagcagggtatgttgactttgaaaatggccagtgggccacagatgacatcccagatgacttgaatagtatccgcgcagcaccaggtgagtttcgagccatcatggagatgccctccttctacagtcatggcttgccacggtgttcaccctacaagaaactgacagagtgccagctgaagaaccccatcagcgggctgttagaatatgcccagttcgctagtcaaacctgtgagttcaacatgatagagcagagtggaccaccccatgaacctcgatttaaattccaggttgtcatcaatggccgagagtttcccccagctgaagctggaagcaagaaagtggccaagcaggatgcagctatgaaagccatgacaattctgctagaggaagccaaagccaaggacagtggaaaatcagaagaatcatcccactattccacagagaaagaatcagagaagactgcagagtcccagacccccaccccttcagccacatccttcttttctgggaagagccccgtcaccacactgcttgagtgtatgcacaaattggggaactcctgcgaattccgtctcctgtccaaagaaggccctgcccatgaacccaagttccaatactgtgttgcagtgggagcccaaactttccccagtgtgagtgctcccagcaagaaagtggcaaagcagatggccgcagaggaagccatgaaggccctgcatggggaggcgaccaactccatggcttctgataaccagcctgaaggtatgatctcagagtcacttgataacttggaatccatgatgcccaacaaggtcaggaagattggcgagctcgtgagatacctgaacaccaaccctgtgggtggccttttggagtacgcccgctcccatggctttgctgctgaattcaagttggtcgaccagtccggacctcctcacgagcccaagttcgtttaccaagcaaaagttgggggtcgctggttcccagccgtctgcgcacacagcaagaagcaaggcaagcaggaagcagcagatgcggctctccgtgtcttgattggggagaacgagaaggcagaacgcatgggtttcacagaggtaaccccagtgacaggggccagtctcagaagaactatgctcctcctctcaaggtccccagaagcacagccaaagacactccctctcactggcagcaccttccatgaccagatagccatgctgagccaccggtgcttcaacactctgactaacagcttccagccctccttgctcggccgcaagattctggccgccatcattatgaaaaaagactctgaggacatgggtgtcgtcgtcagcttgggaacagggaatcgctgtgtgaaaggagattctctcagcctaaaaggagaaactgtcaatgactgccatgcagaaataatctcccggagaggcttcatcaggtttctctacagtgagttaatgaaatacaactcccagactgcgaaggatagtatatttgaacctgctaagggaggagaaaagctccaaataaaaaagactgtgtcattccatctgtatatcagcactgctccgtgtggagatggcgccctctttgacaagtcctgcagcgaccgtgctatggaaagcacagaatcccgccactaccctgtcttcgagaatcccaaacaaggaaagctccgcaccaaggtggagaacggagaaggcacaatccctgtggaatccagtgacattgtgcctacgtgggatggcattcggctcggggagagactccgtaccatgtcctgtagtgacaaaatcctacgctggaacgtgctgggcctgcaaggggcactgttgacccacttcctgcagcccatttatctcaaatctgtcacattgggttaccttttcagccaagggcatctgacccgtgctatttgctgtcgtgtgacaagagatgggagtgcatttgaggatggactacgacatccctttattgtcaaccaccccaaggttggcagagtcagcatatatgattccaaaaggcaatccgggaagactaaggagacaagcgtcaactggtgtctggctgatggctatgacctggagatcctggacggtaccagaggcactgtggatgggccacggaatgaattgtcccgggtctccaaaaagaacatttttcttctatttaagaagctctgctccttccgttaccgcagggatctactgagactctcctatggtgaggccaagaaagctgcccgtgactacgagacggccaagaactacttcaaaaaaggcctgaaggatatgggctatgggaactggattagcaaaccccaggaggaaaagaacttttatctctgcccagtatagtatgctccagtgacagatggattagggtgtgtcatactagggtgtgagagaggtaggtcgtagcattcctcatcacatggtcaggggatttttttttctcctttttttttctttttaagccataattggtgatactgaaaactttgggttcccatttatcctgctttctttgggattgctaggcaaggtctggccaggccccccttttttcccccaagtgaagaggcagaaacctaagaagttatcttttctttctacccaaagcatacatagtcactgagcacctgcggtccatttcctcttaaaagttttgttttgatttgtttccatttcctttccctttgtgtttgctacactgacctcttgcggtcttgattaggtttcagtcaactctggatcatgtcagggactgataatttcatttgtggattacgcagacccctctacttcccctctttcccttctgagattctttccttgtgatctgaatgtctccttttccccctcagagggcaaagaggtgaacataaaggatttggtgaaacatttgtaagggtaggagttgaaaactgcagttcccagtgccacggaagtgtgattggagcctgcagataatgcccagccatcctcccatcctgcactttagccagctgcagggcgggcaaggcaaggaaagctgcttccctggaagtgtatcactttctccggcagctgggaagtctagaaccagccagactgggttaagggagctgctcaagcaatagcagaggtttcacccggcaggatgacacagaccacttcccagggagcacgggcatgccttggaatattgccaagcttccagctgcctcttctcctaaagcattcctaggaatattttccccgccaatgctgggcgtacaccctagccaacgggacaaatcctagagggtataaaatcatctctgctcagataatcatgacttagcaagaataagggcaaaaaatcctgttggcttaacgtcactgttccacccggtgtaatatctctcatgacagtgacaccaagggaagttgactaagtcacatgtaaattaggagtgttttaaagaatgccatagatgttgattcttaactgctacagataacctgtaattgagcagatttaaaattcaggcatacttttccatttatccaagtgctttcatttttccagatggcttcagaagtaggctcgtgggcagggcgcagacctgatctttatagggttgacatagaaagcagtagttgtgggtgaaagggcaggttgtcttcaaactctgtgaggtagaatcctttgtctatacctccatgaacattgactcgtgtgttcagagcctttggcctctctgtggagtctggctctctggctcctgtgcattctttgaatagtcactcgtaaaaactgtcagtgcttgaaactgtttcctttactcatgttgaagggactttgttggcttttagagtgttggtcatgactccaagagcagagcagggaagagcccaagcatagacttggtgccgtggtgatggctgcagtccagttttgtgatgctgcttttacgtgtccctcgataacagtcagctagacacactcaggaggactactgaggctctgcgaccttcaggagctgagcctgcctctctcctttagatgacagaccttcatctgggaacgtgctgagccagcaccctcagatgatttccctccaaactgctgactaggtcatcctctgtctggtagagacattcacatctttgcttttattctatgctctctgtacttttgaccaaaaattgaccaaagtaagaaaatgcaagttctaaaaatagactaaggatgcctttgcagaacaccaaagcatcccaaggaactggtagggaagtggcgcctgtctcctggagtggaagaggcctgctccctggctctgggtctgctgggggcacagtaaatcagtcttggcacccacatccagggcagagaggtctgtggttctcagcatcagaaggcagcgcagcccctctcctcttcaggctacagggttgtcacctgctgagtcctcaggttgtttggcctctctggtccatcttgggcattaggttctccagcagagctctggccagctgcctcttctttaactgggaacacaggctctcacaagatcagaacccccactcacccccaagatcttatctagcaagcctgtagtattcagtttctgttgtaggaagagagcgaggcatccctgaattccacgcatctgctggaaacgagccgtgtcagatcgcacatccctgcgcccccatgcccctctgagtcacacaggacagaggaggcagagcttctgcccactgttatcttcactttctttgtccagtcttttgtttttaataagcagtgaccctccctactcttctttttaatgatttttgtagttgatttgtctgaactgtggctactgtgcattccttgaataatcacttgtaaaaattgtcagtgcttgaagctgtttcctttactcacattgaagggacttcgttggttttttggagtcttggttgtgactccaagagcagagtgaggaagacccccaagcatagactcgggtactgtgatgatggctgcagtccagttttatgattctgcttttatgtgtcccttgataacagtgacttaacaatatacattcctcataaataaaaaaaaaacaagaatctgaattctt

SEQ ID NO: 1187 - DNA, 2519 bp, Homo sapiens
  source 1..2519: mol_type = unassigned DNA
gcggcggggctgaggcgctgaggcggccgtggcggcggcggcggcggcggcggcagcggcggccaagcggccaggttggcggccggggctccgggccgcgcgaggccacggccacgccgcgccgctgcgcacaaccaacgaggcagagcgccgcccggcgcgagactgcggccgaagcgtggggcgcgcgtgcggaggaccaggcgcggcgcggctgcggctgagcataattgatatactgtggttactctacctatttgtgtaggcctctcaggtcattgaaacaagatgttgtacaaattagcagatgacactggcgcatggaggaatggtttgtattttaattttcactgtataacattttagtaaagcttttactgcaggtagtgtatattttgagaacagcgtgaggtttattctactaatggaaatttacaaaaataccagtttgaatgattgagaaatctaagttaaagaacccttgaatagaaatgtcgctgttcagtgcgttgatcgattctcacatctgaagccagctgtgtattcttgagtggagcctttcaggctggcatggagagcttaaggggcaactgaaggagacacactggccaagcgcggagttctgcttacttcagtcctgctgagatactctctcagtccgctcgcaccgaaggaagctgccttgggatcagagcagacataaagctagaaaaatttcaaggaagctgtcagtgtggtgttgggcctgattgattcgcatcagctcaggtggcgtcctattggaaggtcggcagtgggagagcagctggccagttcctcccgcctgcaaggcaggggagtgtacaaggtgtgtaccccaggggcaggatgctaacactgcactgactgagaaaagaatttgtcttacctgtacctgacaggtgtgtacctgaaagagatgaaattgaaatggccaatgagcacaccctcattcatccagcgagcattgaggaccccctagaggccaggcccatgagtgatgaagatcccgaggatgaagacgccttgccagccaggtggaagaaagaaatgggaagaaaaaggaagagaaccatagctacgttgtgagggcattgcttcaactctggtaacttcatgtgaaatgactacaaaatgaattaatatgcagtaagagagccagtgccccaccagggcacctttccacttgctggcacacagatttaccacaattaggatactgcttgtcctgtcatgccgggagagtctaaattactctgactttcaagaaaccaaaaatatgcatttttgatgttaggaagatttactgtgcattgggctgtgtcatttgatgaggaaaaaaccaaatgatctctttatgaaaatgaagaattgtagcctgtggaggtgaccaaggaaccagatcccaagaggcctctgccactgaaaggagatttttattacttgcgtttcctagacgggggggcactcgcgccaagcaggcccacggggcacactggtgtcagtcaaggggcagaaaggagccacaggaaagcccaggacagagcctgagtggggtttctgtgggaaaggcagggcagggcacccgtgtaggaatggctagtgtgaacagttccagtgggccctgggctgtaggagagatcactagctgcctgctaccaggccctggggtgatttcgggcaggcgggcagttagataagggaggtgggtagagccgaccacctgcctggaaccctgtgctggctataagccctgggagggccagtctctccctgtgtctgtaaggcccacaaatgccaaagcattaggaataagaaaatggacgtaatagaattgatcctgtgaggactggatgcctaactgccacatacagaatgtgagaaagcacagaacaactgccttcattgacaagatggtgcccagagctcaagacaggcacacagcaggaggatgccggcaggatccctcaacaagcttaccgtggtatctttcacaatgttaactgtcatcccagatgaacttttaatgacagtgtatctctgaagattgtgcttttagcgtattttcacttaaagtcatatctcatttagtagacctgccagattcctgaaaagttacacacaagccagctgacatgacctttgccagtcatgttgaccacgttctcaccgagctgtggactcctcactaggagcctttacctacggccagatggctgttgtcactgcctgtggtggggttacggtttcggactcacctgatccgttctgccgggattacctacggccagatggctgttgtcactgcctgtggtggggttatggtttcggacttacctgatccgttctgccgggattacctacggccagatggctgttgtcactgcctgtggtggggttatggtttcggacgcacctgatccgttctgccgggattttaaagtatgggagtttaggcatactttgcaagttgtttcttgaatatacttttctgaattatg

SEQ ID NO: 1188 - DNA, 6882 bp, Homo sapiens
  source 1..6882: mol_type = unassigned DNA
gcggcggcggcggcggcggcggcagcggcggccaagcggccaggttggcggccggggctccgggccgcgcgaggccacggccacgccgcgccgctgcgcacaaccaacgaggcagagcgccgcccggcgcgagactgcggccgaagcgtggggcgcgcgtgcggaggaccaggcgcggcgcggctgcggctgagagtggagcctttcaggctggcatggagagcttaaggggcaactgaaggagacacactggccaagcgcggagttctgcttacttcagtcctgctgagatactctctcagtccgctcgcaccgaaggaagctgccttgggatcagagcagacataaagctagaaaaatttcaagacagaaacagtctccgccagtcaagaaaccctcaaaagtattttgccatggatatagaagatgaagaaaacatgagttccagcagcactgatgtgaaggaaaaccgcaatctggacaacgtgtcccccaaggatggcagcacacctgggcctggcgagggctctcagctctccaatgggggtggtggtggccccggcagaaagcggcccctggaggagggcagcaatggccactccaagtaccgcctgaagaaaaggaggaaaacaccagggcccgtcctccccaagaacgccctgatgcagctgaatgagatcaagcctggtttgcagtacacactcctgtcccagactgggcccgtgcacgcgcctttgtttgtcatgtctgtggaggtgaatggccaggtttttgagggctctggtcccacaaagaaaaaggcaaaactccatgctgctgagaaggccttgaggtctttcgttcagtttcctaatgcctctgaggcccacctggccatggggaggaccctgtctgtcaacacggacttcacatctgaccaggccgacttccctgacacgctcttcaatggttttgaaactcctgacaaggcggagcctcccttttacgtgggctccaatggggatgactccttcagttccagcggggacctcagcttgtctgcttccccggtgcctgccagcctagcccagcctcctctccctgtcttaccaccattcccacccccgagtgggaagaatcccgtgatgatcttgaacgaactgcgcccaggactcaagtatgacttcctctccgagagcggggagagccatgccaagagcttcgtcatgtctgtggtcgtggatggtcagttctttgaaggctcggggagaaacaagaagcttgccaaggcccgggctgcgcagtctgccctggccgccatttttaacttgcacttggatcagacgccatctcgccagcctattcccagtgagggtcttcagctgcatttaccgcaggttttagctgacgctgtctcacgcctggtcctgggtaagtttggtgacctgaccgacaacttctcctcccctcacgctcgcagaaaagtgctggctggagtcgtcatgacaacaggcacagatgttaaagatgccaaggtgataagtgtttctacaggaacaaaatgtattaatggtgaatacatgagtgatcgtggccttgcattaaatgactgccatgcagaaataatatctcggagatccttgctcagatttctttatacacaacttgagctttacttaaataacaaagatgatcaaaaaagatccatctttcagaaatcagagcgaggggggtttaggctgaaggagaatgtccagtttcatctgtacatcagcacctctccctgtggagatgccagaatcttctcaccacatgagccaatcctggaagaaccagcagatagacacccaaatcgtaaagcaagaggacagctacggaccaaaatagagtctggtgaggggacgattccagtgcgctccaatgcgagcatccaaacgtgggacggggtgctgcaaggggagcggctgctcaccatgtcctgcagtgacaagattgcacgctggaacgtggtgggcatccagggatccctgctcagcattttcgtggagcccatttacttctcgagcatcatcctgggcagcctttaccacggggaccacctttccagggccatgtaccagcggatctccaacatagaggacctgccacctctctacaccctcaacaagcctttgctcagtggcatcagcaatgcagaagcacggcagccagggaaggcccccaacttcagtgtcaactggacggtaggcgactccgctattgaggtcatcaacgccacgactgggaaggatgagctgggccgcgcgtcccgcctgtgtaagcacgcgttgtactgtcgctggatgcgtgtgcacggcaaggttccctcccacttactacgctccaagattaccaagcccaacgtgtaccatgagtccaagctggcggcaaaggagtaccaggccgccaaggcgcgtctgttcacagccttcatcaaggcggggctgggggcctgggtggagaagcccaccgagcaggaccagttctcactcacgccctgacccgggcagacatgatggggggtgcagggggctgtgggcatccagcgtcatcctccagaacctcacatctgaactgggggcaggtgcataccttggggagggagtagggggacacgggggaccaccaggtgtccacggttgtccccagcatctcacatcagacctggggcaggtgcgcagtgtggggaggggatggggtgcgtcagggcccagcatcgccgcctggcatctctctgccgcagcatttccccttctgaaccgtccagtgactgctttcaatctcggtttacgtttagaaattgagttctactgagtagggcttccttaagtttaggaaaatagaaattactttgtgtgaaattcttgaataaataatttattcagagctaggaatgtggtttataaaataggaagtaattgtgtcaggtcacttttatgccacattattttaattgcaaaaaagcatctatatatggaggagggtgggaaaatagaggtaggaaatagtagcctaaaggaaatcgccacacgtctgtctaaacttaggtctcttttctccgtaggtacctccctgggtagttccacacactaggttgtaacagtctctccctgaggagcagactcccagcatggtgtagcgtggccctgtcatgcacatggggtcccgcagcagtgactgtgtgtcctgcagaggcgtgacccaggcccctgtagccctcagcctcctctagaagcttctgtactccttgtaggatcagatcatggaaaacttttctcagtttacttctaagtaatcacagataatacatggccagtaatcccaggctggccattcattcaggttttttaaaggatatttaacttttatggactagaaggaatcacgagggctactgcacaatacatggcctaagttccctctgttccttcctctgaatcgaatggatgtgggtgaccgcccgaaggccttcacaggatggaagtagaatgatttcagtagatactcattcttggaaaatgccatagttttaaattattgtttccagctttatcaaagacatgtttgaaaaataaaaagcatccaagtgagagctggtgagaccacgtgctgctggcgtagtgtaggccagacattgacagtcctgacgggagctcagggctgcccagcgcccagcgtgcacgggacggccccacgacagagggagtcagcccgggaggtcaggagcgcggcgggcgagggccctgtgtggaccacctccaccaagctcagagatttgcaccaggtgccttgttgcctccgctcaggatgaaagaggagctgagagaagtgctctgcctgccagtgcagtgcccagctccaaggctctagagggtgttcaggtgggtctcctggggccatggggagagattggtgcagaccttaccccacagcatacacctgccacagcgaaatccagggtgttggcacctgtgtgtccgtgatgagcctaggaaaccagagcaggggcagaggggcgtcatcctcccaccggacgctgggagctcagaccccaaaactgaaacaccgtggcttcggcggggggtgtgcctcctgatgtcaggagccccatccacgtgtgtccacacagatctcgtcgcagcacggcaggaaggggtgctgcttagggctcattgttggggacatgaccgggttcagcggctagaacatctgccccacagcagcctcctcctccaccgaagagggtagttgtctccctgaagcagtcacagcaggcgtctctgccgctccgtcaccacagtggggttttgttcaggcagatcgcgctggggttctgcacctgcagaaggagaggggtctgttgtcgctggctttcccccaagcaggctcttgcacactctagaaaaaacaccttgtaagtctgtgcatttttattgtcttgataaattgtatttttttctaatggggattgggagatggacttcgtttttaaaaatatgtggattttggttaccaagtttagtgttaatatattccatatacatacaaaactacccggtatgtctggcttttcccttctgtcaggtaatagctaaagtcagcatgattgctccctgtaccaccccaaataagtgagtgcctcaccttgtggggcctgagcagctaccttgagaccatgtgaggtggcacctttccggggtggactcgtgcggccttgaggacaggcacagggcaccctatcccaagccgtccaggcaggaggaaggcagccaaggcaactgggttctgggagccctgggtggggcagctgtggggaggaactgggttcggggagccctgggcggggcggctgttggggggaactgggttcggggtgccctgggcagggggctactggggggcggctgtgaggaggagttgggttcagggagccctgggcggggtggctgtcagggggaactgggttccgggagccctgggccggggcagggggcggctgtaggaaggaactggtttcggggagccctgggcggggcggctgtggggaggaaggtgacgtgcaggggaccagaggctctgcactgctcctaggacagctcatctgtaatcagaaaaaaaataaacaaaatacagaacgctgactcctccgtgagacagatcggggaccttagcactttaatccctcccttctgagcgctcggtgtgcacttttagactatagctgtttcattgacgtgtcactctccatccagtgtccttgatgtggcttttagagacttagcagaaaattcgacacaagcaggaacttgattttttaagaaaaaatattacattttgaggacattttgacaagtaggggaagagagggcttctgttgttttgttttgttttgttttgttaactaaacctgaagtattaattccacaaagacactgtccctcaggaccactcaggtacagctctgccagggacagagtcctgctagtgggaggtctcaggtggggcggtgtgttctgtgccatgaggcagcgacaggtccagatggatgtcgtcaccaccttcctcagctctcatcacctggtcgtacgccaggcccacctcttcccagcaagggacgccaaagaactgcagtttttattctgagtcttaatttaacttttcatcatcttttcctattttggagaattttttgtaattaaaagcaattattttaaaatgtgcaagccagtatctcacaaggcatggatttctgtggaatttatttttattcaaataaccatatttatctccaggctgtggaatcgccactttctttgtgaagacagtgtctctccttgtaatctcacacaggtacactgaggaggggacggctccgtcttcacattgtgcacagatctgaggatgggattagcgaagctgtggagactgcacatccggacctgcccatgtctcaaaacaaacacatgtacagtggctctttttccttctcaaacactttaccccagaagcaggtggtctgccccaggcataaagaaggaaaattggccatctttcccacctctaaattctgtaaaattatagacttgctcaaaagattcctttttatcatccccacgctgtgtaagtggaaagggcattgtgttccgtgtgtgtccagtttacagcgtctctgccccctagcgtgttttgtgacaatctccctgggtgaggagtgggtgcacccagccccgaggccagtggttgctcggggccttccgtgtgagttctagtgttcacttgatgccggggaatagaattagagaaaactctgacctgccgggttccagggactggtggaggtggatggcaggtccgactcgaccatgacttagttgtaagggtgtgtcggctttttcagtctcatgtgaaaatcctcctgtctctggcagcactgtctgcactttcttgtttactgtttgaagggacgagtaccaagccacaagaacacttcttttggccacagcataagctgatggtatgtaaggaaccgatgggccattaaacatgaactgaacggttaaaagcacagtctatggaacgctaatggagtcagcccctaaagctgtttgctttttcaggctttggattacatgcttttaatttgattttagaatctggacactttctatgaatgtaattcggctgagaaacatgttgctgagatgcaatcctcagtgttctctgtatgtaaatctgtgtatacaccacacgttacaactgcatgagcttcctctcgcacaagaccagctggaactgagcatgagacgctgtcaaatacagacaaaggatttgagatgttctcaataaaaagaaaatgtttcacta

SEQ ID NO: 1189 - DNA, 6604 bp, Homo sapiens
  source 1..6604: mol_type = unassigned DNA
caaaagtattttgccatggatatagaagatgaagaaaacatgagttccagcagcactgatgtgaaggaaaaccgcaatctggacaacgtgtcccccaaggatggcagcacacctgggcctggcgagggctctcagctctccaatgggggtggtggtggccccggcagaaagcggcccctggaggagggcagcaatggccactccaagtaccgcctgaagaaaaggaggaaaacaccagggcccgtcctccccaagaacgccctgatgcagctgaatgagatcaagcctggtttgcagtacacactcctgtcccagactgggcccgtgcacgcgcctttgtttgtcatgtctgtggaggtgaatggccaggtttttgagggctctggtcccacaaagaaaaaggcaaaactccatgctgctgagaaggccttgaggtctttcgttcagtttcctaatgcctctgaggcccacctggccatggggaggaccctgtctgtcaacacggacttcacatctgaccaggccgacttccctgacacgctcttcaatggttttgaaactcctgacaaggcggagcctcccttttacgtgggctccaatggggatgactccttcagttccagcggggacctcagcttgtctgcttccccggtgcctgccagcctagcccagcctcctctccctgtcttaccaccattcccacccccgagtgggaagaatcccgtgatgatcttgaacgaactgcgcccaggactcaagtatgacttcctctccgagagcggggagagccatgccaagagcttcgtcatgtctgtggtcgtggatggtcagttctttgaaggctcggggagaaacaagaagcttgccaaggcccgggctgcgcagtctgccctggccgccatttttaacttgcacttggatcagacgccatctcgccagcctattcccagtgagggtcttcagctgcatttaccgcaggttttagctgacgctgtctcacgcctggtcctgggtaagtttggtgacctgaccgacaacttctcctcccctcacgctcgcagaaaagtgctggctggagtcgtcatgacaacaggcacagatgttaaagatgccaaggtgataagtgtttctacaggaacaaaatgtattaatggtgaatacatgagtgatcgtggccttgcattaaatgactgccatgcagaaataatatctcggagatccttgctcagatttctttatacacaacttgagctttacttaaataacaaagatgatcaaaaaagatccatctttcagaaatcagagcgaggggggtttaggctgaaggagaatgtccagtttcatctgtacatcagcacctctccctgtggagatgccagaatcttctcaccacatgagccaatcctggaagggtctcgctcttacacccaggctggagtgcagtggtgcaatcatggctcactgcagcctcgacctcctgggctcttaagcgatccttccacctcaaccttccaaggagctgggactacagaaccagcagatagacacccaaatcgtaaagcaagaggacagctacggaccaaaatagagtctggtgaggggacgattccagtgcgctccaatgcgagcatccaaacgtgggacggggtgctgcaaggggagcggctgctcaccatgtcctgcagtgacaagattgcacgctggaacgtggtgggcatccagggatccctgctcagcattttcgtggagcccatttacttctcgagcatcatcctgggcagcctttaccacggggaccacctttccagggccatgtaccagcggatctccaacatagaggacctgccacctctctacaccctcaacaagcctttgctcagtggcatcagcaatgcagaagcacggcagccagggaaggcccccaacttcagtgtcaactggacggtaggcgactccgctattgaggtcatcaacgccacgactgggaaggatgagctgggccgcgcgtcccgcctgtgtaagcacgcgttgtactgtcgctggatgcgtgtgcacggcaaggttccctcccacttactacgctccaagattaccaagcccaacgtgtaccatgagtccaagctggcggcaaaggagtaccaggccgccaaggcgcgtctgttcacagccttcatcaaggcggggctgggggcctgggtggagaagcccaccgagcaggaccagttctcactcacgccctgacccgggcagacatgatggggggtgcagggggctgtgggcatccagcgtcatcctccagaacctcacatctgaactgggggcaggtgcataccttggggagggagtagggggacacgggggaccaccaggtgtccacggttgtccccagcatctcacatcagacctggggcaggtgcgcagtgtggggaggggatggggtgcgtcagggcccagcatcgccgcctggcatctctctgccgcagcatttccccttctgaaccgtccagtgactgctttcaatctcggtttacgtttagaaattgagttctactgagtagggcttccttaagtttaggaaaatagaaattactttgtgtgaaattcttgaataaataatttattcagagctaggaatgtggtttataaaataggaagtaattgtgtcaggtcacttttatgccacattattttaattgcaaaaaagcatctatatatggaggagggtgggaaaatagaggtaggaaatagtagcctaaaggaaatcgccacacgtctgtctaaacttaggtctcttttctccgtaggtacctccctgggtagttccacacactaggttgtaacagtctctccctgaggagcagactcccagcatggtgtagcgtggccctgtcatgcacatggggtcccgcagcagtgactgtgtgtcctgcagaggcgtgacccaggcccctgtagccctcagcctcctctagaagcttctgtactccttgtaggatcagatcatggaaaacttttctcagtttacttctaagtaatcacagataatacatggccagtaatcccaggctggccattcattcaggttttttaaaggatatttaacttttatggactagaaggaatcacgagggctactgcacaatacatggcctaagttccctctgttccttcctctgaatcgaatggatgtgggtgaccgcccgaaggccttcacaggatggaagtagaatgatttcagtagatactcattcttggaaaatgccatagttttaaattattgtttccagctttatcaaagacatgtttgaaaaataaaaagcatccaagtgagagctggtgagaccacgtgctgctggcgtagtgtaggccagacattgacagtcctgacgggagctcagggctgcccagcgcccagcgtgcacgggacggccccacgacagagggagtcagcccgggaggtcaggagcgcggcgggcgagggccctgtgtggaccacctccaccaagctcagagatttgcaccaggtgccttgttgcctccgctcaggatgaaagaggagctgagagaagtgctctgcctgccagtgcagtgcccagctccaaggctctagagggtgttcaggtgggtctcctggggccatggggagagattggtgcagaccttaccccacagcatacacctgccacagcgaaatccagggtgttggcacctgtgtgtccgtgatgagcctaggaaaccagagcaggggcagaggggcgtcatcctcccaccggacgctgggagctcagaccccaaaactgaaacaccgtggcttcggcggggggtgtgcctcctgatgtcaggagccccatccacgtgtgtccacacagatctcgtcgcagcacggcaggaaggggtgctgcttagggctcattgttggggacatgaccgggttcagcggctagaacatctgccccacagcagcctcctcctccaccgaagagggtagttgtctccctgaagcagtcacagcaggcgtctctgccgctccgtcaccacagtggggttttgttcaggcagatcgcgctggggttctgcacctgcagaaggagaggggtctgttgtcgctggctttcccccaagcaggctcttgcacactctagaaaaaacaccttgtaagtctgtgcatttttattgtcttgataaattgtatttttttctaatggggattgggagatggacttcgtttttaaaaatatgtggattttggttaccaagtttagtgttaatatattccatatacatacaaaactacccggtatgtctggcttttcccttctgtcaggtaatagctaaagtcagcatgattgctccctgtaccaccccaaataagtgagtgcctcaccttgtggggcctgagcagctaccttgagaccatgtgaggtggcacctttccggggtggactcgtgcggccttgaggacaggcacagggcaccctatcccaagccgtccaggcaggaggaaggcagccaaggcaactgggttctgggagccctgggtggggcagctgtggggaggaactgggttcggggagccctgggcggggcggctgttggggggaactgggttcggggtgccctgggcagggggctactggggggcggctgtgaggaggagttgggttcagggagccctgggcggggtggctgtcagggggaactgggttccgggagccctgggccggggcagggggcggctgtaggaaggaactggtttcggggagccctgggcggggcggctgtggggaggaaggtgacgtgcaggggaccagaggctctgcactgctcctaggacagctcatctgtaatcagaaaaaaaataaacaaaatacagaacgctgactcctccgtgagacagatcggggaccttagcactttaatccctcccttctgagcgctcggtgtgcacttttagactatagctgtttcattgacgtgtcactctccatccagtgtccttgatgtggcttttagagacttagcagaaaattcgacacaagcaggaacttgattttttaagaaaaaatattacattttgaggacattttgacaagtaggggaagagagggcttctgttgttttgttttgttttgttttgttaactaaacctgaagtattaattccacaaagacactgtccctcaggaccactcaggtacagctctgccagggacagagtcctgctagtgggaggtctcaggtggggcggtgtgttctgtgccatgaggcagcgacaggtccagatggatgtcgtcaccaccttcctcagctctcatcacctggtcgtacgccaggcccacctcttcccagcaagggacgccaaagaactgcagtttttattctgagtcttaatttaacttttcatcatcttttcctattttggagaattttttgtaattaaaagcaattattttaaaatgtgcaagccagtatctcacaaggcatggatttctgtggaatttatttttattcaaataaccatatttatctccaggctgtggaatcgccactttctttgtgaagacagtgtctctccttgtaatctcacacaggtacactgaggaggggacggctccgtcttcacattgtgcacagatctgaggatgggattagcgaagctgtggagactgcacatccggacctgcccatgtctcaaaacaaacacatgtacagtggctctttttccttctcaaacactttaccccagaagcaggtggtctgccccaggcataaagaaggaaaattggccatctttcccacctctaaattctgtaaaattatagacttgctcaaaagattcctttttatcatccccacgctgtgtaagtggaaagggcattgtgttccgtgtgtgtccagtttacagcgtctctgccccctagcgtgttttgtgacaatctccctgggtgaggagtgggtgcacccagccccgaggccagtggttgctcggggccttccgtgtgagttctagtgttcacttgatgccggggaatagaattagagaaaactctgacctgccgggttccagggactggtggaggtggatggcaggtccgactcgaccatgacttagttgtaagggtgtgtcggctttttcagtctcatgtgaaaatcctcctgtctctggcagcactgtctgcactttcttgtttactgtttgaagggacgagtaccaagccacaagaacacttcttttggccacagcataagctgatggtatgtaaggaaccgatgggccattaaacatgaactgaacggttaaaagcacagtctatggaacgctaatggagtcagcccctaaagctgtttgctttttcaggctttggattacatgcttttaatttgattttagaatctggacactttctatgaatgtaattcggctgagaaacatgttgctgagatgcaatcctcagtgttctctgtatgtaaatctgtgtatacaccacacgttacaactgcatgagcttcctctcgcacaagaccagctggaactgagcatgagacgctgtcaaatacagacaaaggatttgagatgttctcaataaaaagaaaatgtttcacta

SEQ ID NO: 1190 - DNA, 3563 bp, Homo sapiens
  source 1..3563: mol_type = unassigned DNA
gcggcggcggcggcggcggcggcagcggcggccaagcggccaggttggcggccggggctccgggccgcgcgaggccacggccacgccgcgccgctgcgcacaaccaacgaggcagagcgccgcccggcgcgagactgcggccgaagcgtggggcgcgcgtgcggaggaccaggcgcggcgcggctgcggctgagagtggagcctttcaggctggcatggagagcttaaggggcaactgaaggagacacactggccaagcgcggagttctgcttacttcagtcctgctgagatactctctcagtccgctcgcaccgaaggaagctgccttgggatcagagcagacataaagctagaaaaatttcaagacagaaacagtctccgccagtcaagaaaccctcaaaagtattttgccatggatatagaagatgaagaaaacatgagttccagcagcactgatgtgaaggaaaaccgcaatctggacaacgtgtcccccaaggatggcagcacacctgggcctggcgagggctctcagctctccaatgggggtggtggtggccccggcagaaagcggcccctggaggagggcagcaatggccactccaagtaccgcctgaagaaaaggaggaaaacaccagggcccgtcctccccaagaacgccctgatgcagctgaatgagatcaagcctggtttgcagtacacactcctgtcccagactgggcccgtgcacgcgcctttgtttgtcatgtctgtggaggtgaatggccaggtttttgagggctctggtcccacaaagaaaaaggcaaaactccatgctgctgagaaggccttgaggtctttcgttcagtttcctaatgcctctgaggcccacctggccatggggaggaccctgtctgtcaacacggacttcacatctgaccaggccgacttccctgacacgctcttcaatggttttgaaactcctgacaaggcggagcctcccttttacgtgggctccaatggggatgactccttcagttccagcggggacctcagcttgtctgcttccccggtgcctgccagcctagcccagcctcctctccctgtcttaccaccattcccacccccgagtgggaagaatcccgtgatgatcttgaacgaactgcgcccaggactcaagtatgacttcctctccgagagcggggagagccatgccaagagcttcgtcatgtctgtggtcgtggatggtcagttctttgaaggctcggggagaaacaagaagcttgccaaggcccgggctgcgcagtctgccctggccgccatttttaacttgcacttggatcagacgccatctcgccagcctattcccagtgagggtcttcagctgcatttaccgcaggttttagctgacgctgtctcacgcctggtcctgggtaagtttggtgacctgaccgacaacttctcctcccctcacgctcgcagaaaagtgctggctggagtcgtcatgacaacaggcacagatgttaaagatgccaaggtgataagtgtttctacaggaacaaaatgtattaatggtgaatacatgagtgatcgtggccttgcattaaatgactgccatgcagaaataatatctcggagatccttgctcagatttctttatacacaacttgagctttacttaaataacaaagatgatcaaaaaagatccatctttcagaaatcagagcgaggggggtttaggctgaaggagaatgtccagtttcatctgtacatcagcacctctccctgtggagatgccagaatcttctcaccacatgagccaatcctggaagggtctcgctcttacacccaggctggagtgcagtggtgcaatcatggctcactgcagcctcgacctcctgggctcttaagcgatccttccacctcaaccttccaaggagctgggactacagaaccagcagatagacacccaaatcgtaaagcaagaggacagctacggaccaaaatagagtctggtgaggggacgattccagtgcgctccaatgcgagcatccaaacgtgggacggggtgctgcaaggggagcggctgctcaccatgtcctgcagtgacaagattgcacgctggaacgtggtgggcatccagggatccctgctcagcattttcgtggagcccatttacttctcgagcatcatcctgggcagcctttaccacggggaccacctttccagggccatgtaccagcggatctccaacatagaggacctgccacctctctacaccctcaacaagcctttgctcagtggcatcagcaatgcagaagcacggcagccagggaaggcccccaacttcagtgtcaactggacggtaggcgactccgctattgaggtcatcaacgccacgactgggaaggatgagctgggccgcgcgtcccgcctgtgtaagcacgcgttgtactgtcgctggatgcgtgtgcacggcaaggttccctcccacttactacgctccaagattaccaagcccaacgtgtaccatgagtccaagctggcggcaaaggagtaccaggccgccaaggtacactgaggaggggacggctccgtcttcacattgtgcacagatctgaggatgggattagcgaagctgtggagactgcacatccggacctgcccatgtctcaaaacaaacacatgtacagtggctctttttccttctcaaacactttaccccagaagcaggtggtctgccccaggcataaagaaggaaaattggccatctttcccacctctaaattctgtaaaattatagacttgctcaaaagattcctttttatcatccccacgctgtgtaagtggaaagggcattgtgttccgtgtgtgtccagtttacagcgtctctgccccctagcgtgttttgtgacaatctccctgggtgaggagtgggtgcacccagccccgaggccagtggttgctcggggccttccgtgtgagttctagtgttcacttgatgccggggaatagaattagagaaaactctgacctgccgggttccagggactggtggaggtggatggcaggtccgactcgaccatgacttagttgtaagggtgtgtcggctttttcagtctcatgtgaaaatcctcctgtctctggcagcactgtctgcactttcttgtttactgtttgaagggacgagtaccaagccacaagaacacttcttttggccacagcataagctgatggtatgtaaggaaccgatgggccattaaacatgaactgaacggttaaaagcacagtctatggaacgctaatggagtcagcccctaaagctgtttgctttttcaggctttggattacatgcttttaatttgattttagaatctggacactttctatgaatgtaattcggctgagaaacatgttgctgagatgcaatcctcagtgttctctgtatgtaaatctgtgtatacaccacacgttacaactgcatgagcttcctctcgcacaagaccagctggaactgagcatgagacgctgtcaaatacagacaaaggatttgagatgttctcaataaaaagaaaatgtttcacta

SEQ ID NO: 1191 - DNA, 3977 bp, Homo sapiens
  source 1..3977: mol_type = unassigned DNA
gcggcggcggcggcggcggcggcagcggcggccaagcggccaggttggcggccggggctccgggccgcgcgaggccacggccacgccgcgccgctgcgcacaaccaacgaggcagagcgccgcccggcgcgagactgcggccgaagcgtggggcgcgcgtgcggaggaccaggcgcggcgcggctgcggctgagagtggagcctttcaggctggcatggagagcttaaggggcaactgaaggagacacactggccaagcgcggagttctgcttacttcagtcctgctgagatactctctcagtccgctcgcaccgaaggaagctgccttgggatcagagcagacataaagctagaaaaatttcaagacagaaacagtctccgccagtcaagaaaccctcaaaagtattttgccatggatatagaagatgaagaaaacatgagttttagctgacgctgtctcacgcctggtcctgggtaagtttggtgacctgaccgacaacttctcctcccctcacgctcgcagaaaagtgctggctggagtcgtcatgacaacaggcacagatgttaaagatgccaaggtgataagtgtttctacaggaacaaaatgtattaatggtgaatacatgagtgatcgtggccttgcattaaatgactgccatgcagaaataatatctcggagatccttgctcagatttctttatacacaacttgagctttacttaaataacaaagatgatcaaaaaagatccatctttcagaaatcagagcgaggggggtttaggctgaaggagaatgtccagtttcatctgtacatcagcacctctccctgtggagatgccagaatcttctcaccacatgagccaatcctggaagaaccagcagatagacacccaaatcgtaaagcaagaggacagctacggaccaaaatagagtctggtgaggggacgattccagtgcgctccaatgcgagcatccaaacgtgggacggggtgctgcaaggggagcggctgctcaccatgtcctgcagtgacaagattgcacgctggaacgtggtgggcatccagggatccctgctcagcattttcgtggagcccatttacttctcgagcatcatcctgggcagcctttaccacggggaccacctttccagggccatgtaccagcggatctccaacatagaggacctgccacctctctacaccctcaacaagcctttgctcagtggcatcagcaatgcagaagcacggcagccagggaaggcccccaacttcagtgtcaactggacggtaggcgactccgctattgaggtcatcaacgccacgactgggaaggatgagctgggccgcgcgtcccgcctgtgtaagcacgcgttgtactgtcgctggatgcgtgtgcacggcaaggttccctcccacttactacgctccaagattaccaagcccaacgtgtaccatgagtccaagctggcggcaaaggagtaccaggccgccaaggcgcgtctgttcacagccttcatcaaggcggggctgggggcctgggtggagaagcccaccgagcaggaccagttctcactcacgccctgacccgggcagacatgatggggggtgcagggggctgtgggcatccagcgtcatcctccagaacctcacatctgaactgggggcaggtgcataccttggggagggagtagggggacacgggggaccaccaggtgtccacggttgtccccagcatctcacatcagacctggggcaggtgcgcagtgtggggaggggatggggtgcgtcagggcccagcatcgccgcctggcatctctctgccgcagcatttccccttctgaaccgtccagtgactgctttcaatctcggtttacgtttagaaattgagttctactgagtagggcttccttaagtttaggaaaatagaaattactttgtgtgaaattcttgaataaataatttattcagagctaggaatgtggtttataaaataggaagtaattgtgtcaggtcacttttatgccacattattttaattgcaaaaaagcatctatatatggaggagggtgggaaaatagaggtaggaaatagtagcctaaaggaaatcgccacacgtctgtctaaacttaggtctcttttctccgtaggtacctccctgggtagttccacacactaggttgtaacagtctctccctgaggagcagactcccagcatggtgtagcgtggccctgtcatgcacatggggtcccgcagcagtgactgtgtgtcctgcagaggcgtgacccaggcccctgtagccctcagcctcctctagaagcttctgtactccttgtaggatcagatcatggaaaacttttctcagtttacttctaagtaatcacagataatacatggccagtaatcccaggctggccattcattcaggttttttaaaggatatttaacttttatggactagaaggaatcacgagggctactgcacaatacatggcctaagttccctctgttccttcctctgaatcgaatggatgtgggtgaccgcccgaaggccttcacaggatggaagtagaatgatttcagtagatactcattcttggaaaatgccatagttttaaattattgtttccagctttatcaaagacatgtttgaaaaataaaaagcatccaagtgagagctggtgagaccacgtgctgctggcgtagtgtaggccagacattgacagtcctgacgggagctcagggctgcccagcgcccagcgtgcacgggacggccccacgacagagggagtcagcccgggaggtcaggagcgcggcgggcgagggccctgtgtggaccacctccaccaagctcagagatttgcaccaggtgccttgttgcctccgctcaggatgaaagaggagctgagagaagtgctctgcctgccagtgcagtgcccagctccaaggctctagagggtgttcaggtacactgaggaggggacggctccgtcttcacattgtgcacagatctgaggatgggattagcgaagctgtggagactgcacatccggacctgcccatgtctcaaaacaaacacatgtacagtggctctttttccttctcaaacactttaccccagaagcaggtggtctgccccaggcataaagaaggaaaattggccatctttcccacctctaaattctgtaaaattatagacttgctcaaaagattcctttttatcatccccacgctgtgtaagtggaaagggcattgtgttccgtgtgtgtccagtttacagcgtctctgccccctagcgtgttttgtgacaatctccctgggtgaggagtgggtgcacccagccccgaggccagtggttgctcggggccttccgtgtgagttctagtgttcacttgatgccggggaatagaattagagaaaactctgacctgccgggttccagggactggtggaggtggatggcaggtccgactcgaccatgacttagttgtaagggtgtgtcggctttttcagtctcatgtgaaaatcctcctgtctctggcagcactgtctgcactttcttgtttactgtttgaagggacgagtaccaagccacaagaacacttcttttggccacagcataagctgatggtatgtaaggaaccgatgggccattaaacatgaactgaacggttaaaagcacagtctatggaacgctaatggagtcagcccctaaagctgtttgctttttcaggctttggattacatgcttttaatttgattttagaatctggacactttctatgaatgtaattcggctgagaaacatgttgctgagatgcaatcctcagtgttctctgtatgtaaatctgtgtatacaccacacgttacaactgcatgagcttcctctcgcacaagaccagctggaactgagcatgagacgctgtcaaatacagacaaaggatttgagatgttctcaataaaaagaaaatgtttcact

SEQ ID NO: 1192 - DNA, 704 bp, Homo sapiens
  source 1..704: mol_type = unassigned DNA
aaatgtcgctgttcagtgcgttgatcgattctcacatctgaagccagctgtgtattcttgagtggagcctttcaggctggcatggagagcttaaggggcaactgaaggagacacactggccaagcgcggagttctgcttacttcagtcctgctgagatactctctcagtccgctcgcaccgaaggaagctgccttgggatcagagcagacataaagctagaaaaatttcaagacagaaacagtctccgccagtcaagaaaccctcaaaagtattttgccatggatatagaagatgaagaaaacatgagttccagcagcactgatgtgaaggaaaaccgcaatctggacaacgtgtcccccaaggatggcagcacacctgggcctggcgagggctctcagctctccaatgggggtggtggtggccccggcagaaagcggcccctggaggagggcagcaatggccactccaagtaccgcctgaagaaaaggaggaaaacaccagggcccgtcctccccaagaacgccctgatgcagctgaatgagatcaagcctggtttgcagtacacactcctgtcccagactgggcccgtgcacgcgcctttgtttgtcatgtctgtggaggtgaatggccaggtttttgagggctctggtcccacaaagaaaaaggcaaaactccatgctgctgagaaggccttgaggtcttt

SEQ ID NO: 1193 - DNA, 5033 bp, Homo sapiens
  source 1..5033: mol_type = unassigned DNA
gcggcggcggcggcggcggcggcagcggcggccaagcggccaggttggcggccggggctccgggccgcgcgaggccacggccacgccgcgccgctgcgcacaaccaacgaggcagagcgccgcccggcgcgagactgcggccgaagcgtggggcgcgcgtgcggaggaccaggcgcggcgcggctgcggctgagagtggagcctttcaggctggcatggagagcttaaggggcaactgaaggagacacactggccaagcgcggagttctgcttacttcagtcctgctgagatactctctcagtccgctcgcaccgaaggaagctgccttgggatcagagcagacataaagctagaaaaatttcaagacagaaacagtctccgccagtcaagaaaccctcaaaagtattttgccatggatatagaagatgaagaaaacatgagttccagcagcactgatgtgaaggaaaaccgcaatctggacaacgtgtcccccaaggatggcagcacacctgggcctggcgagggctctcagctctccaatgggggtggtggtggccccggcagaaagcggcccctggaggagggcagcaatggccactccaagtaccgcctgaagaaaaggaggaaaacaccagggcccgtcctccccaagaacgccctgatgcagctgaatgagatcaagcctggtttgcagtacacactcctgtcccagactgggcccgtgcacgcgcctttgtttgtcatgtctgtggaggtgaatggccaggtttttgagggctctggtcccacaaagaaaaaggcaaaactccatgctgctgagaaggccttgaggtctttcgttcagtttcctaatgcctctgaggcccacctggccatggggaggaccctgtctgtcaacacggacttcacatctgaccaggccgacttccctgacacgctcttcaatggttttgaaactcctgacaaggcggagcctcccttttacgtgggctccaatggggatgactccttcagttccagcggggacctcagcttgtctgcttccccggtgcctgccagcctagcccagcctcctctccctgtcttaccaccattcccacccccgagtgggaagaatcccgtgatgatcttgaacgaactgcgcccaggactcaagtatgacttcctctccgagagcggggagagccatgccaagagcttcgtcatgtctgtggtcgtggatggtcagttctttgaaggctcggggagaaacaagaagcttgccaaggcccgggctgcgcagtctgccctggccgccatttttaacttgcacttggatcagacgccatctcgccagcctattcccagtgagggtcttcagctgcatttaccgcaggttttagctgacgctgtctcacgcctggtcctgggtaagtttggtgacctgaccgacaacttctcctcccctcacgctcgcagaaaagtgctggctggagtcgtcatgacaacaggcacagatgttaaagatgccaaggtgataagtgtttctacaggaacaaaatgtattaatggtgaatacatgagtgatcgtggccttgcattaaatgactgccatgcagaaataatatctcggagatccttgctcagatttctttatacacaacttgagctttacttaaataacaaagatgatcaaaaaagatccatctttcagaaatcagagcgaggggggtttaggctgaaggagaatgtccagtttcatctgtacatcagcacctctccctgtggagatgccagaatcttctcaccacatgagccaatcctggaagggtctcgctcttacacccaggctggagtgcagtggtgcaatcatggctcactgcagcctcgacctcctgggctcttaagcgatccttccacctcaaccttccaaggagctgggactacagaaccagcagatagacacccaaatcgtaaagcaagaggacagctacggaccaaaatagagtctggtgaggggacgattccagtgcgctccaatgcgagcatccaaacgtgggacggggtgctgcaaggggagcggctgctcaccatgtcctgcagtgacaagattgcacgctggaacgtggtgggcatccagggatccctgctcagcattttcgtggagcccatttacttctcgagcatcatcctgggcagcctttaccacggggaccacctttccagggccatgtaccagcggatctccaacatagaggacctgccacctctctacaccctcaacaagcctttgctcagtggcatcagcaatgcagaagcacggcagccagggaaggcccccaacttcagtgtcaactggacggtaggcgactccgctattgaggtcatcaacgccacgactgggaaggatgagctgggccgcgcgtcccgcctgtgtaagcacgcgttgtactgtcgctggatgcgtgtgcacggcaaggttccctcccacttactacgctccaagattaccaagcccaacgtgtaccatgagtccaagctggcggcaaaggagtaccaggccgccaaggcgcgtctgttcacagccttcatcaaggcggggctgggggcctgggtggagaagcccaccgagcaggaccagttctcactcacgccctgacccgggcagacatgatggggggtgcagggggctgtgggcatccagcgtcatcctccagaacctcacatctgaactgggggcaggtgcataccttggggagggagtagggggacacgggggaccaccaggtgtccacggttgtccccagcatctcacatcagacctggggcaggtgcgcagtgtggggaggggatggggtgcgtcagggcccagcatcgccgcctggcatctctctgccgcagcatttccccttctgaaccgtccagtgactgctttcaatctcggtttacgtttagaaattgagttctactgagtagggcttccttaagtttaggaaaatagaaattactttgtgtgaaattcttgaataaataatttattcagagctaggaatgtggtttataaaataggaagtaattgtgtcaggtcacttttatgccacattattttaattgcaaaaaagcatctatatatggaggagggtgggaaaatagaggtaggaaatagtagcctaaaggaaatcgccacacgtctgtctaaacttaggtctcttttctccgtaggtacctccctgggtagttccacacactaggttgtaacagtctctccctgaggagcagactcccagcatggtgtagcgtggccctgtcatgcacatggggtcccgcagcagtgactgtgtgtcctgcagaggcgtgacccaggcccctgtagccctcagcctcctctagaagcttctgtactccttgtaggatcagatcatggaaaacttttctcagtttacttctaagtaatcacagataatacatggccagtaatcccaggctggccattcattcaggttttttaaaggatatttaacttttatggactagaaggaatcacgagggctactgcacaatacatggcctaagttccctctgttccttcctctgaatcgaatggatgtgggtgaccgcccgaaggccttcacaggatggaagtagaatgatttcagtagatactcattcttggaaaatgccatagttttaaattattgtttccagctttatcaaagacatgtttgaaaaataaaaagcatccaagtgagagctggtgagaccacgtgctgctggcgtagtgtaggccagacattgacagtcctgacgggagctcagggctgcccagcgcccagcgtgcacgggacggccccacgacagagggagtcagcccgggaggtcaggagcgcggcgggcgagggccctgtgtggaccacctccaccaagctcagagatttgcaccaggtgccttgttgcctccgctcaggatgaaagaggagctgagagaagtgctctgcctgccagtgcagtgcccagctccaaggctctagagggtgttcaggtacactgaggaggggacggctccgtcttcacattgtgcacagatctgaggatgggattagcgaagctgtggagactgcacatccggacctgcccatgtctcaaaacaaacacatgtacagtggctctttttccttctcaaacactttaccccagaagcaggtggtctgccccaggcataaagaaggaaaattggccatctttcccacctctaaattctgtaaaattatagacttgctcaaaagattcctttttatcatccccacgctgtgtaagtggaaagggcattgtgttccgtgtgtgtccagtttacagcgtctctgccccctagcgtgttttgtgacaatctccctgggtgaggagtgggtgcacccagccccgaggccagtggttgctcggggccttccgtgtgagttctagtgttcacttgatgccggggaatagaattagagaaaactctgacctgccgggttccagggactggtggaggtggatggcaggtccgactcgaccatgacttagttgtaagggtgtgtcggctttttcagtctcatgtgaaaatcctcctgtctctggcagcactgtctgcactttcttgtttactgtttgaagggacgagtaccaagccacaagaacacttcttttggccacagcataagctgatggtatgtaaggaaccgatgggccattaaacatgaactgaacggttaaaagcacagtctatggaacgctaatggagtcagcccctaaagctgtttgctttttcaggctttggattacatgcttttaatttgattttagaatctggacactttctatgaatgtaattcggctgagaaacatgttgctgagatgcaatcctcagtgttctctgtatgtaaatctgtgtatacaccacacgttacaactgcatgagcttcctctcgcacaagaccagctggaactgagcatgagacgctgtcaaatacagacaaaggatttgagatgttctcaataaaaagaaaatgtttcacta

SEQ ID NO: 1194 - DNA, 7027 bp, Homo sapiens
  source 1..7027: mol_type = unassigned DNA
ctgaggcgctgaggcggccgtggcggcggcggcggcggcggcggcagcggcggccaagcggccaggttggcggccggggctccgggccgcgcgaggccacggccacgccgcgccgctgcgcacaaccaacgaggcagagcgccgcccggcgcgagactgcggccgaagcgtggggcgcgcgtgcggaggaccaggcgcggcgcggctgcggctgagagtggagcctttcaggctggcatggagagcttaaggggcaactgaaggagacacactggccaagcgcggagttctgcttacttcagtcctgctgagatactctctcagtccgctcgcaccgaaggaagctgccttgggatcagagcagacataaagctagaaaaatttcaagacagaaacagtctccgccagtcaagaaaccctcaaaagtattttgccatggatatagaagatgaagaaaacatgagttccagcagcactgatgtgaaggaaaaccgcaatctggacaacgtgtcccccaaggatggcagcacacctgggcctggcgagggctctcagctctccaatgggggtggtggtggccccggcagaaagcggcccctggaggagggcagcaatggccactccaagtaccgcctgaagaaaaggaggaaaacaccagggcccgtcctccccaagaacgccctgatgcagctgaatgagatcaagcctggtttgcagtacacactcctgtcccagactgggcccgtgcacgcgcctttgtttgtcatgtctgtggaggtgaatggccaggtttttgagggctctggtcccacaaagaaaaaggcaaaactccatgctgctgagaaggccttgaggtctttcgttcagtttcctaatgcctctgaggcccacctggccatggggaggaccctgtctgtcaacacggacttcacatctgaccaggccgacttccctgacacgctcttcaatggttttgaaactcctgacaaggcggagcctcccttttacgtgggctccaatggggatgactccttcagttccagcggggacctcagcttgtctgcttccccggtgcctgccagcctagcccagcctcctctccctgtcttaccaccattcccacccccgagtgggaagaatcccgtgatgatcttgaacgaactgcgcccaggactcaagtatgacttcctctccgagagcggggagagccatgccaagagcttcgtcatgtctgtggtcgtggatggtcagttctttgaaggctcggggagaaacaagaagcttgccaaggcccgggctgcgcagtctgccctggccgccatttttaacttgcacttggatcagacgccatctcgccagcctattcccagtgagggtcttcagctgcatttaccgcaggttttagctgacgctgtctcacgcctggtcctgggtaagtttggtgacctgaccgacaacttctcctcccctcacgctcgcagaaaagtgctggctggagtcgtcatgacaacaggcacagatgttaaagatgccaaggtgataagtgtttctacaggaacaaaatgtattaatggtgaatacatgagtgatcgtggccttgcattaaatgactgccatgcagaaataatatctcggagatccttgctcagatttctttatacacaacttgagctttacttaaataacaaagatgatcaaaaaagatccatctttcagaaatcagagcgaggggggtttaggctgaaggagaatgtccagtttcatctgtacatcagcacctctccctgtggagatgccagaatcttctcaccacatgagccaatcctggaagggtctcgctcttacacccaggctggagtgcagtggtgcaatcatggctcactgcagcctcgacctcctgggctcttaagcgatccttccacctcaaccttccaaggagctgggactacagaaccagcagatagacacccaaatcgtaaagcaagaggacagctacggaccaaaatagagtctggtgaggggacgattccagtgcgctccaatgcgagcatccaaacgtgggacggggtgctgcaaggggagcggctgctcaccatgtcctgcagtgacaagattgcacgctggaacgtggtgggcatccagggatccctgctcagcattttcgtggagcccatttacttctcgagcatcatcctgggcagcctttaccacggggaccacctttccagggccatgtaccagcggatctccaacatagaggacctgccacctctctacaccctcaacaagcctttgctcagtggcatcagcaatgcagaagcacggcagccagggaaggcccccaacttcagtgtcaactggacggtaggcgactccgctattgaggtcatcaacgccacgactgggaaggatgagctgggccgcgcgtcccgcctgtgtaagcacgcgttgtactgtcgctggatgcgtgtgcacggcaaggttccctcccacttactacgctccaagattaccaagcccaacgtgtaccatgagtccaagctggcggcaaaggagtaccaggccgccaaggcgcgtctgttcacagccttcatcaaggcggggctgggggcctgggtggagaagcccaccgagcaggaccagttctcactcacgccctgacccgggcagacatgatggggggtgcagggggctgtgggcatccagcgtcatcctccagaacctcacatctgaactgggggcaggtgcataccttggggagggagtagggggacacgggggaccaccaggtgtccacggttgtccccagcatctcacatcagacctggggcaggtgcgcagtgtggggaggggatggggtgcgtcagggcccagcatcgccgcctggcatctctctgccgcagcatttccccttctgaaccgtccagtgactgctttcaatctcggtttacgtttagaaattgagttctactgagtagggcttccttaagtttaggaaaatagaaattactttgtgtgaaattcttgaataaataatttattcagagctaggaatgtggtttataaaataggaagtaattgtgtcaggtcacttttatgccacattattttaattgcaaaaaagcatctatatatggaggagggtgggaaaatagaggtaggaaatagtagcctaaaggaaatcgccacacgtctgtctaaacttaggtctcttttctccgtaggtacctccctgggtagttccacacactaggttgtaacagtctctccctgaggagcagactcccagcatggtgtagcgtggccctgtcatgcacatggggtcccgcagcagtgactgtgtgtcctgcagaggcgtgacccaggcccctgtagccctcagcctcctctagaagcttctgtactccttgtaggatcagatcatggaaaacttttctcagtttacttctaagtaatcacagataatacatggccagtaatcccaggctggccattcattcaggttttttaaaggatatttaacttttatggactagaaggaatcacgagggctactgcacaatacatggcctaagttccctctgttccttcctctgaatcgaatggatgtgggtgaccgcccgaaggccttcacaggatggaagtagaatgatttcagtagatactcattcttggaaaatgccatagttttaaattattgtttccagctttatcaaagacatgtttgaaaaataaaaagcatccaagtgagagctggtgagaccacgtgctgctggcgtagtgtaggccagacattgacagtcctgacgggagctcagggctgcccagcgcccagcgtgcacgggacggccccacgacagagggagtcagcccgggaggtcaggagcgcggcgggcgagggccctgtgtggaccacctccaccaagctcagagatttgcaccaggtgccttgttgcctccgctcaggatgaaagaggagctgagagaagtgctctgcctgccagtgcagtgcccagctccaaggctctagagggtgttcaggtgggtctcctggggccatggggagagattggtgcagaccttaccccacagcatacacctgccacagcgaaatccagggtgttggcacctgtgtgtccgtgatgagcctaggaaaccagagcaggggcagaggggcgtcatcctcccaccggacgctgggagctcagaccccaaaactgaaacaccgtggcttcggcggggggtgtgcctcctgatgtcaggagccccatccacgtgtgtccacacagatctcgtcgcagcacggcaggaaggggtgctgcttagggctcattgttggggacatgaccgggttcagcggctagaacatctgccccacagcagcctcctcctccaccgaagagggtagttgtctccctgaagcagtcacagcaggcgtctctgccgctccgtcaccacagtggggttttgttcaggcagatcgcgctggggttctgcacctgcagaaggagaggggtctgttgtcgctggctttcccccaagcaggctcttgcacactctagaaaaaacaccttgtaagtctgtgcatttttattgtcttgataaattgtatttttttctaatggggattgggagatggacttcgtttttaaaaatatgtggattttggttaccaagtttagtgttaatatattccatatacatacaaaactacccggtatgtctggcttttcccttctgtcaggtaatagctaaagtcagcatgattgctccctgtaccaccccaaataagtgagtgcctcaccttgtggggcctgagcagctaccttgagaccatgtgaggtggcacctttccggggtggactcgtgcggccttgaggacaggcacagggcaccctatcccaagccgtccaggcaggaggaaggcagccaaggcaactgggttctgggagccctgggtggggcagctgtggggaggaactgggttcggggagccctgggcggggcggctgttggggggaactgggttcggggtgccctgggcagggggctactggggggcggctgtgaggaggagttgggttcagggagccctgggcggggtggctgtcagggggaactgggttccgggagccctgggccggggcagggggcggctgtaggaaggaactggtttcggggagccctgggcggggcggctgtggggaggaaggtgacgtgcaggggaccagaggctctgcactgctcctaggacagctcatctgtaatcagaaaaaaaataaacaaaatacagaacgctgactcctccgtgagacagatcggggaccttagcactttaatccctcccttctgagcgctcggtgtgcacttttagactatagctgtttcattgacgtgtcactctccatccagtgtccttgatgtggcttttagagacttagcagaaaattcgacacaagcaggaacttgattttttaagaaaaaatattacattttgaggacattttgacaagtaggggaagagagggcttctgttgttttgttttgttttgttttgttaactaaacctgaagtattaattccacaaagacactgtccctcaggaccactcaggtacagctctgccagggacagagtcctgctagtgggaggtctcaggtggggcggtgtgttctgtgccatgaggcagcgacaggtccagatggatgtcgtcaccaccttcctcagctctcatcacctggtcgtacgccaggcccacctcttcccagcaagggacgccaaagaactgcagtttttattctgagtcttaatttaacttttcatcatcttttcctattttggagaattttttgtaattaaaagcaattattttaaaatgtgcaagccagtatctcacaaggcatggatttctgtggaatttatttttattcaaataaccatatttatctccaggctgtggaatcgccactttctttgtgaagacagtgtctctccttgtaatctcacacaggtacactgaggaggggacggctccgtcttcacattgtgcacagatctgaggatgggattagcgaagctgtggagactgcacatccggacctgcccatgtctcaaaacaaacacatgtacagtggctctttttccttctcaaacactttaccccagaagcaggtggtctgccccaggcataaagaaggaaaattggccatctttcccacctctaaattctgtaaaattatagacttgctcaaaagattcctttttatcatccccacgctgtgtaagtggaaagggcattgtgttccgtgtgtgtccagtttacagcgtctctgccccctagcgtgttttgtgacaatctccctgggtgaggagtgggtgcacccagccccgaggccagtggttgctcggggccttccgtgtgagttctagtgttcacttgatgccggggaatagaattagagaaaactctgacctgccgggttccagggactggtggaggtggatggcaggtccgactcgaccatgacttagttgtaagggtgtgtcggctttttcagtctcatgtgaaaatcctcctgtctctggcagcactgtctgcactttcttgtttactgtttgaagggacgagtaccaagccacaagaacacttcttttggccacagcataagctgatggtatgtaaggaaccgatgggccattaaacatgaactgaacggttaaaagcacagtctatggaacgctaatggagtcagcccctaaagctgtttgctttttcaggctttggattacatgcttttaatttgattttagaatctggacactttctatgaatgtaattcggctgagaaacatgttgctgagatgcaatcctcagtgttctctgtatgtaaatctgtgtatacaccacacgttacaactgcatgagcttcctctcgcacaagaccagctggaactgagcatgagacgctgtcaaatacagacaaaggatttgagatgttctcaataaaaagaaaatgtttcactactc

SEQ ID NO: 1195 - DNA, 5056 bp, Homo sapiens
  source 1..5056: mol_type = unassigned DNA
ctgaggcgctgaggcggccgtggcggcggcggcggcggcggcggcagcggcggccaagcggccaggttggcggccggggctccgggccgcgcgaggccacggccacgccgcgccgctgcgcacaaccaacgaggcagagcgccgcccggcgcgagactgcggccgaagcgtggggcgcgcgtgcggaggaccaggcgcggcgcggctgcggctgagagtggagcctttcaggctggcatggagagcttaaggggcaactgaaggagacacactggccaagcgcggagttctgcttacttcagtcctgctgagatactctctcagtccgctcgcaccgaaggaagctgccttgggatcagagcagacataaagctagaaaaatttcaagacagaaacagtctccgccagtcaagaaaccctcaaaagtattttgccatggatatagaagatgaagaaaacatgagttccagcagcactgatgtgaaggaaaaccgcaatctggacaacgtgtcccccaaggatggcagcacacctgggcctggcgagggctctcagctctccaatgggggtggtggtggccccggcagaaagcggcccctggaggagggcagcaatggccactccaagtaccgcctgaagaaaaggaggaaaacaccagggcccgtcctccccaagaacgccctgatgcagctgaatgagatcaagcctggtttgcagtacacactcctgtcccagactgggcccgtgcacgcgcctttgtttgtcatgtctgtggaggtgaatggccaggtttttgagggctctggtcccacaaagaaaaaggcaaaactccatgctgctgagaaggccttgaggtctttcgttcagtttcctaatgcctctgaggcccacctggccatggggaggaccctgtctgtcaacacggacttcacatctgaccaggccgacttccctgacacgctcttcaatggttttgaaactcctgacaaggcggagcctcccttttacgtgggctccaatggggatgactccttcagttccagcggggacctcagcttgtctgcttccccggtgcctgccagcctagcccagcctcctctccctgtcttaccaccattcccacccccgagtgggaagaatcccgtgatgatcttgaacgaactgcgcccaggactcaagtatgacttcctctccgagagcggggagagccatgccaagagcttcgtcatgtctgtggtcgtggatggtcagttctttgaaggctcggggagaaacaagaagcttgccaaggcccgggctgcgcagtctgccctggccgccatttttaacttgcacttggatcagacgccatctcgccagcctattcccagtgagggtcttcagctgcatttaccgcaggttttagctgacgctgtctcacgcctggtcctgggtaagtttggtgacctgaccgacaacttctcctcccctcacgctcgcagaaaagtgctggctggagtcgtcatgacaacaggcacagatgttaaagatgccaaggtgataagtgtttctacaggaacaaaatgtattaatggtgaatacatgagtgatcgtggccttgcattaaatgactgccatgcagaaataatatctcggagatccttgctcagatttctttatacacaacttgagctttacttaaataacaaagatgatcaaaaaagatccatctttcagaaatcagagcgaggggggtttaggctgaaggagaatgtccagtttcatctgtacatcagcacctctccctgtggagatgccagaatcttctcaccacatgagccaatcctggaagggtctcgctcttacacccaggctggagtgcagtggtgcaatcatggctcactgcagcctcgacctcctgggctcttaagcgatccttccacctcaaccttccaaggagctgggactacagaaccagcagatagacacccaaatcgtaaagcaagaggacagctacggaccaaaatagagtctggtgaggggacgattccagtgcgctccaatgcgagcatccaaacgtgggacggggtgctgcaaggggagcggctgctcaccatgtcctgcagtgacaagattgcacgctggaacgtggtgggcatccagggatccctgctcagcattttcgtggagcccatttacttctcgagcatcatcctgggcagcctttaccacggggaccacctttccagggccatgtaccagcggatctccaacatagaggacctgccacctctctacaccctcaacaagcctttgctcagtggcatcagcaatgcagaagcacggcagccagggaaggcccccaacttcagtgtcaactggacggtaggcgactccgctattgaggtcatcaacgccacgactgggaaggatgagctgggccgcgcgtcccgcctgtgtaagcacgcgttgtactgtcgctgggcgtgtgcacggcaaggttccctcccacttactacgctccaagattaccaagcccaacgtgtaccatgagtccaagctggcggcaaaggagtaccaggccgccaaggcgcgtctgttcacagccttcatcaaggcggggctgggggcctgggtggagaagcccaccgagcaggaccagttctcactcacgccctgacccgggcagacatgatggggggtgcagggggctgtgggcatccagcgtcatcctccagaacctcacatctgaactgggggcaggtgcataccttggggagggagtagggggacacgggggaccaccaggtgtccacggttgtccccagcatctcacatcagacctggggcaggtgcgcagtgtggggaggggatggggtgcgtcagggcccagcatcgccgcctggcatctctctgccgcagcatttccccttctgaaccgtccagtgactgctttcaatctcggtttacgtttagaaattgagttctactgagtagggcttccttaagtttaggaaaatagaaattactttgtgtgaaattcttgaataaataatttattcagagctaggaatgtggtttataaaataggaagtaattgtgtcaggtcacttttatgccacattattttaattgcaaaaaagcatctatatatggaggagggtgggaaaatagaggtaggaaatagtagcctaaaggaaatcgccacacgtctgtctaaacttaggtctcttttctccgtaggtacctccctgggtagttccacacactaggttgtaacagtctctccctgaggagcagactcccagcatggtgtagcgtggccctgtcatgcacatggggtcccgcagcagtgactgtgtgtcctgcagaggcgtgacccaggcccctgtagccctcagcctcctctagaagcttctgtactccttgtaggatcagatcatggaaaacttttctcagtttacttctaagtaatcacagataatacatggccagtaatcccaggctggccattcattcaggttttttaaaggatatttaacttttatggactagaaggaatcacgagggctactgcacaatacatggcctaagttccctctgttccttcctctgaatcgaatggatgtgggtgaccgcccgaaggccttcacaggatggaagtagaatgatttcagtagatactcattcttggaaaatgccatagttttaaattattgtttccagctttatcaaagacatgtttgaaaaataaaaagcatccaagtgagagctggtgagaccacgtgctgctggcgtagtgtaggccagacattgacagtcctgacgggagctcagggctgcccagcgcccagcgtgcacgggacggccccacgacagagggagtcagcccgggaggtcaggagcgcggcgggcgagggccctgtgtggaccacctccaccaagctcagagatttgcaccaggtgccttgttgcctccgctcaggatgaaagaggagctgagagaagtgctctgcctgccagtgcagtgcccagctccaaggctctagagggtgttcaggtacactgaggaggggacggctccgtcttcacattgtgcacagatctgaggatgggattagcgaagctgtggagactgcacatccggacctgcccatgtctcaaaacaaacacatgtacagtggctctttttccttctcaaacactttaccccagaagcaggtggtctgccccaggcataaagaaggaaaattggccatctttcccacctctaaattctgtaaaattatagacttgctcaaaagattcctttttatcatccccacgctgtgtaagtggaaagggcattgtgttccgtgtgtgtccagtttacagcgtctctgccccctagcgtgttttgtgacaatctccctgggtgaggagtgggtgcacccagccccgaggccagtggttgctcggggccttccgtgtgagttctagtgttcacttgatgccggggaatagaattagagaaaactctgacctgccgggttccagggactggtggaggtggatggcaggtccgactcgaccatgacttagttgtaagggtgtgtcggctttttcagtctcatgtgaaaatcctcctgtctctggcagcactgtctgcactttcttgtttactgtttgaagggacgagtaccaagccacaagaacacttcttttggccacagcataagctgatggtatgtaaggaaccgatgggccattaaacatgaactgaacggttaaaagcacagtctatggaacgctaatggagtcagcccctaaagctgtttgctttttcaggctttggattacatgcttttaatttgattttagaatctggacactttctatgaatgtaattcggctgagaaacatgttgctgagatgcaatcctcagtgttctctgtatgtaaatctgtgtatacaccacacgttacaactgcatgagcttcctctcgcacaagaccagctggaactgagcatgagacgctgtcaaatacagacaaaggatttgagatgttctcaataaaaagaaaatgtttcactactc

SEQ ID NO: 1196 - DNA, 703 bp, Homo sapiens
  source 1..703: mol_type = unassigned DNA
agaaaagagagcagcatttgttagcacacatgggcctgtggagcccagtcccaggcaacagtgtccccagagccccagtgatggctgggttgggtctggggcactcccagggagctccccaaggtggaacgtcctggggctgcagggcgcgctcctgtcccacttcgtggagcccgtgtacctgcagagcatcgtggtgggcagcctgcaccacacgggccacctcgcacgcgtcatgagccaccgcatggagggtgtcggccagctgcccgcctcctaccggcacaaccggcctctcctcagcggcgtgagtgacgccgaggcgcgccagccggggaagtcgccccccttcagcatgaactgggtcgtgggcagcgcggacctggagattatcaacgccaccactgggcggaggagctgtgggggcccatcccggctctgcaagcacgtgctgtctgcacggtgggcgcggctgtatggcaggctgagcacacggacacccagccctggagacacgccctccatgtactgtgaggccaagctgggggcgcacacctaccagtctgtgaaacagcagctgttcaaggcctttcagaaggctggcctgggcacctgggtgaggaaaccaccggagcagcagcagtttctactgactctctaggctgcgggctcctggctgctggagctgagcgggacgctggag

SEQ ID NO: 1197 - DNA, 1810 bp, Homo sapiens
  source 1..1810: mol_type = unassigned DNA
acacatgggcctgtggagcccagtcccaggcaacagtgtccccagagccccagtgatggctgggttgggtctggggcactcccagggagctccccaaggtccgcacgatgggaagactgacaggtcctcaggaccaggccgcagacggacagagaggaccaggctccctgggctcctgggtggggctccgctgactgctggctctccccacaggtggaacgtcctggggctgcagggcgcgctcctgtcccacttcgtggagcccgtgtacctgcagagcatcgtggtgggcagcctgcaccacacgggccacctcgcacgcgtcatgagccaccgcatggagggtgtcggccagctgcccgcctcctaccggcacaaccggcctctcctcagcggcgtgagtgacgccgaggcgcgccagccggggaagtcgccccccttcagcatgaactgggtcgtgggcagcgcggacctggagattatcaacgccaccactgggcggaggagctgtgggggcccatcccggctctgcaagcacgtgctgtctgcacggtgggcgcggctgtatggcaggctgagcacacggacacccagccctggagacacgccctccatgtactgtgaggccaagctgggggcgcacacctaccagtctgtgaaacagcagctgttcaaggcctttcagaaggctggcctgggcacctgggtgaggaaaccaccggagcagcagcagtttctactgactctctaggctgcgggctcctggctgctggagctgagcgggacgctggagggatgggaccgtgtctggggggcgacgtggcgggtcggccggttccctgcattcgttttactttggtgtcccagaaacacgcgagtgtgcaatgtttggacgagcaacaacacaaattcagaacgtgcctctttccagatcgctggccccagaaccctgtcccccacacccaggggcacatgcactgttgagttagcgccgactcttcctgtggagtctgagggaggggctccattcaggcaaaggggttttagctgcagccttggaaggaggcaccgacacgacaccaggcaggagtgagcctcaggccccgtccctgcaccccacccctgcgtgcgcctcttggtgatgctggggtctcactagcttgagggggcacatgaagataagccacaaatgaagagaaaagccatgcccaccccagccccagagaaaccaataagaatcctctattattttcactattcatttaggtttttatactccacctcctttcaaaaaagatttaagatgtacgacattaccgaacacctaaaatagaaccagagaaacgaaagccattcccacaaagtgaaggaacagtttccaaaacccctgcgaggcagagttaagacctgtgacgtggggagcctggaaacacccggcccacgcgtgctgcagatgtggggagcctggaaacacccggcccacgcgtgctgcagatgtggggagcctggaaacacccggcccacgcgtgctgcagatgtggggagtctggaaacacccggcccacgcgtgctgcagatgtggggagcccggaaacacctggcccatgcctgttcagtccgtcatggcgtttggtttatggtggccgatactaagagccactgaggtctgggttgtgtaagggttagctaccaccctataacctccctaccaggtaataaggagaccaagtctttgatcaaattctgattttttaactaaattttcattagaaagcaagcacaaaataaaatcaaaacaacctttaccttc

SEQ ID NO: 1198 - DNA, 3606 bp, Homo sapiens
  source 1..3606: mol_type = unassigned DNA
tgcgctgggagcccagagcaggaggcagagcccgcgggaagctcggagcactcaggacgccgcgcgcccttccccgccctccctgaccagggagcagctcgctccaggcgcccagccgaggcccccagcccagtgggagcaagtcatagagaacaattcgagagacagagagacggagcgcgctttcctgctcagtcctgaaaagtgagccgctcccgggtttgcaacctcaagcttcgcagcagcggcggcggcggctgccgggaaggaggcaggtgcaggtgcaggagggaggcggctctgggctccgcgcctgggtctcggccatggcctcggtcctggggagcggcagagggtctggagggctgagcagtcaactcaaatgcaagtccaagaggaggaggaggcggaggtccaagcggaaagataaagtaagcatattgtcaaccttcctcgctcctttcaagcacctgagtcctggcatcacaaacacggaggatgacgacaccctcagtaccagcagcgcggaggtgaaggagaaccgcaacgtgggcaacctggccgcgcggccaccgccctccggggaccgggcccggggcggcgcgcccggcgcgaagaggaagcggccgctggaggaggggaatgggggccacttgtgcaaactgcagctggtctggaagaagctgtcgtggtcggtggcgcccaagaacgcgctggtgcagctgcacgagctgaggccgggcctgcagtaccggacagtgtcgcagacgggcccggtgcatgccccggtcttcgcggtagcggtggaggtgaacgggctcacgttcgagggcacaggccccaccaagaagaaggccaagatgcgcgcggcggagctggcactcaggtccttcgtgcagttccccaacgcctgccaggcgcacctggccatgggcgggggcccgggccccggcacggacttcacctccgaccaggccgatttccccgacacgctcttccaggagttcgagcccccggcgccgcgccccggactcgcgggaggccgccccggggacgccgcgcttctgtccgcggcctacgggcgacggcggctgctgtgccgcgcgctggacctggtgggcccgacccccgccacccccgcggccccgggcgagcgcaaccccgtggtgctgctgaaccgcctgcgcgccgggctgcgctacgtgtgtctggcagaaccggccgagcggcgcgcgcggagcttcgtgatggccgtgagcgtggacggcaggacgttcgagggctcggggcgcagcaagaagctggcccggggtcaggccgcgcaggccgcactgcaggagctgttcgacatccagatgcccggccacgcgcccggcagggccaggaggacgccaatgccgcaggaattcgcagactccatatcccagctggtcacacagaagttccgcgaggtgacgacggacctcacgcccatgcacgcccgccataaagcgctggcaggaatcgtcatgaccaaaggcctggatgctcggcaggcgcaggtcgtggccctgtcctcggggaccaagtgcatcagcggcgagcacctcagtgaccaggggctggtggtgaatgactgccacgcggaggtcgtggcccggcgggcgttcctgcacttcctctacacgcagctggagctgcacctgagcaagcggcgcgaggactcagagcgatcgatattcgtgcggttaaaagaaggtggctaccggctgcgagagaacatcctcttccatctctacgtgagcacctccccctgtggagacgcaagactccactctccctacgagatcaccacagacctgcacagcagcaaacacctcgtcaggaagttccgcgggcacctgcgcaccaagatcgagtccggggaagggacggtccccgtgcgtggccccagcgcagtgcagacctgggacggcgtcctgctgggggagcagctgatcaccatgtcctgcacggacaagatcgccaggtggaacgtcctggggctgcagggcgcgctcctgtcccacttcgtggagcccgtgtacctgcagagcatcgtggtgggcagcctgcaccacacgggccacctcgcacgcgtcatgagccaccgcatggagggtgtcggccagctgcccgcctcctaccggcacaaccggcctctcctcagcggcgtgagtgacgccgaggcgcgccagccggggaagtcgccccccttcagcatgaactgggtcgtgggcagcgcggacctggagattatcaacgccaccactgggcggaggagctgtgggggcccatcccggctctgcaagcacgtgctgtctgcacggtgggcgcggctgtatggcaggctgagcacacggacacccagccctggagacacgccctccatgtactgtgaggccaagctgggggcgcacacctaccagtctgtgaaacagcagctgttcaaggcctttcagaaggctggcctgggcacctgggtgaggaaaccaccggagcagcagcagtttctactgactctctaggctgcgggctcctggctgctggagctgagcgggacgctggagggatgggaccgtgtctggggggcgacgtggcgggtcggccggttccctgcattcgttttactttggtgtcccagaaacacgcgagtgtgcaatgtttggacgagcaacaacacaaattcagaacgtgcctctttccagatcgctggccccagaaccctgtcccccacacccaggggcacatgcactgttgagttagcgccgactcttcctgtggagtctgagggaggggctccattcaggcaaaggggttttagctgcagccttggaaggaggcaccgacacgacaccaggcaggagtgagcctcaggccccgtccctgcaccccacccctgcgtgcgcctcttggtgatgctggggtctcactagcttgagggggcacatgaagataagccacaaatgaagagaaaagccatgcccaccccagccccagagaaaccaataagaatcctctattattttcactattcatttaggtttttatactccacctcctttcaaaaaagatttaagatgtacgacattaccgaacacctaaaatagaaccagagaaacgaaagccattcccacaaagtgaaggaacagtttccaaaacccctgcgaggcagagttaagacctgtgacgtggggagcctggaaacacccggcccacgcgtgctgcagatgtggggagcctggaaacacccggcccacgcgtgctgcagatgtggggagcctggaaacacccggcccacgcgtgctgcagatgtggggagtctggaaacacccggcccacgcgtgctgcagatgtggggagcccggaaacacctggcccatgcctgttcagtccgtcatggcgtttggtttatggtggccgatactaagagccactgaggtctgggttgtgtaagggttagctaccaccctataacctccctaccaggtaataaggagaccaagtctttgatcaaattctgattttttaactaaattttcattagaaagcaagcacaaaataaaatcaaaacaacctttaccttca

SEQ ID NO: 1199 - DNA, 1869 bp, Homo sapiens
  source 1..1869: mol_type = unassigned DNA
gtgacgtcacgtccgccttaccggcggattaagctcgctttcttctaggcgcgtttcctgaaggtcgatggccaggtggtcttcataaactatactgccttgtgatgcctccctagaaatgagaggtctcaataccagctcagaccatgtggaccgcggatgagattgctcagctatgctatgaacactatgggatcaggctgcccaagaaggggaagcctgagccaaaccatgagtggacattattggcagcggtggtgaagatacaatctccagctgacaaggcctgcgacacccctgataagccggtgcaagtgacaaaggaagttgtgtcaatgggaacaggaacaaaatgcataggacagtccaaaatgaggaagaacggagacatcctcaatgatagccatgctgaggtcatagccagaaggagtttccaaaggtaccttctccaccaactccagttggcagccaccctgaaagaggatagcatctttgtcccaggaactcaaaaaggagtgtggaaacttagacgagacctcatttttgtgtttttctccagccatacaccctgtggggatgcctccatcattccgatgcttgagtttgaagatcagccttgctgtcctgtcttcagaaattgggcccacaactcatcagtagaagccagtagtaacctggaagctcctggaaatgaaagaaaatgtgaagaccctgacagtcctgtaaccaaaaagatgaggcttgagcctgggactgcagccagggaggtcaccaacggagcagctcaccatcagagttttggcaagcagaaaagtggcccaatctcaccaggcatccacagctgtgatctcactgtagagggactggctactgtcaccagaatagcccctggtagtgccaaagtgatagacgtttatagaactggagccaagtgtgtacctggagaagctggagactccggaaagccgggtgctgcgtttcaccaggtggggctgctccgagtgaagccaggccgtggagacagaacacgctccatgtcctgtagtgacaagatggcccgatggaacgtcctcggatgccaaggggcactgttgatgcacttgctggaagagcccatctacctgtcagctgtggtcattgggaagtgcccatacagccaggaagccatgcagagagcactgattggaaggtgtcagaatgtgtctgctttaccaaaaggcttcggagttcaagaattaaaaatactgcagtcagatttactatttgaacagagccgcagtgcggtgcaggcaaaaagggctgatagcccaggtcgacttgttccttgtggggcagccatcagctggagtgcagttcctgagcagcctttggatgttactgccaatggctttccacagggaacaacaaagaaaacaattggaagccttcaggcaagatcccaaatcagcaaagtggaactcttcagatcattccagaagctgctaagcagaattgcaagggacaagtggccacactccctcagggtgcagaagctggatacctaccaggagtacaaggaggctgcgtcctcttaccaggaagcctggagcacactccggaagcaggtgtttggatcctggatcagaaacccaccggattatcaccagttcaagtgagaaggaaatgtttgctctggtagcaggacccttcatcctgaactgccttcctccacgcaggacaagtcttagcttttttggtagttaaatcagggaacattctttctgagctttgcatctctgttgtgtaatacagatggaatctggaacttagagcaagctatacttgattgaagtagctctctgctaaaatggcatctcactaatgacctca

SEQ ID NO: 1200 - DNA, 1608 bp, Homo sapiens
  source 1..1608: mol_type = unassigned DNA
accggcggattaagctcgctttcttctaggcgcgtttcctgaaggtcgatggccaggtggtcttcataaactatactgccttgtgatgcctccctagaaatgagaggtctcaataccagctcagaccatgtggacattattggcagcggtggtgaagatacaatctccagctgacaaggcctgcgacacccctgataagccggtgcaagtgacaaaggaagttgtgtcaatgggaacaggaacaaaatgcataggacagtccaaaatgaggaagaacggagacatcctcaatgatagccatgctgaggtcatagccagaaggagtttccaaaggtaccttctccaccaactccagttggcagccaccctgaaagaggatagcatctttgtcccaggaactcaaaaaggagtgtggaaacttagacgagacctcatttttgtgtttttctccagccatacaccctgtggggatgcctccatcattccgatgcttgagtttgaagatcagccttgctgtcctgtcttcagaaattgggcccacaactcatcagtagaagccagtagtaacctggaagctcctggaaatgaaagaaaatgtgaagaccctgacagtcctgtaaccaaaaagatgaggcttgagcctgggactgcagccagggaggtcaccaacggagcagctcaccatcagagttttggcaagcagaaaagtggcccaatctcaccaggcatccacagctgtgatctcactgtagagggactggctactgtcaccagaatagcccctggtagtgccaaagtgatagacgtttatagaactggagccaagtgtgtacctggagaagctggagactccggaaagccgggtgctgcgtttcaccaggtggggctgctccgagtgaagccaggccgtggagacagaacacgctccatgtcctgtagtgacaagatggcccgatggaacgtcctcggatgccaaggggcactgttgatgcacttgctggaagagcccatctacctgtcagctgtggtcattgggaagtgcccatacagccaggaagccatgcagagagcactgattggaaggtgtcagaatgtgtctgctttaccaaaaggcttcggagttcaagaattaaaaatactgcagtcagatttactatttgaacagagccgcagtgcggtgcaggcaaaaagggctgatagcccaggtcgacttgttccttgtggggcagccatcagctggagtgcagttcctgagcagcctttggatgttactgccaatggctttccacagggaacaacaaagaaaacaattggaagccttcaggcaagatcccaaatcagcaaagtggaactcttcagatcattccagaagctgctaagcagaattgcaagggacaagtggccacactccctcagggtgcagaagctggatacctaccaggagtacaaggaggctgcgtcctcttaccaggaagcctggagcacactccggaagcaggtgtttggatcctggatcagaaacccaccggattatcaccagttcaagtgagaaggaaatgtttgctctggtagcaggacccttcatcctgaactgccttcctccacgca

SEQ ID NO: 1201 - DNA, 1169 bp, Homo sapiens
  source 1..1169: mol_type = unassigned DNA
gtggatggcagaggtgggctgtagagccaaagtggggtgggagcgcgaagatggcagctgctgaggaggagccgaagcccaaaaagctgaaggtggaggcgccgcaagcgctgagagaaaatattctctttggaatgggaaatcctctgcttgacatctctgctgtagtggacaaagatttccttgataagtattctctgaaaccaaatgaccaaatcttggctgaagacaaacacaaggaactgtttgatgaacttgtgaaaaaattcaaagtcgaatatcatgctggtggctctacccagaattcaattaaagtggctcagtggatgattcaacagccacacaaagcagcaacattttttggatgcattgggatagataaatttggggagatcctgaagagaaaagctgctgaagcccatgtggatgctcattactacgagcagaatgagcagccaacaggaacttgtgctgcatgcatcactggtgacaacaggtccctcatagctaatcttgctgctgccaattgttataaaaaggaaaaacatcttgatctggagaaaaactggatgttggtagaaaaagcaagagtttgttatatagcaggcttttttcttacagtttccccagagtcagtattaaaggtggctcaccatgcttctgaaaacaacaggattttcactttgaatctatctgcaccgtttattagccagttctacaaggaatcattgatgaaagttatgccttatgttgatatactttttggaaatgagacagaagctgccacttttgctagagagcaaggctttgagactaaagacattaaagagatagccaaaaagacacaagccctgccaaagatgaactcaaagaggcagcgaatcgtgatcttcacccaagggagagatgacactataatggctacagaaagtgaagtcactgcttttgctgtcttggatcaagaccagaaagaaattattgataccaatggagctggagatgcatttgttggaggttttctgtctcaactggtctctgacaagcctctgactgaatgtatccgtgctggccactatgcagcaagcatcataattagacggactggctgcacctttcctgagaagccagacttccactgatggaagagctgaaaacacaagcccaggagt

SEQ ID NO: 1202 - DNA, 2083 bp, Homo sapiens
  source 1..2083: mol_type = unassigned DNA
cgccttccctccaatcagcacgccgggccggctagccaggggccgcccgcgcgcggggtgtgtgaggacgcgctcccagtcgctgagtgcctgagccgggaagcagttgctgtggtacctgctgctgcccgagcggacgtagagcatcggacgcgggcgccgtggcgctgggcaggagggcgaagccatgacgtcagtcagagaaaatattctctttggaatgggaaatcctctgcttgacatctctgctgtagtggacaaagatttccttgataagtattctctgaaaccaaatgaccaaatcttggctgaagacaaacacaaggaactgtttgatgaacttgtgaaaaaattcaaagtcgaatatcatgctggtggctctacccagaattcaattaaagtggctcagtggatgattcaacagccacacaaagcagcaacattttttggatgcattgggatagataaatttggggagatcctgaagagaaaagctgctgaagcccatgtggatgctcattactacgagcagaatgagcagccaacaggaacttgtgctgcatgcatcactggtgacaacaggtccctcatagctaatcttgctgctgccaattgttataaaaaggaaaaacatcttgatctggagaaaaactggatgttggtagaaaaagcaagagtttgttatatagcaggcttttttcttacagtttccccagagtcagtattaaaggtggctcaccatgcttctgaaaacaacaggattttcactttgaatctatctgcaccgtttattagccagttctacaaggaatcattgatgaaagttatgccttatgttgatatactttttggaaatgagacagaagctgccacttttgctagagagcaaggctttgagactaaagacattaaagagatagccaaaaagacacaagccctgccaaagatgaactcaaagaggcagcgaatcgtgatcttcacccaagggagagatgacactataatggctacagaaagtgaagtcactgcttttgctgtcttggatcaagaccagaaagaaattattgataccaatggagctggagatgcatttgttggaggttttctgtctcaactggtctctgacaagcctctgactgaatgtatccgtgctggccactatgcagcaagcatcataattagacggactggctgcacctttcctgagaagccagacttccactgatggaagagctgaaaacacaagcccaggagtgcagacactgccctaattgcttcctgagaattcccatattaataaagaagaaaattatctgccattttttcctactataataatgctgaatcttaatttagagggtacaagggtatggtaatgcttgtagaatctttattatctcaacaatctaaaaaatgatgtttatttccatagtttgatagtgccacttaaatgccaattaaacaagaatataacatttcaatagaaatttttatttcattttcaattactttgtaaattcgtgtgtatttagtacactgatttgtttttttacatttctgctttgaatgcagatgcaatttaatataatagattttttaatgaattaatcttaacatagtaatctttagctttttatacaaatatatttaatttaggagtatatgtgtgtctatacacacacatacataaatataccacatatacacctgatagtcaaataaggtacagaaattttatcttgtcaattatgccaaataatctctttaatgtgcactcaaacatgtaataaactttggataattaaataatgtgccaaatttaagttgtaccacaatattcaaatcatagtcttatggaactctgtaattggacacaaacaaaaacttgtcatataggaatttttttctgtcttttccctgtgtacagcaaactgaggaagaaagatcattatttaatactgggccctgaaatgacacccaatttgttaatggaattatgaagaacagcaatataatacactgaagaataacttagtatcagagaccaataaatcacttttttaaggatgacaaaatggtataa

SEQ ID NO: 1203 - DNA, 1249 bp, Homo sapiens
  source 1..1249: mol_type = unassigned DNA
gatgcgaagagggggcgggaccagagagtggatggcagaggtgggctgtagagccaaagtggggtgggagcgcgaagatggcagctgctgaggaggagccgaagcccaaaaagctgaaggtggaggcgccgcaagcgctgagagaaaatattctctttggaatgggaaatcctctgcttgacatctctgctgtagtggacaaagatttccttgataagtattctctgaaaccaaatgaccaaatcttggctgaagacaaacacaaggaactgtttgatgaacttgtgaaaaaattcaaagtcgaatatcatgctggtggctctacccagaattcaattaaagtggctcagtggatgattcaacagccacacaaagcagcaacattttttggatgcattgggatagataaatttggggagatcctgaagagaaaagctgctgaagcccatgtggatgctcattactacgagcagaatgagcagccaacaggaacttgtgctgcatgcatcactggtgacaacaggtccctcatagctaatcttgctgctgccaattgttataaaaaggaaaaacatcttgatctggagaaaaactggatgttggtagaaaaagcaagagtttgttatatagcagaagctgccacttttgctagagagcaaggctttgagactaaagacattaaagagatagccaaaaagacacaagccctgccaaagatgaactcaaagaggcagcgaatcgtgatcttcacccaagggagagatgacactataatggctacagaaagtgaagtcactgcttttgctgtcttggatcaagaccagaaagaaattattgataccaatggagctggagatgcatttgttggaggttttctgtctcaactggtctctgacaagcctctgactgaatgtatccgtgctggccactatgcagcaagcatcataattagacggactggctgcacctttcctgagaagccagacttccactgatggaagagctgaaaacacaagcccaggagtgcagacactgccctaattgcttcctgagaattcccatattaataaagaagaaaattatctgccattttttcctactataataatgctgaatcttaatttagagggtacaagggtatggtaatgcttgtagaatctttattatctcaacaatctaaaaaatgatgtttatttccatagtttgatagtgccacttaaatgccaattaaacaagaatataacatttc

SEQ ID NO: 1204 - DNA, 1187 bp, Homo sapiens
  source 1..1187: mol_type = unassigned DNA
agtcgctgagtgcctgagccgggaagcagttgctgtggtacctgctgctgcccgagcggacgtagagcatcggacgcgggcgccgtggcgctgggcaggagggcgaagccatgacgtcagtcagagaaaatattctctttggaatgggaaatcctctgcttgacatctctgctgtagtggacaaagatttccttgataagtttgatgaacttgtgaaaaaattcaaagtcgaatatcatgctggtggctctacccagaattcaattaaagtggctcagtggatgattcaacagccacacaaagcagcaacattttttggatgcattgggatagataaatttggggagatcctgaagagaaaagctgctgaagcccatgtggatgctcattactacgagcagaatgagcagccaacaggaacttgtgctgcatgcatcactggtgacaacaggtccctcatagctaatcttgctgctgccaattgttataaaaaggaaaaacatcttgatctggagaaaaactggatgttggtagaaaaagcaagagtttgttatatagcaggcttttttcttacagtttccccagagtcagtattaaaggtggctcaccatgcttctgaaaacaacaggattttcactttgaatctatctgcaccgtttattagccagttctacaaggaatcattgatgaaagttatgccttatgttgatatactttttggaaatgagacagaagctgccacttttgctagagagcaaggctttgagactaaagacattaaagagatagccaaaaagacacaagccctgccaaagatgaactcaaagaggcagcgaatcgtgatcttcacccaagggagagatgacactataatggctacagaaagtgaagtcactgcttttgctgtcttggatcaagaccagaaagaaattattgataccaatggagctggagatgcatttgttggaggttttctgtctcaactggtctctgacaagcctctgactgaatgtatccgtgctggccactatgcagcaagcatcataattagacggactggctgcacctttcctgagaagccagacttccactgatggaagagctgaaaacacaagcccaggagtgcagacactgccctaattgcttcctgagaattcccatattaataaagaagaaaattatctgcc

SEQ ID NO: 1205 - DNA, 2391 bp, Homo sapiens
  source 1..2391: mol_type = unassigned DNA
acttagcagagaagaatcaaatttccgggggcaaagcaaaataataaaatgaatgtcaggatattttatagtgtcagtcagtcaccccacagtctcctctctcttcttttctactgtgctatcctagaatcaaggatttcagcaacaatgcctctgttcaaactcccagctgaagagaaacaaattgatgatgcaatgcgcaactttgctgaaaaagtgtttgcctctgaagtcaaagatgaaggaggtcgtcaggagatttccccctttgatgtggatgagatctgtccgatttctcatcatgagatgcaagcacacatattccatctggagactctgtccacctccacagaagccaggagaaaaaagcgtttccaaggacggaagactgttaatttgtccattccactaagtgaaacatcttccaccaaactgtcccacattgatgaatacatttcctcatctccaacctaccagaccgtgcctgattttcagagagtgcagattactggtgactatgcctctggggttacagttgaagattttgaaattgtttgcaaaggtctgtatcgggcactatgcatacgtgagaaatacatgcagaagtcgtttcagaggttccctaaaaccccttccaaatacttgcggaacattgatggtgaggcttgggtagcaaatgagagcttctatccagtctttactcctcctgtgaagaagggagaggaccccttccgaacagacaaccttcctgaaaacctgggctatcacctcaaaatgaaggacggtgtagtttacgtctatcctaatgaagcagcagtcagcaaagatgagcctaagccacttccttacccaaatctggacaccttcttagacgatatgaattttttacttgctttaattgctcaaggacctgttaagacctatacccaccggcgcctgaagttcctctcctccaagttccaggtccatcagatgcttaacgagatggacgagttaaaggagctgaaaaacaacccccaccgagatttttataactgcaggaaggtggacacccatatccatgcagccgcttgcatgaaccagaaacatctgctgcgttttattaagaaatcttaccaaattgatgctgacagagtggtctatagcaccaaagagaagaatctgaccctaaaggaactttttgctaaattaaaaatgcatccttatgacctgactgttgattctctggatgttcatgctggacgccagaccttccagcgttttgataagttcaatgacaaatataatcctgtaggagcaagtgagctacgggacctctacttgaagacagacaattacattaatggggaatattttgccactatcatcaaggaggtaggtgcggacctggtggaggccaagtaccagcatgctgagccccgcctgtccatctatggccgcagtcctgatgagtggagcaaactctcctcctggttcgtctgcaatcgcatccactgccccaacatgacatggatgatccaggttcccaggatctatgatgtgttccgttccaagaatttccttccacattttggaaaaatgctggagaatattttcatgccagtgtttgaggccaccatcaacccccaggctgacccagaactcagtgtcttcctcaagcatatcactggctttgacagtgtggatgatgagtccaaacacagtggccacatgttctcctccaagagtcccaagccccaggagtggacattggaaaagaatccatcttacacttactatgcctactacatgtatgcaaacatcatggtgctcaacagcctgagaaaggaacgaggcatgaatacgtttctgttccgacctcactgtggagaagctggagccctcacccatctcatgacagcattcatgatagcagatgatatctctcatggcctaaatttaaaaaagagtcccgtgctacagtacttgtttttcttagcccaaattcccatcgccatgtcaccactaagtaacaatagcctatttctagagtatgccaaaaatccttttttggatttccttcagaaagggctaatgatctcactgtctacagatgacccaatgcaattccactttaccaaggagcccctaatggaagaatatgctattgctgcacaagtcttcaagctgagcacctgtgatatgtgcgaagtggcaaggaacagtgtcttgcagtgtggaatttctcatgaggagaaagtaaagtttctgggcgacaattaccttgaggaaggccctgctggaaatgatatccggaggacaaatgtagcccaaatccgcatggcctatcgctatgaaacctggtgttatgaactcaatttaattgctgagggtcttaaatcaacagaataa

SEQ ID NO: 1206 - DNA, 2375 bp, Homo sapiens
  source 1..2375: mol_type = unassigned DNA
aaagcaaaataataaaatgaatgtcaggatattttatagtgtcagtcagtcaccccacagtctcctctctcttcttttctactgtgctatcctagaatcaaggatttcagcaacaatgcctctgttcaaactcccagctgaagagaaacaaattgatgatgcaatgcgcaactttgctgaaaaagtgtttgcctctgaagtcaaagatgaaggaggtcgtcaggagatttccccctttgatgtggatgagatctgtccgatttctcatcatgagatgcaagcacacatattccatctggagactctgtccacctccacagaagccaggagaaaaaagcgtttccaaggacggaagactgttaatttgtccattccactaagtgaaacatcttccaccaaactgtcccacattgatgaatacatttcctcatctccaacctaccagaccgtgcctgattttcagagagtgcagattactggtgactatgcctctggggttacagttgaagattttgaaattgtttgcaaaggtctgtatcgggcactatgcatacgtgagaaatacatgcagaagtcgtttcagaggttccctaaaaccccttccaaatacttgcggaacattgatggtgaggcttgggtagcaaatgagagcttctatccagtctttactcctcctgtgaagaagggagaggaccccttccgaacagacaaccttcctgaaaacctgggctatcacctcaaaatgaaggacggtgtagtttacgtctatcctaatgaagcagcagtcagcaaagatgagcctaagccacttccttacccaaatctggacaccttcttagacgatatgaattttttacttgctttaattgctcaaggacctgttaagacctatacccaccggcgcctgaagttcctctcctccaagttccaggtccatcagatgcttaacgagatggacgagttaaaggagctgaaaaacaacccccaccgagatttttataactgcaggaaggtggacacccatatccatgcagccgcttgcatgaaccagaaacatctgctgcgttttattaagaaatcttaccaaattgatgctgacagagtggtctatagcaccaaagagaagaatctgaccctaaaggaactttttgctaaattaaaaatgcatccttatgacctgactgttgattctctggatgttcatgctggacgccagaccttccagcgttttgataagttcaatgacaaatataatcctgtaggagcaagtgagctacgggacctctacttgaagacagacaattacattaatggggaatattttgccactatcatcaaggaggtaggtgcggacctggtggaggccaagtaccagcatgctgagccccgcctgtccatctatggccgcagtcctgatgagtggagcaaactctcctcctggttcgtctgcaatcgcatccactgccccaacatgacatggatgatccaggttcccaggatctatgatgtgttccgttccaagaatttccttccacattttggaaaaatgctggagaatattttcatgccagtgtttgaggccaccatcaacccccaggctgacccagaactcagtgtcttcctcaagcatatcactggctttgacagtgtggatgatgagtccaaacacagtggccacatgttctcctccaagagtcccaagccccaggagtggacattggaaaagaatccatcttacacttactatgcctactacatgtatgcaaacatcatggtgctcaacagcctgagaaaggaacgaggcatgaatacgtttctgttccgacctcactgtggagaagctggagccctcacccatctcatgacagcattcatgatagcagatgatatctctcatggcctaaatttaaaaaagagtcccgtgctacagtacttgtttttcttagcccaaattcccatcgccatgtcaccactaagtaacaatagcctatttctagagtatgccaaaaatccttttttggatttccttcagaaagggctaatgatctcactgtctacagatgacccaatgcaattccactttaccaaggagcccctaatggaagaatatgctattgctgcacaagtcttcaagctgagcacctgtgatatgtgcgaagtggcaaggaacagtgtcttgcagtgtggaatttctcatgaggagaaagtaaagtttctgggcgacaattaccttgaggaaggccctgctggaaatgatatccggaggacaaatgtagcccaaatccgcatggcctatcgctatgaaacctggtgttatgaactcaatttaattgctgagggtcttaaatcaacagaataaaaaaaagtaaaccaaa

SEQ ID NO: 1207 - DNA, 2392 bp, Homo sapiens
  source 1..2392: mol_type = unassigned DNA
acttagcagagaagaatcaaatttccgggggcaaagcaaaataataaaatgaatgtcaggatattttatagtgtcagtcagtcaccccacagtctcctctctcttcttttctactgtgctatcctagaatcaaggatttcagcaacaatgcctctgttcaaactcccagaaattgatgatgcaatgcgcaactttgctgaaaaagtgtttgcctctgaagtcaaagatgaaggaggtcgtcaggagatttccccctttgatgtggatgagatctgtccgatttctcatcatgagatgcaagcacacatattccatctggagactctgtccacctccacagaagccaggagaaaaaagcgtttccaaggacggaagactgttaatttgtccattccactaagtgaaacatcttccaccaaactgtcccacattgatgaatacatttcctcatctccaacctaccagaccgtgcctgattttcagagagtgcagattactggtgactatgcctctggggttacagttgaagattttgaaattgtttgcaaaggtctgtatcgggcactatgcatacgtgagaaatacatgcagaagtcgtttcagaggttccctaaaaccccttccaaatacttgcggaacattgatggtgaggcttgggtagcaaatgagagcttctatccagtctttactcctcctgtgaagaagggagaggaccccttccgaacagacaaccttcctgaaaacctgggctatcacctcaaaatgaaggacggtgtagtttacgtctatcctaatgaagcagcagtcagcaaagatgagcctaagccacttccttacccaaatctggacaccttcttagacgatatgaattttttacttgctttaattgctcaaggacctgttaagacctatacccaccggcgcctgaagttcctctcctccaagttccaggtccatcagatgcttaacgagatggacgagttaaaggagctgaaaaacaacccccaccgagatttttataactgcaggaaggtggacacccatatccatgcagccgcttgcatgaaccagaaacatctgctgcgttttattaagaaatcttaccaaattgatgctgacagagtggtctatagcaccaaagagaagaatctgaccctaaaggaactttttgctaaattaaaaatgcatccttatgacctgactgttgattctctggatgttcatgctggacgccagaccttccagcgttttgataagttcaatgacaaatataatcctgtaggagcaagtgagctacgggacctctacttgaagacagacaattacattaatggggaatattttgccactatcatcaaggaggtaggtgcggacctggtggaggccaagtaccagcatgctgagccccgcctgtccatctatggccgcagtcctgatgagtggagcaaactctcctcctggttcgtctgcaatcgcatccactgccccaacatgacatggatgatccaggttcccaggatctatgatgtgttccgttccaagaatttccttccacattttggaaaaatgctggagaatattttcatgccagtgtttgaggccaccatcaacccccaggctgacccagaactcagtgtcttcctcaagcatatcactggctttgacagtgtggatgatgagtccaaacacagtggccacatgttctcctccaagagtcccaagccccaggagtggacattggaaaagaatccatcttacacttactatgcctactacatgtatgcaaacatcatggtgctcaacagcctgagaaaggaacgaggcatgaatacgtttctgttccgacctcactgtggagaagctggagccctcacccatctcatgacagcattcatgatagcagatgatatctctcatggcctaaatttaaaaaagagtcccgtgctacagtacttgtttttcttagcccaaattcccatcgccatgtcaccactaagtaacaatagcctatttctagagtatgccaaaaatccttttttggatttccttcagaaagggctaatgatctcactgtctacagatgacccaatgcaattccactttaccaaggagcccctaatggaagaatatgctattgctgcacaagtcttcaagctgagcacctgtgatatgtgcgaagtggcaaggaacagtgtcttgcagtgtggaatttctcatgaggagaaagtaaagtttctgggcgacaattaccttgaggaaggccctgctggaaatgatatccggaggacaaatgtagcccaaatccgcatggcctatcgctatgaaacctggtgttatgaactcaatttaattgctgagggtcttaaatcaacagaataaaaaaaagtaaacc

SEQ ID NO: 1208 - DNA, 3899 bp, Homo sapiens
  source 1..3899: mol_type = unassigned DNA
gggtgctgggttttcacggagtatgcctgccctgccccgggaggactgtgtttgagcttggactcgctcgctgctgaattcctgtttgttattcttttttcttccaggctagctggaaggaccagctagcctggactttggcttctttgcccgggagccctggcatgatggggtgagggctcttggtgggttagtggagagctgggggctggcccttccccatcttcttttctacccaccccctccccgccccccgccaggcccagccaccatcagtcacgtcactcctgggactgaggaggcaggggagggataaggggcagagatggaggccccactccccgaggttgcctagacaacatgagaaatcgtggccagggcctcttccgcctgcggagccgctgcttcctgcatcagtcactcccgctgggggcggggcggaggaaggggttggatgtggcagagccaggccccagccggtgccgctcagactcccccgctgtcgccgccgtggtcccagccatggcatcctatccatctggctctggcaagcccaaggccaaatatccctttaagaagcgggccagcctgcaggcctccactgcagctccagaggctcggggtggtctgggggcccctccgctgcagtctgcccgatccctgccgggccccgccccctgcctcaagcacttcccgctcgacctgcgcacgtctatggatggcaaatgcaaggagatcgccgaggagctgttcacccgctcactggctgagagcgagctccgtagtgccccgtatgagttccccgaggagagccccattgaacagctggaggagcggcggcagcggctggagcggcagatcagccaggatgtcaagctggagccagacatcctgcttcgggccaagcaagatttcctgaagacggacagtgactcggacctacagctctacaaggaacagggtgaggggcagggtgaccggagcctgcgggagcgtgatgtgctggaacgggagtttcagcgggtcaccatctctggggaggagaagtgtggggtgccgttcacagacctgctggatgcagccaagagtgtggtgcgggcgctcttcatccgggagaagtacatggccctgtccctgcagagcttctgccccaccacccgccgctacctgcagcagctggctgaaaagcctctggagacccggacctatgaacagggccccgacacccctgtgtctgctgatgccccggtgcacccccctgcgctggagcagcacccgtatgagcactgtgagccaagcaccatgcctggggacctgggcttgggtctgcgcatggtgcggggtgtggtgcacgtctacacccgcagggaacccgacgagcattgctcagaggtggagctgccataccctgacctgcaggaatttgtggctgacgtcaatgtgctgatggccctgattatcaatggccccataaagtcattctgctaccgccggctgcagtacctgagctccaagttccagatgcatgtgctactcaatgagatgaaggagctggccgcccagaagaaagtgccacaccgagatttctacaacatccgcaaggtggacacccacatccatgcctcgtcctgcatgaaccagaagcatctgctgcgcttcatcaagcgggcaatgaagcggcacctggaggagatcgtgcacgtggagcagggccgtgaacagacgctgcgggaggtctttgagagcatgaatctcacggcctacgacctgagtgtggacacgctggatgtgcatgcggacaggaacactttccatcgctttgacaagtttaatgccaaatacaaccctattggggagtccgtcctccgagagatcttcatcaagacggacaacagggtatctgggaagtactttgctcacatcatcaaggaggtgatgtcagacctggaggagagcaaataccagaatgcagagctgcggctctccatttacgggcgctcgagggatgagtgggacaagctggcgcgctgggccgtcatgcaccgcgtgcactcccccaacgtgcgctggctggtgcaggtgccccgcctctttgatgtgtaccgtaccaagggccagctggccaacttccaggagatgctggagaacatcttcctgccactgttcgaggccactgtgcaccctgccagccacccggaactgcatctcttcttagagcacgtggatggttttgacagcgtggatgatgagtccaagcctgaaaaccatgtcttcaacctggagagccccctgcctgaggcgtgggtggaggaggacaacccaccctatgcctactacctgtactacacctttgccaacatggccatgttgaaccacctgcgcaggcagaggggcttccacacgtttgtgctgaggccacactgtggggaggctgggcccatccaccacctggtgtcagccttcatgctggctgagaacatttcccacgggctccttctgcgcaaggcccccgtcctgcagtacctgtactacctggcccagatcggcatcgccatgtctccgctcagcaacaacagcctcttcctcagctatcaccggaatccgctaccggagtacctgtcccgcggcctcatggtctccctgtccactgatgatcccttgcagttccacttcaccaaggagccgctgatggaggagtacagcatcgccacccaggtgtggaagctcagctcctgcgatatgtgtgagctggcccgcaacagcgtgctcatgagcggcttctcgcacaaggtaaagagccactggctgggacccaactataccaaggaaggccctgaggggaatgacatccgccggaccaatgtgccagacatccgcgtgggctaccgctacgagaccctgtgccaggagctggcgctcatcacgcaggcagtccagagtgagatgctggagaccattccagaggaggcgggtatcaccatgagcccagggcctcaatgagcctggtccatgaagtgcccaccacatcgcagcacttttaccacgttttgtcctcagaccccgcccatgctgtgtggtctctgcatgtctccattcttctctgtctctgtcttgcatgtctcctaccatgtcactgtccctgggccacccagtgaaagcaaagcctgggaatctgctcattgttgtttgggctcaggtattgagcctgatggcccaggtattgagggcctcccctgctggtggccctgtcctgggatcctcagaagcctgactgtcctatgggcttctccagtgtccacaggggcttgggatggttgtggggggctggcccctctagcctttccggtccttcctgggcaaatctaagccttggccagggccgaagtttaggcccctgtcttgttcatgtagccgaggggcaggcgggggacctctacacctctgctgtgggcacggggctgctgagggtctgtggaactccagcagctctgcactgggtagagctgggcctagagctcagtcacaggcctgggcttcctggcctgagtgggtagacgcaggcggcagaggtgctggaccacatctccgccaagtcactgcccagcagccttctccgtcctgtccccagcccacgtgctccttgggtgtcagcttcctgtgcctctgtgggagagggcagctgccttgtgttatgtctggggccacagttgctgcaaagtcctggatctgccactcaaccccgggagtggtgttcccagtgtggctcccagagctttgaccagattgtgatcccagctggcccctatgttgtgttctggactgaggcctttgctgtgaactgcagtgtttcatacgaaccatctttcctagtgcatgagaaataaagattatttaagtaa

SEQ ID NO: 1209 - DNA, 3728 bp, Homo sapiens
  source 1..3728: mol_type = unassigned DNA
aagggccgcagagcctggcgcggagccggcgagattttggtggggtctcacctgttgcgtgactcccccacagtccggccgcgggagtccgaccctgaatgcccagggagtgttgagagaaatctggacgagtttcgggtcccgctcccttgggagcacgtggcctaccagcctctcgattgcagggttgggtggtcgcgacaccggggtcgccttgaggccagtccggctgccgaggtctgcgggagtccacctccggccagctggcaattttgaaagactgccttactttccccatctcagtgccagggcaggggcccttggagtgacttggctggggtctgtggcccgatccccctgccgtccctcaggacccgggctttctgctgtacagacttctcgtgggcagcctcccctcggaactcgggcatcatggcctcagaggctcggggtggtctgggggcccctccgctgcagtctgcccgatccctgccgggccccgccccctgcctcaagcacttcccgctcgacctgcgcacgtctatggatggcaaatgcaaggagatcgccgaggagctgttcacccgctcactggctgagagcgagctccgtagtgccccgtatgagttccccgaggagagccccattgaacagctggaggagcggcggcagcggctggagcggcagatcagccaggatgtcaagctggagccagacatcctgcttcgggccaagcaagatttcctgaagacggacagtgactcggacctacagctctacaaggaacagggtgaggggcagggtgaccggagcctgcgggagcgtgatgtgctggaacgggagtttcagcgggtcaccatctctggggaggagaagtgtggggtgccgttcacagacctgctggatgcagccaagagtgtggtgcgggcgctcttcatccgggagaagtacatggccctgtccctgcagagcttctgccccaccacccgccgctacctgcagcagctggctgaaaagcctctggagacccggacctatgaacagggccccgacacccctgtgtctgctgatgccccggtgcacccccctgcgctggagcagcacccgtatgagcactgtgagccaagcaccatgcctggggacctgggcttgggtctgcgcatggtgcggggtgtggtgcacgtctacacccgcagggaacccgacgagcattgctcagaggtggagctgccataccctgacctgcaggaatttgtggctgacgtcaatgtgctgatggccctgattatcaatggccccataaagtcattctgctaccgccggctgcagtacctgagctccaagttccagatgcatgtgctactcaatgagatgaaggagctggccgcccagaagaaagtgccacaccgagatttctacaacatccgcaaggtggacacccacatccatgcctcgtcctgcatgaaccagaagcatctgctgcgcttcatcaagcgggcaatgaagcggcacctggaggagatcgtgcacgtggagcagggccgtgaacagacgctgcgggaggtctttgagagcatgaatctcacggcctacgacctgagtgtggacacgctggatgtgcatgcggacaggaacactttccatcgctttgacaagtttaatgccaaatacaaccctattggggagtccgtcctccgagagatcttcatcaagacggacaacagggtatctgggaagtactttgctcacatcatcaaggaggtgatgtcagacctggaggagagcaaataccagaatgcagagctgcggctctccatttacgggcgctcgagggatgagtgggacaagctggcgcgctgggccgtcatgcaccgcgtgcactcccccaacgtgcgctggctggtgcaggtgccccgcctctttgatgtgtaccgtaccaagggccagctggccaacttccaggagatgctggagaacatcttcctgccactgttcgaggccactgtgcaccctgccagccacccggaactgcatctcttcttagagcacgtggatggttttgacagcgtggatgatgagtccaagcctgaaaaccatgtcttcaacctggagagccccctgcctgaggcgtgggtggaggaggacaacccaccctatgcctactacctgtactacacctttgccaacatggccatgttgaaccacctgcgcaggcagaggggcttccacacgtttgtgctgaggccacactgtggggaggctgggcccatccaccacctggtgtcagccttcatgctggctgagaacatttcccacgggctccttctgcgcaaggcccccgtcctgcagtacctgtactacctggcccagatcggcatcgccatgtctccgctcagcaacaacagcctcttcctcagctatcaccggaatccgctaccggagtacctgtcccgcggcctcatggtctccctgtccactgatgatcccttgcagttccacttcaccaaggagccgctgatggaggagtacagcatcgccacccaggtgtggaagctcagctcctgcgatatgtgtgagctggcccgcaacagcgtgctcatgagcggcttctcgcacaaggtaaagagccactggctgggacccaactataccaaggaaggccctgaggggaatgacatccgccggaccaatgtgccagacatccgcgtgggctaccgctacgagaccctgtgccaggagctggcgctcatcacgcaggcagtccagagtgagatgctggagaccattccagaggaggcgggtatcaccatgagcccagggcctcaatgagcctggtccatgaagtgcccaccacatcgcagcacttttaccacgttttgtcctcagaccccgcccatgctgtgtggtctctgcatgtctccattcttctctgtctctgtcttgcatgtctcctaccatgtcactgtccctgggccacccagtgaaagcaaagcctgggaatctgctcattgttgtttgggctcaggtattgagcctgatggcccaggtattgagggcctcccctgctggtggccctgtcctgggatcctcagaagcctgactgtcctatgggcttctccagtgtccacaggggcttgggatggttgtggggggctggcccctctagcctttccggtccttcctgggcaaatctaagccttggccagggccgaagtttaggcccctgtcttgttcatgtagccgaggggcaggcgggggacctctacacctctgctgtgggcacggggctgctgagggtctgtggaactccagcagctctgcactgggtagagctgggcctagagctcagtcacaggcctgggcttcctggcctgagtgggtagacgcaggcggcagaggtgctggaccacatctccgccaagtcactgcccagcagccttctccgtcctgtccccagcccacgtgctccttgggtgtcagcttcctgtgcctctgtgggagagggcagctgccttgtgttatgtctggggccacagttgctgcaaagtcctggatctgccactcaaccccgggagtggtgttcccagtgtggctcccagagctttgaccagattgtgatcccagctggcccctatgttgtgttctggactgaggcctttgctgtgaactgcagtgtttcatacgaaccatctttcctagtgcatgagaaataaagattatttaagtaa

SEQ ID NO: 1210 - DNA, 2838 bp, Homo sapiens
  source 1..2838: mol_type = unassigned DNA
ctcccgctgggggcggggcggaggaaggggttggatgtggcagagccaggccccagccggtgccgctcagactcccccgctgtcgccgccgtggtcccagccatggcatcctatccatctggctctggcaagcccaaggccaaatatccctttaagaagcgggccagcctgcaggcctccactgcagctccaggagctgttcacccgctcactggctgagagcgagctccgtagtgccccgtatgagttccccgaggagagccccattgaacagctggaggagcggcggcagcggctggagcggcagatcagccaggatgtcaagctggagccagacatcctgcttcgggccaagcaagatttcctgaagacggacagtgactcggacctacagctctacaaggaacagggtgaggggcagggtgaccggagcctgcgggagcgtgatgtgctggaacgggagtttcagcgggtcaccatctctggggaggagaagtgtggggtgccgttcacagacctgctggatgcagccaagagtgtggtgcgggcgctcttcatccgggagaagtacatggccctgtccctgcagagcttctgccccaccacccgccgctacctgcagcagctggctgaaaagcctctggagacccggacctatgaacagggccccgacacccctgtgtctgctgatgccccggtgcacccccctgcgctggagcagcacccgtatgagcactgtgagccaagcaccatgcctggggacctgggcttgggtctgcgcatggtgcggggtgtggtgcacgtctacacccgcagggaacccgacgagcattgctcagaggtggagctgccataccctgacctgcaggaatttgtggctgacgtcaatgtgctgatggccctgattatcaatggccccataaagtcattctgctaccgccggctgcagtacctgagctccaagttccagatgcatgtgctactcaatgagatgaaggagctggccgcccagaagaaagtgccacaccgagatttctacaacatccgcaaggtggacacccacatccatgcctcgtcctgcatgaaccagaagcatctgctgcgcttcatcaagcgggcaatgaagcggcacctggaggagatcgtgcacgtggagcagggccgtgaacagacgctgcgggaggtctttgagagcatgaatctcacggcctacgacctgagtgtggacacgctggatgtgcatgcggacaggaacactttccatcgctttgacaagtttaatgccaaatacaaccctattggggagtccgtcctccgagagatcttcatcaagacggacaacagggtatctgggaagtactttgctcacatcatcaaggaggtgatgtcagacctggaggagagcaaataccagaatgcagagctgcggctctccatttacgggcgctcgagggatgagtgggacaagctggcgcgctgggccgtcatgcaccgcgtgcactcccccaacgtgcgctggctggtgcaggtgccccgcctctttgatgtgtaccgtaccaagggccagctggccaacttccaggagatgctggagaacatcttcctgccactgttcgaggccactgtgcaccctgccagccacccggaactgcatctcttcttagagcacgtggatggttttgacagcgtggatgatgagtccaagcctgaaaaccatgtcttcaacctggagagccccctgcctgaggcgtgggtggaggaggacaacccaccctatgcctactacctgtactacacctttgccaacatggccatgttgaaccacctgcgcaggcagaggggcttccacacgtttgtgctgaggccacactgtggggaggctgggcccatccaccacctggtgtcagccttcatgctggctgagaacatttcccacgggctccttctgcgcaaggcccccgtcctgcagtacctgtactacctggcccagatcggcatcgccatgtctccgctcagcaacaacagcctcttcctcagctatcaccggaatccgctaccggagtacctgtcccgcggcctcatggtctccctgtccactgatgatcccttgcagttccacttcaccaaggagccgctgatggaggagtacagcatcgccacccaggtgtggaagctcagctcctgcgatatgtgtgagctggcccgcaacagcgtgctcatgagcggcttctcgcacaaggtaaagagccactggctgggacccaactataccaaggaaggccctgaggggaatgacatccgccggaccaatgtgccagacatccgcgtgggctaccgctacgagaccctgtgccaggagctggcgctcatcacgcaggcagtccagagtgagatgctggagaccattccagaggaggcgggtatcaccatgagcccagggcctcaatgagcctggtccatgaagtgcccaccacatcgcagcacttttaccacgttttgtcctcagaccccgcccatgctgtgtggtctctgcatgtctccattcttctctgtctctgtcttgcatgtctcctaccatgtcactgtccctgggccacccagtgaaagcaaagcctgggaatctgctcattgttgtttgggctcaggtattgagcctgatggcccaggtattgagggcctcccctgctggtggccctgtcctgggatcctcagaagcctgactgtcctatgggcttctccagtgtccacaggggcttgggatggttgtggggggctggcccctctagcctttccggtccttcctgggcaaatctaagccttggccagggccgaagttta

SEQ ID NO: 1211 - DNA, 3217 bp, Homo sapiens
  source 1..3217: mol_type = unassigned DNA
actctgtaggagagtgcccgagggcggagggccagccatgctgaccttccttccctccccccaggagctgttcacccgctcactggctgagagcgagctccgtagtgccccgtatgagttccccgaggagagccccattgaacagctggaggagcggcggcagcggctggagcggcagatcagccaggatgtcaagctggagccagacatcctgcttcgggccaagcaagatttcctgaagacggacagtgactcggacctacagctctacaaggaacagggtgaggggcagggtgaccggagcctgcgggagcgtgatgtgctggaacgggagtttcagcgggtcaccatctctggggaggagaagtgtggggtgccgttcacagacctgctggatgcagccaagagtgtggtgcgggcgctcttcatccgggagaagtacatggccctgtccctgcagagcttctgccccaccacccgccgctacctgcagcagctggctgaaaagcctctggagacccggacctatgaacagggccccgacacccctgtgtctgctgatgccccggtgcacccccctgcgctggagcagcacccgtatgagcactgtgagccaagcaccatgcctggggacctgggcttgggtctgcgcatggtgcggggtgtggtgcacgtctacacccgcagggaacccgacgagcattgctcagaggtggagctgccataccctgacctgcaggaatttgtggctgacgtcaatgtgctgatggccctgattatcaatggccccataaagtcattctgctaccgccggctgcagtacctgagctccaagttccagatgcatgtgctactcaatgagatgaaggagctggccgcccagaagaaagtgccacaccgagatttctacaacatccgcaaggtggacacccacatccatgcctcgtcctgcatgaaccagaagcatctgctgcgcttcatcaagcgggcaatgaagcggcacctggaggagatcgtgcacgtggagcagggccgtgaacagacgctgcgggaggtctttgagagcatgaatctcacggcctacgacctgagtgtggacacgctggatgtgcatgcggacaggaacactttccatcgctttgacaagtttaatgccaaatacaaccctattggggagtccgtcctccgagagatcttcatcaagacggacaacagggtatctgggaagtactttgctcacatcatcaaggaggtgatgtcagacctggaggagagcaaataccagaatgcagagctgcggctctccatttacgggcgctcgagggatgagtgggacaagctggcgcgctgggccgtcatgcaccgcgtgcactcccccaacgtgcgctggctggtgcaggtgccccgcctctttgatgtgtaccgtaccaagggccagctggccaacttccaggagatgctggagaacatcttcctgccactgttcgaggccactgtgcaccctgccagccacccggaactgcatctcttcttagagcacgtggatggttttgacagcgtggatgatgagtccaagcctgaaaaccatgtcttcaacctggagagccccctgcctgaggcgtgggtggaggaggacaacccaccctatgcctactacctgtactacacctttgccaacatggccatgttgaaccacctgcgcaggcagaggggcttccacacgtttgtgctgaggccacactgtggggaggctgggcccatccaccacctggtgtcagccttcatgctggctgagaacatttcccacgggctccttctgcgcaaggcccccgtcctgcagtacctgtactacctggcccagatcggcatcgccatgtctccgctcagcaacaacagcctcttcctcagctatcaccggaatccgctaccggagtacctgtcccgcggcctcatggtctccctgtccactgatgatcccttgcagttccacttcaccaaggagccgctgatggaggagtacagcatcgccacccaggtgtggaagctcagctcctgcgatatgtgtgagctggcccgcaacagcgtgctcatgagcggcttctcgcacaaggtaaagagccactggctgggacccaactataccaaggaaggccctgaggggaatgacatccgccggaccaatgtgccagacatccgcgtgggctaccgctacgagaccctgtgccaggagctggcgctcatcacgcaggcagtccagagtgagatgctggagaccattccagaggaggcgggtatcaccatgagcccagggcctcaatgagcctggtccatgaagtgcccaccacatcgcagcacttttaccacgttttgtcctcagaccccgcccatgctgtgtggtctctgcatgtctccattcttctctgtctctgtcttgcatgtctcctaccatgtcactgtccctgggccacccagtgaaagcaaagcctgggaatctgctcattgttgtttgggctcaggtattgagcctgatggcccaggtattgagggcctcccctgctggtggccctgtcctgggatcctcagaagcctgactgtcctatgggcttctccagtgtccacaggggcttgggatggttgtggggggctggcccctctagcctttccggtccttcctgggcaaatctaagccttggccagggccgaagtttaggcccctgtcttgttcatgtagccgaggggcaggcgggggacctctacacctctgctgtgggcacggggctgctgagggtctgtggaactccagcagctctgcactgggtagagctgggcctagagctcagtcacaggcctgggcttcctggcctgagtgggtagacgcaggcggcagaggtgctggaccacatctccgccaagtcactgcccagcagccttctccgtcctgtccccagcccacgtgctccttgggtgtcagcttcctgtgcctctgtgggagagggcagctgccttgtgttatgtctggggccacagttgctgcaaagtcctggatctgccactcaaccccgggagtggtgttcccagtgtggctcccagagctttgaccagattgtgatcccagctggcccctatgttgtgttctggactgaggcctttgctgtgaactgcagtgtttcatacgaaccatctttcctagtgcatgagaaataaagattatttaagt

SEQ ID NO: 1212 - DNA, 513 bp, Homo sapiens
  source 1..513: mol_type = unassigned DNA
agagcctggcgcggagccggcgagattttggtggggtctcacctgttgcgtgactcccccacagtccggccgcgggagtccgaccctgaatgcccagggagtgttgagagaaatctggacgagtttcgggtcccgctcccttgggagcacgtggcctaccagcctctcgattgcagggttgggtggtcgcgacaccggggtcgccttgaggccagtccggctgccgaggtctgcgggagtccacctccggccagctggcaattttgaaagactgccttactttccccatctcagtgccagggcaggggcccttggagtgacttggctggggtctgtggcccgatccccctgccgtccctcaggacccgggctttctgctgtacagacttctcgtgggcagcctcccctcggaactcgggcatcatggcctcagggcctcttccgcctgcggagccgctgcttcctgcatcagtcactcccgctgggggcggggcggaggaaggggttggatgt

SEQ ID NO: 1213 - DNA, 3134 bp, Homo sapiens
  source 1..3134: mol_type = unassigned DNA
cacctgttgcgtgactcccccacagtccggccgcgggagtccgaccctgaatgcccagggagtgttgagagaaatctggacgagtttcgggtcccgctcccttgggagcacgtggcctaccagcctctcgattgcagggttgggtggtcgcgacaccggggtcgccttgaggccagtccggctgccgaggtctgcgggagtccacctccggccagctggcaattttgaaagactgccttactttccccatctcagtgccagggcaggggcccttggagtgacttggctggggtctgtggcccgatccccctgccgtccctcaggacccgggctttctgctgtacagacttctcgtgggcagcctcccctcggaactcgggcatcatggcctcaggcccagccaccatcagtcacgtcactcctgggactgaggaggcaggggagggataaggggcagagatggaggccccactccccgaggttgcctagacaacatgagaaatcgtggccagggcctcttccgcctgcggagccgctgcttcctgcatcagtcactcccgctgggggcggggcggaggaaggggttggatgtggcagagccaggccccagccggtgccgctcagactcccccgctgtcgccgccgtggtcccagccatggcatcctatccatctggctctggcaagcccaaggccaaatatccctttaagaagcgggccagcctgcaggcctccactgcagctccagaggctcggggtggtctgggggcccctccgctgcagtctgcccgatccctgccgggccccgccccctgcctcaagcacttcccgctcgacctgcgcacgtctatggatggcaaatgcaaggagatcgccgaggagctgttcacccgctcactggctgagagcgagctccgtagtgccccgtatgagttccccgaggagagccccattgaacagctggaggagcggcggcagcggctggagcggcagatcagccaggatgtcaagctggagccagacatcctgcttcgggccaagcaagatttcctgaagacggacagtgactcggacctacagctctacaaggaacagggtgaggggcagggtgaccggagcctgcgggagcgtgatgtgctggaacgggagtttcagcgggtcaccatctctggggaggagaagtgtggggtgccgttcacagacctgctggatgcagccaagagtgtggtgcgggcgctcttcatccgggagaagtacatggccctgtccctgcagagcttctgccccaccacccgccgctacctgcagcagctggctgaaaagcctctggagacccggacctatgaacagggccccgacacccctgtgtctgctgatgccccggtgcacccccctgcgctggagcagcacccgtatgagcactgtgagccaagcaccatgcctggggacctgggcttgggtctgcgcatggtgcggggtgtggtgcacgtctacacccgcagggaacccgacgagcattgctcagaggtggagctgccataccctgacctgcaggaatttgtggctgacgtcaatgtgctgatggccctgattatcaatggccccataaagtcattctgctaccgccggctgcagtacctgagctccaagttccagatgcatgtgctactcaatgagatgaaggagctggccgcccagaagaaagtgccacaccgagatttctacaacatccgcaaggtggacacccacatccatgcctcgtcctgcatgaaccagaagcatctgctgcgcttcatcaagcgggcaatgaagcggcacctggaggagatcgtgcacgtggagcagggccgtgaacagacgctgcgggaggtctttgagagcatgaatctcacggcctacgacctgagtgtggacacgctggatgtgcatgcggacaggaacactttccatcgctttgacaagtttaatgccaaatacaaccctattggggagtccgtcctccgagagatcttcatcaagacggacaacagggtatctgggaagtactttgctcacatcatcaaggaggtgatgtcagacctggaggagagcaaataccagaatgcagagctgcggctctccatttacgggcgctcgagggatgagtgggacaagctggcgcgctgggccgtcatgcaccgcgtgcactcccccaacgtgcgctggctggtgcaggtgccccgcctctttgatgtgtaccgtaccaagggccagctggccaacttccaggagatgctggagaacatcttcctgccactgttcgaggccactgtgcaccctgccagccacccggaactgcatctcttcttagagcacgtggatggttttgacagcgtggatgatgagtccaagcctgaaaaccatgtcttcaacctggagagccccctgcctgaggcgtgggtggaggaggacaacccaccctatgcctactacctgtactacacctttgccaacatggccatgttgaaccacctgcgcaggcagaggggcttccacacgtttgtgctgaggccacactgtggggaggctgggcccatccaccacctggtgtcagccttcatgctggctgagaacatttcccacgggctccttctgcgcaaggcccccgtcctgcagtacctgtactacctggcccagatcggcatcgccatgtctccgctcagcaacaacagcctcttcctcagctatcaccggaatccgctaccggagtacctgtcccgcggcctcatggtctccctgtccactgatgatcccttgcagttccacttcaccaaggagccgctgatggaggagtacagcatcgccacccaggtgtggaagctcagctcctgcgatatgtgtgagctggcccgcaacagcgtgctcatgagcggcttctcgcacaaggtaaagagccactggctgggacccaactataccaaggaaggccctgaggggaatgacatccgccggaccaatgtgccagacatccgcgtgggctaccgctacgagaccctgtgccaggagctggcgctcatcacgcaggcagtccagagtgagatgctggagaccattccagaggaggcgggtatcaccatgagcccagggcctcaatga

SEQ ID NO: 1214 - DNA, 572 bp, Homo sapiens
  source 1..572: mol_type = unassigned DNA
attactgtgcatacatcatcctgatgtctgtgacctcctgcctctgcctctatcgtcagttcctgtgcctttcctgtggctgtcccactttatgatcacatttacgaacagtttcctgatgaagtaaataagtgccagggcaggggcccttggagtgacttggctggggtctgtggcccgatccccctgccgtccctcaggacccgggctttctgctgtacagacttctcgtgggcagcctcccctcggaactcgggcatcatggcctcagaggctcggggtggtctgggggcccctccgctgcagtctgcccgatccctgccgggccccgccccctgcctcaagcacttcccgctcgacctgcgcacgtctatggatggcaaatgcaaggagatcgccgaggagctgttcacccgctcactggctgagagcgagctccgtagtgccccgtatgagttccccgaggagagccccattgaacagctggaggagcggcggcagcggctggagcggcagatcagccaggatgtcaagctggagccagacatcctgcttcgggccaagcaagattt

SEQ ID NO: 1215 - DNA, 3680 bp, Homo sapiens
  source 1..3680: mol_type = unassigned DNA
tcaaccctgcttggttttagaggattgctcctgtgggtcacttgaggcaggctccaccttccccaggaggagtggcagagtccagccagcgctcggagctggaggcccacgtgggagcagtgagcggctctgagatgccgcggcagtttcccaagctgaacatctctgaagtggatgagcaagtccggctcctggcggagaaggtgtttgctaaagtgctccgagaagaggacagcaaagatgccctgtccctgttcactgtcccagaggactgccccatcgggcaaaaggaagccaaggagagggagctgcagaaggagctggcagagcagaagtctgtggagaccgcaaaaagaaagaaaagtttcaagatgattcggtcccagtccctgtctctgcaaatgccgccacagcaagattggaagggccccccggcagccagtccggccatgtctcccacaacccctgtggtcactggagccacttccctgcccacgccagcaccctatgccatgcctgagttccagcgggtcaccatcagcggagattactgtgccgggatcactttggaggactatgagcaggcagccaagagtctggccaaggccctaatgatccgggagaagtatgcgcggctcgcctaccaccgcttcccgcggatcacatcccagtacctgggtcatccgcgggcggatactgcacctccggaagagggccttccagacttccaccctcctccactgccccaggaagacccctactgcctggatgatgcaccccccaacctggattacttggtccacatgcaggggggcatcctctttgtgtatgataacaagaagatgctggagcaccaggagccgcacagcctaccctaccccgacctggagacctacacggtggacatgagccacatcctggctctcatcaccgatggccccacgaaaacctattgtcaccggcgactgaactttctggaatccaagttcagccttcatgagatgttaaacgaaatgtccgagttcaaagagttgaagagtaacccccaccgggacttctataacgtgagaaaggtggacacacacatccatgcggccgcctgcatgaaccaaaagcatctgctgcgcttcatcaagcacacataccagacggagcctgacaggactgtggcagagaagcggggccggaagatcaccctgcggcaggtgtttgacggcctgcacatggacccctacgacctcactgtggactcactggatgtccacgcgggccggcagacattccaccgctttgacaagttcaactccaaatacaaccctgtgggggccagtgagctgcgtgacctgtatttgaaaactgaaaactatctgggaggagagtactttgctcggatggtcaaggaggttgcccgggagctggaggagagcaagtaccagtactcagagccacggctctccatctacggccgcagtcctgaggagtggcccaacctggcctactggttcatccagcacaaggtctactctcccaacatgcgctggatcatccaggtgccccggatttatgacatatttaggtcaaagaagctgctgccaaactttgggaagatgctggagaacatcttcctgccccttttcaaggccactatcaacccccaagatcatcgagagcttcacctcttccttaaatatgtgacggggtttgacagcgtggatgatgagtccaagcacagcgaccacatgttttccgacaagagcccaaacccggacgtctggaccagtgagcagaacccaccctacagctactacctgtactacatgtatgccaacatcatggtgctcaacaacctccgcagggagcgcggcctgagcacgttcctgttccggccgcactgtggggaagccggctccatcacccacctggtgtctgccttcctcactgctgacaacatttcccacgggctgctcctcaagaagagtccggtattgcagtatctctactaccttgctcagatccccattgccatgtctcctcttagcaacaacagtttgttcctcgaatattccaagaaccctctgagggaattcctacacaagggactgcatgtttctctttccaccgatgaccccatgcagttccactacacgaaggaagcacttatggaagaatatgccattgcagctcaagtgtggaagctgagcacctgcgacctgtgtgagatcgccaggaacagcgtgctgcagagcggcctctcgcatcaggaaaagcaaaagtttctgggacaaaattattataaagaaggacctgaaggaaatgatattcgaaagacaaatgtggctcagatccggatggcattccgatatgagaccttatgcaatgagctcagcttcctgtctgatgctatgaaatcagaagagatcaccgccttgaccaactaggtccagcatttgacatgcattttaactttttggttcaatttcaagtctgctgtggctaatagtggtcaagattccgaactaggactttcctctgtgaagaggatgcctctgaagaaattttaaactggtgattttggttgcactgctcactttaagagttaacatgctcacttgttagtatttctgagtaacaagatggtgacttctccttggggatctgggagctgagcacttgtctatacttgttcctaattttccaagtatttctcttgaaactgccagtgcctgaactgttggggccaggattttccctggtcagatgccaagtaacatgtggttttctgccatacttttctccattggcccaggtaggctaattggtagttgttcatttcagcctctggatggctggctgccttaaacacaatcaatttcaaagctccatttcataaaggggctactttgaaggagttaagatggaagacttccttcttgacaaattgtgtttttagtgaatttcttaaaccgttttatttagccctccttccctctttctagttggaagccaaatgtactcatgaaaacagccactcctattctgagtcttggtttcttcacctagaaagtgagggtttggactagatgagtggctttcagggtgttctgtgaatctcctcatgaatactttagggtaggggagggaagggagtgagtgatgctcaggggctgtcaaagtgactgcgttcatcagttttacactggggctgctacataatattttcatttgaacgaagaacttcaaaaagcacaggactagatgatctctgttccttttggctctaatatgctacaactgtaggccaattatcactttaccaattaagagttaggccagataagtgaaatttaacttaagggcacacagctaataagtaataggcctaaactggatttccttattccaaatcctgtcttttccccactattccattagaccccacaaatgttagttgtgtgtgtgtgtgtgtgtgtttttaatcactgtaaccggatgcatttttttaaggcaaaatttctcccttatctactatgatgacttcagaagatacaatggtcccaggggccaagtagaaagcatttttaaagattaatctgaattaagctttatcagtgtactctttatctgtgttactagtgcctggtatgtagtaggtgctcaataaatgcatattgaataactaa

SEQ ID NO: 1216 - DNA, 3806 bp, Homo sapiens
  source 1..3806: mol_type = unassigned DNA
tgctgctctcaagtttcccgttggcggcgcggcccgggcgcttcaggtagcctctcggctctctctgctccgctccgcgcccaggtagggcaccgacgggggctgcacgcggctggccggcttcctccctgctgaggcggccctccctcctcccgcggggccctcctggccggggatccgcagcgctgcgccctctgaacgcccggcccccgcgcctgctgcggggcgcggcctggccgggccctggccccggctggcctcagtgcccagcagccccgctccgctctgcccagcgcgtcccctttgctccagccctgcggccgtccctttcggccggcggcatggccctgtcgtccgaacccgctgagatgccgcggcagtttcccaagctgaacatctctgaagtggatgagcaagtccggctcctggcggagaaggtgtttgctaaagtgctccgagaagaggacagcaaagatgccctgtccctgttcactgtcccagaggactgccccatcgggcaaaaggaagccaaggagagggagctgcagaaggagctggcagagcagaagtctgtggagaccgcaaaaagaaagaaaagtttcaagatgattcggtcccagtccctgtctctgcaaatgccgccacagcaagattggaagggccccccggcagccagtccggccatgtctcccacaacccctgtggtcactggagccacttccctgcccacgccagcaccctatgccatgcctgagttccagcgggtcaccatcagcggagattactgtgccgggatcactttggaggactatgagcaggcagccaagagtctggccaaggccctaatgatccgggagaagtatgcgcggctcgcctaccaccgcttcccgcggatcacatcccagtacctgggtcatccgcgggcggatactgcacctccggaagagggccttccagacttccaccctcctccactgccccaggaagacccctactgcctggatgatgcaccccccaacctggattacttggtccacatgcaggggggcatcctctttgtgtatgataacaagaagatgctggagcaccaggagccgcacagcctaccctaccccgacctggagacctacacggtggacatgagccacatcctggctctcatcaccgatggccccacgaaaacctattgtcaccggcgactgaactttctggaatccaagttcagccttcatgagatgttaaacgaaatgtccgagttcaaagagttgaagagtaacccccaccgggacttctataacgtgagaaaggtggacacacacatccatgcggccgcctgcatgaaccaaaagcatctgctgcgcttcatcaagcacacataccagacggagcctgacaggactgtggcagagaagcggggccggaagatcaccctgcggcaggtgtttgacggcctgcacatggacccctacgacctcactgtggactcactggatgtccacgcgggccggcagacattccaccgctttgacaagttcaactccaaatacaaccctgtgggggccagtgagctgcgtgacctgtatttgaaaactgaaaactatctgggaggagagtactttgctcggatggtcaaggaggttgcccgggagctggaggagagcaagtaccagtactcagagccacggctctccatctacggccgcagtcctgaggagtggcccaacctggcctactggttcatccagcacaaggtctactctcccaacatgcgctggatcatccaggtgccccggatttatgacatatttaggtcaaagaagctgctgccaaactttgggaagatgctggagaacatcttcctgccccttttcaaggccactatcaacccccaagatcatcgagagcttcacctcttccttaaatatgtgacggggtttgacagcgtggatgatgagtccaagcacagcgaccacatgttttccgacaagagcccaaacccggacgtctggaccagtgagcagaacccaccctacagctactacctgtactacatgtatgccaacatcatggtgctcaacaacctccgcagggagcgcggcctgagcacgttcctgttccggccgcactgtggggaagccggctccatcacccacctggtgtctgccttcctcactgctgacaacatttcccacgggctgctcctcaagaagagtccggtattgcagtatctctactaccttgctcagatccccattgccatgtctcctcttagcaacaacagtttgttcctcgaatattccaagaaccctctgagggaattcctacacaagggactgcatgtttctctttccaccgatgaccccatgcagttccactacacgaaggaagcacttatggaagaatatgccattgcagctcaagtgtggaagctgagcacctgcgacctgtgtgagatcgccaggaacagcgtgctgcagagcggcctctcgcatcaggaaaagcaaaagtttctgggacaaaattattataaagaaggacctgaaggaaatgatattcgaaagacaaatgtggctcagatccggatggcattccgatatgagaccttatgcaatgagctcagcttcctgtctgatgctatgaaatcagaagagatcaccgccttgaccaactaggtccagcatttgacatgcattttaactttttggttcaatttcaagtctgctgtggctaatagtggtcaagattccgaactaggactttcctctgtgaagaggatgcctctgaagaaattttaaactggtgattttggttgcactgctcactttaagagttaacatgctcacttgttagtatttctgagtaacaagatggtgacttctccttggggatctgggagctgagcacttgtctatacttgttcctaattttccaagtatttctcttgaaactgccagtgcctgaactgttggggccaggattttccctggtcagatgccaagtaacatgtggttttctgccatacttttctccattggcccaggtaggctaattggtagttgttcatttcagcctctggatggctggctgccttaaacacaatcaatttcaaagctccatttcataaaggggctactttgaaggagttaagatggaagacttccttcttgacaaattgtgtttttagtgaatttcttaaaccgttttatttagccctccttccctctttctagttggaagccaaatgtactcatgaaaacagccactcctattctgagtcttggtttcttcacctagaaagtgagggtttggactagatgagtggctttcagggtgttctgtgaatctcctcatgaatactttagggtaggggagggaagggagtgagtgatgctcaggggctgtcaaagtgactgcgttcatcagttttacactggggctgctacataatattttcatttgaacgaagaacttcaaaaagcacaggactagatgatctctgttccttttggctctaatatgctacaactgtaggccaattatcactttaccaattaagagttaggccagataagtgaaatttaacttaagggcacacagctaataagtaataggcctaaactggatttccttattccaaatcctgtcttttccccactattccattagaccccacaaatgttagttgtgtgtgtgtgtgtgtgtgtttttaatcactgtaaccggatgcatttttttaaggcaaaatttctcccttatctactatgatgacttcagaagatacaatggtcccaggggccaagtagaaa

SEQ ID NO: 1217 - DNA, 3994 bp, Homo sapiens
  source 1..3994: mol_type = unassigned DNA
gtggacggttggcgagggagtgtgtgtgtgtgtgtgtgtgtgtgtgtgtgtgtgtatccaagtgaccagaaggacgcctggaagaaaccaatgcttgcgggttgctgcaactacagggagcaagtcacctgtgcggggccgagacccccagagtctcgcgctgggaaaagttgtgcggggaggggaggacgtcggctgagatgccgcggcagtttcccaagctgaacatctctgaagtggatgagcaagtccggctcctggcggagaaggtgtttgctaaagtgctccgagaagaggacagcaaagatgccctgtccctgttcactgtcccagaggactgccccatcgggcaaaaggaagccaaggagagggagctgcagaaggagctggcagagcagaagtctgtggagaccgcaaaaagatcactttggaggactatgagcaggcagccaagagtctggccaaggccctaatgatccgggagaagtatgcgcggctcgcctaccaccgcttcccgcggatcacatcccagtacctgggtcatccgcgggcggatactgcacctccggaagagggccttccagacttccaccctcctccactgccccaggaagacccctactgcctggatgatgcaccccccaacctggattacttggtccacatgcaggggggcatcctctttgtgtatgataacaagaagatgctggagcaccaggagccgcacagcctaccctaccccgacctggagacctacacggtggacatgagccacatcctggctctcatcaccgatggccccacgaaaacctattgtcaccggcgactgaactttctggaatccaagttcagccttcatgagatgttaaacgaaatgtccgagttcaaagagttgaagagtaacccccaccgggacttctataacgtgagaaaggtggacacacacatccatgcggccgcctgcatgaaccaaaagcatctgctgcgcttcatcaagcacacataccagacggagcctgacaggactgtggcagagaagcggggccggaagatcaccctgcggcaggtgtttgacggcctgcacatggacccctacgacctcactgtggactcactggatgtccacgcgggccggcagacattccaccgctttgacaagttcaactccaaatacaaccctgtgggggccagtgagctgcgtgacctgtatttgaaaactgaaaactatctgggaggagagtactttgctcggatggtcaaggaggttgcccgggagctggaggagagcaagtaccagtactcagagccacggctctccatctacggccgcagtcctgaggagtggcccaacctggcctactggttcatccagcacaaggtctactctcccaacatgcgctggatcatccaggtgccccggatttatgacatatttaggtcaaagaagctgctgccaaactttgggaagatgctggagaacatcttcctgccccttttcaaggccactatcaacccccaagatcatcgagagcttcacctcttccttaaatatgtgacggggtttgacagcgtggatgatgagtccaagcacagcgaccacatgttttccgacaagagcccaaacccggacgtctggaccagtgagcagaacccaccctacagctactacctgtactacatgtatgccaacatcatggtgctcaacaacctccgcagggagcgcggcctgagcacgttcctgttccggccgcactgtggggaagccggctccatcacccacctggtgtctgccttcctcactgctgacaacatttcccacgggctgctcctcaagaagagtccggtattgcagtatctctactaccttgctcagatccccattgccatgtctcctcttagcaacaacagtttgttcctcgaatattccaagaaccctctgagggaattcctacacaagggactgcatgtttctctttccaccgatgaccccatgcagttccactacacgaaggaagcacttatggaagaatatgccattgcagctcaagtgtggaagctgagcacctgcgacctgtgtgagatcgccaggaacagcgtgctgcagagcggcctctcgcatcaggaaaagcaaaagtttctgggacaaaattattataaagaaggacctgaaggaaatgatattcgaaagacaaatgtggctcagatccggatggcattccgatatgagaccttatgcaatgagctcagcttcctgtctgatgctatgaaatcagaagagatcaccgccttgaccaactaggtccagcatttgacatgcattttaactttttggttcaatttcaagtctgctgtggctaatagtggtcaagattccgaactaggactttcctctgtgaagaggatgcctctgaagaaattttaaactggtgattttggttgcactgctcactttaagagttaacatgctcacttgttagtatttctgagtaacaagatggtgacttctccttggggatctgggagctgagcacttgtctatacttgttcctaattttccaagtatttctcttgaaactgccagtgcctgaactgttggggccaggattttccctggtcagatgccaagtaacatgtggttttctgccatacttttctccattggcccaggtaggctaattggtagttgttcatttcagcctctggatggctggctgccttaaacacaatcaatttcaaagctccatttcataaaggggctactttgaaggagttaagatggaagacttccttcttgacaaattgtgtttttagtgaatttcttaaaccgttttatttagccctccttccctctttctagttggaagccaaatgtactcatgaaaacagccactcctattctgagtcttggtttcttcacctagaaagtgagggtttggactagatgagtggctttcagggtgttctgtgaatctcctcatgaatactttagggtaggggagggaagggagtgagtgatgctcaggggctgtcaaagtgactgcgttcatcagttttacactggggctgctacataatattttcatttgaacgaagaacttcaaaaagcacaggactagatgatctctgttccttttggctctaatatgctacaactgtaggccaattatcactttaccaattaagagttaggccagataagtgaaatttaacttaagggcacacagctaataagtaataggcctaaactggatttccttattccaaatcctgtcttttccccactattccattagaccccacaaatgttagttgtgtgtgtgtgtgtgtgtgtttttaatcactgtaaccggatgcatttttttaaggcaaaatttctcccttatctactatgatgacttcagaagatacaatggtcccaggggccaagtagaaagcatttttaaagattaatctgaattaagctttatcagtgtactctttatctgtgttactagtgcctggtatgtagtaggtgctcaataaatgcatattgaataactaagtgaatttcttttggcaactttttaaggacatgtgctcttagtacttaagaggctgctcaaggaccttcctatctatttctgtggtcaaattcagactacaggaggtctttttgaatcattatagttagaagaagaatccagtttctgcctgtgaacttatttgactttagattgtctcatcttgtgactttataatgcctgtcccctccactggtcaattcagcatatggaagtataaatgcagtctttttactaggcagatatatatgctatcttacagctaattatgaaattgaatgaaaatccattgttatcttagggattagttttgaaaagcccccgtttatatacatttgccctaacataggaagtattgtgtagtttctcattgtcattttatctgtatcaagtatctttttttaaattgttaaataaagtcagctaggactgtg

SEQ ID NO: 1218 - DNA, 980 bp, Homo sapiens
  source 1..980: mol_type = unassigned DNA
gttggcggcgcggcccgggcgcttcaggtagcctctcggctctctctgctccgctccgcgcccagaggattgctcctgtgggtcacttgaggcaggctccaccttccccaggaggagtggcagagtccagccagcgctcggagctggaggcccacgtgggagcagtgagcggctctgagatgccgcggcagtttcccaagctgaacatctctgaagtggatgagcaagtccggctcctggcggagaaggtgtttgctaaagtgctccgagaagaggacagcaaagatgccctgtccctgttcactgtcccagaggactgccccatcgggcaaaaggaagccaaggagagggagctgcagaaggagctggcagagcagaagtctgtggagaccgcaaaaagaaagaaaagtttcaagatgattcggtcccagtccctgtctctgcaaatgccgccacagcaagattggaagggccccccggcagccagtccggccatgtctcccacaacccctgtggtcactggagccacttccctgcccacgccagcaccctatgccatgcctgagttccagcgggtcaccatcagcggagattactgtgccgggatcactttggaggactatgagcaggcagccaagagtctggccaaggccctaatgatccgggagaagtatgcgcggctcgcctaccaccgcttcccgcggatcacatcccagtacctgggtcatccgcgggcggatactgcacctccggaagagggccttccagacttccaccctcctccactgccccaggaagacccctactgcctggatgatgcaccccccaacctggattacttggtccacatgcaggggggcatcctctttgtgtatgataacaagaagatgctggagcaccaggagccgcacagcctaccctaccccgacctggagacctacacggtggacatgagccacatcctggctctcatcaccgat

SEQ ID NO: 1219 - DNA, 2753 bp, Homo sapiens
  source 1..2753: mol_type = unassigned DNA
attcacgagagaatttccagcccaggcttttcctgctctggctcactgctgctcacagatatgcaaaacagagacctcctactccagccggcagacaggacccagccagctgcacgcacgcactgactcagctgagcctcctgggtggcaggcagcacctcacccgggtgcatcacttgagtggcatcttcaggaccagtcatggagccaggctcagctgagatgccgcggcagtttcccaagctgaacatctctgaagtggatgagcaagtccggctcctggcggagaaggtgtttgctaaagtgctccgagaagaggacagcaaagatgccctgtccctgttcactgtcccagaggactgccccatcgggcaaaaggaagccaaggagagggagctgcagaaggagctggcagagcagaagtctgtggagaccgcaaaaagaaagaaaagtttcaagatgattcggtcccagtccctgtctctgcaaatgccgccacagcaagattggaagggccccccggcagccagtccggccatgtctcccacaacccctgtggtcactggagccacttccctgcccacgccagcaccctatgccatgcctgagttccagcgggtcaccatcagcggagattactgtgccgggatcactttggaggactatgagcaggcagccaagagtctggccaaggccctaatgatccgggagaagtatgcgcggctcgcctaccaccgcttcccgcggatcacatcccagtacctgggtcatccgcgggcggatactgcacctccggaagagggccttccagacttccaccctcctccactgccccaggaagacccctactgcctggatgatgcaccccccaacctggattacttggtccacatgcaggggggcatcctctttgtgtatgataacaagaagatgctggagcaccaggagccgcacagcctaccctaccccgacctggagacctacacggtggacatgagccacatcctggctctcatcaccgatggccccacgaaaacctattgtcaccggcgactgaactttctggaatccaagttcagccttcatgagatgttaaacgaaatgtccgagttcaaagagttgaagagtaacccccaccgggacttctataacgtgagaaaggtggacacacacatccatgcggccgcctgcatgaaccaaaagcatctgctgcgcttcatcaagcacacataccagacggagcctgacaggactgtggcagagaagcggggccggaagatcaccctgcggcaggtgtttgacggcctgcacatggacccctacgacctcactgtggactcactggatgtccacgcgggccggcagacattccaccgctttgacaagttcaactccaaatacaaccctgtgggggccagtgagctgcgtgacctgtatttgaaaactgaaaactatctgggaggagagtactttgctcggatggtcaaggaggttgcccgggagctggaggagagcaagtaccagtactcagagccacggctctccatctacggccgcagtcctgaggagtggcccaacctggcctactggttcatccagcacaaggtctactctcccaacatgcgctggatcatccaggtgccccggatttatgacatatttaggtcaaagaagctgctgccaaactttgggaagatgctggagaacatcttcctgccccttttcaaggccactatcaacccccaagatcatcgagagcttcacctcttccttaaatatgtgacggggtttgacagcgtggatgatgagtccaagcacagcgaccacatgttttccgacaagagcccaaacccggacgtctggaccagtgagcagaacccaccctacagctactacctgtactacatgtatgccaacatcatggtgctcaacaacctccgcagggagcgcggcctgagcacgttcctgttccggccgcactgtggggaagccggctccatcacccacctggtgtctgccttcctcactgctgacaacatttcccacgggctgctcctcaagaagagtccggtattgcagtatctctactaccttgctcagatccccattgccatgtctcctcttagcaacaacagtttgttcctcgaatattccaagaaccctctgagggaattcctacacaagggactgcatgtttctctttccaccgatgaccccatgcagttccactacacgaaggaagcacttatggaagaatatgccattgcagctcaagtgtggaagctgagcacctgcgacctgtgtgagatcgccaggaacagcgtgctgcagagcggcctctcgcatcaggaaaagcaaaagtttctgggacaaaattattataaagaaggacctgaaggaaatgatattcgaaagacaaatgtggctcagatccggatggcattccgatatgagaccttatgcaatgagctcagcttcctgtctgatgctatgaaatcagaagagatcaccgccttgaccaactaggtccagcatttgacatgcattttaactttttggttcaatttcaagtctgctgtggctaatagtggtcaagattccgaactaggactttcctctgtgaagaggatgcctctgaagaaattttaaactggtgattttggttgcactgctcactttaagagttaacatgctcacttgttagtatttctgagtaacaagatggtgacttctccttggggatctgggagctg

SEQ ID NO: 1220 - DNA, 3156 bp, Homo sapiens
  source 1..3156: mol_type = unassigned DNA
atagtctggaggagggagagctgaactctctcttgtcccttctcaaacatgggaacaaagtcaggagggcagggctgccaggtgctgcagattccctgagtttgggaaaatggaagcccacctagttgaacagttcattctttgaattttgaacacttgctttctcctgacacctaagtggccctacatgcttcacatccagttacttattgagctaattttgaaattggcatgctgggtttggtctggggcattcctaagtagacagctgaccccaagtaccagctgagatgccgcggcagtttcccaagctgaacatctctgaagtggatgagcaagtccggctcctggcggagaaggtgtttgctaaagtgctccgagaagaggacagcaaagatgccctgtccctgttcactgtcccagaggactgccccatcgggcaaaaggaagccaaggagagggagctgcagaaggagctggcagagcagaagtctgtggagaccgcaaaaagaaagaaaagtttcaagatgattcggtcccagtccctgtctctgcaaatgccgccacagcaagattggaagggccccccggcagccagtccggccatgtctcccacaacccctgtggtcactggagccacttccctgcccacgccagcaccctatgccatgcctgagttccagcgggtcaccatcagcggagattactgtgccgggatcactttggaggactatgagcaggcagccaagagtctggccaaggccctaatgatccgggagaagtatgcgcggctcgcctaccaccgcttcccgcggatcacatcccagtacctgggtcatccgcgggcggatactgcacctccggaagagggccttccagacttccaccctcctccactgccccaggaagacccctactgcctggatgatgcaccccccaacctggattacttggtccacatgcaggggggcatcctctttgtgtatgataacaagaagatgctggagcaccaggagccgcacagcctaccctaccccgacctggagacctacacggtggacatgagccacatcctggctctcatcaccgatggccccacgaaaacctattgtcaccggcgactgaactttctggaatccaagttcagccttcatgagatgttaaacgaaatgtccgagttcaaagagttgaagagtaacccccaccgggacttctataacgtgagaaaggtggacacacacatccatgcggccgcctgcatgaaccaaaagcatctgctgcgcttcatcaagcacacataccagacggagcctgacaggactgtggcagagaagcggggccggaagatcaccctgcggcaggtgtttgacggcctgcacatggacccctacgacctcactgtggactcactggatgtccacgcgggccggcagacattccaccgctttgacaagttcaactccaaatacaaccctgtgggggccagtgagctgcgtgacctgtatttgaaaactgaaaactatctgggaggagagtactttgctcggatggtcaaggaggttgcccgggagctggaggagagcaagtaccagtactcagagccacggctctccatctacggccgcagtcctgaggagtggcccaacctggcctactggttcatccagcacaaggtctactctcccaacatgcgctggatcatccaggtgccccggatttatgacatatttaggtcaaagaagctgctgccaaactttgggaagatgctggagaacatcttcctgccccttttcaaggccactatcaacccccaagatcatcgagagcttcacctcttccttaaatatgtgacggggtttgacagcgtggatgatgagtccaagcacagcgaccacatgttttccgacaagagcccaaacccggacgtctggaccagtgagcagaacccaccctacagctactacctgtactacatgtatgccaacatcatggtgctcaacaacctccgcagggagcgcggcctgagcacgttcctgttccggccgcactgtggggaagccggctccatcacccacctggtgtctgccttcctcactgctgacaacatttcccacgggctgctcctcaagaagagtccggtattgcagtatctctactaccttgctcagatccccattgccatgtctcctcttagcaacaacagtttgttcctcgaatattccaagaaccctctgagggaattcctacacaagggactgcatgtttctctttccaccgatgaccccatgcagttccactacacgaaggaagcacttatggaagaatatgccattgcagctcaagtgtggaagctgagcacctgcgacctgtgtgagatcgccaggaacagcgtgctgcagagcggcctctcgcatcaggaaaagcaaaagtttctgggacaaaattattataaagaaggacctgaaggaaatgatattcgaaagacaaatgtggctcagatccggatggcattccgatatgagaccttatgcaatgagctcagcttcctgtctgatgctatgaaatcagaagagatcaccgccttgaccaactaggtccagcatttgacatgcattttaactttttggttcaatttcaagtctgctgtggctaatagtggtcaagattccgaactaggactttcctctgtgaagaggatgcctctgaagaaattttaaactggtgattttggttgcactgctcactttaagagttaacatgctcacttgttagtatttctgagtaacaagatggtgacttctccttggggatctgggagctgagcacttgtctatacttgttcctaattttccaagtatttctcttgaaactgccagtgcctgaactgttggggccaggattttccctggtcagatgccaagtaacatgtggttttctgccatacttttctccattggcccaggtaggctaattggtagttgttcatttcagcctctggatggctggctgccttaaacacaatcaatttcaaagctccatttcataaaggggctactttgaaggagttaagatggaagacttccttcttgacaaattgtgtttttagtgaatttcttaaaccgttttatttagccctccttccctctttctagttgg

SEQ ID NO: 1221 - DNA, 576 bp, Homo sapiens
  source 1..576: mol_type = unassigned DNA
cacagagaggaggacatcagcatggagagactgcagatcagtcccagcaaacctgtggaggccagttaaatgcctggagctcatcccctgccattcaaacggggtcttgctctgttgcctggctggagtgcagtggtgctaacatgactcactgcacccttgacctcctggactcaagtgatcctcccacctcagcctcccaagtagctgggactccaagtgggtgccactacagccactgagatgccgcggcagtttcccaagctgaacatctctgaagtggatgagcaagtccggctcctggcggagaaggtgtttgctaaagtgctccgagaagaggacagcaaagatgccctgtccctgttcactgtcccagaggactgccccatcgggcaaaaggaagccaaggagagggagctgcagaaggagctggcagagcagaagtctgtggagaccgcaaaaagaaagaaaagtttcaagatgattcggtcccagtccctgtctctgcaaatgccgccacagcaagattggaagggccccccggcagccagtccggccatgtctcccacaacccct

SEQ ID NO: 1222 - DNA, 2143 bp, Homo sapiens
  source 1..2143: mol_type = unassigned DNA
cggcgctgcccgcccagttcctgttcccagactgaggcccagcccccttcgcccgtttccatcacgagtgccgccagcatgtctgacaaactgccctacaaagtcgccgacatcggcctggctgcctggggacgcaaggccctggacattgctgagaacgagatgccgggcctgatgcgtatgcgggagcggtactcggcctccaagccactgaagggcgcccgcatcgctggctgcctgcacatgaccgtggagacggccgtcctcattgagaccctcgtcaccctgggtgctgaggtgcagtggtccagctgcaacatcttctccacccaggaccatgcggcggctgccattgccaaggctggcattccggtgtatgcctggaagggcgaaacggacgaggagtacctgtggtgcattgagcagaccctgtacttcaaggacgggcccctcaacatgattctggacgacgggggcgacctcaccaacctcatccacaccaagtacccgcagcttctgccaggcatccgaggcatctctgaggagaccacgactggggtccacaacctctacaagatgatggccaatgggatcctcaaggtgcctgccatcaatgtcaatgactccgtcaccaagagcaagtttgacaacctctatggctgccgggagtccctcatagatggcatcaagcgggccacagatgtgatgattgccggcaaggtagcggtggtagcaggctatggtgatgtgggcaagggctgtgcccaggccctgcggggtttcggagcccgcgtcatcatcaccgagattgaccccatcaacgcactgcaggctgccatggagggctatgaggtgaccaccatggatgaggcctgtcaggagggcaacatctttgtcaccaccacaggctgtattgacatcatccttggccggcactttgagcagatgaaggatgatgccattgtgtgtaacattggacactttgacgtggagatcgatgtcaagtggctcaacgagaacgccgtggagaaggtgaacatcaagccgcaggtggaccggtatcggttgaagaatgggcgccgcatcatcctgctggccgagggtcggctggtcaacctgggttgtgccatgggccaccccagcttcgtgatgagtaactccttcaccaaccaggtgatggcgcagatcgagctgtggacccatccagacaagtaccccgttggggttcatttcctgcccaagaagctggatgaggcagtggctgaagcccacctgggcaagctgaatgtgaagttgaccaagctaactgagaagcaagcccagtacctgggcatgtcctgtgatggccccttcaagccggatcactaccgctactgagagccaggtctgcgtttcaccctccagctgctgtccttgcccaggccccacctctcctccctaagagctaatggcaccaactttgtgattggtttgtcagtgtcccccatcgactctctggggctgatcacttagtttttggcctctgctgcagccgtcatactgttccaaatgtggcagcgggaacagagtaccctcttcaagccccggtcatgatggaggtcccagccacagggaaccatgagctcagtggtcttggaacagctcactaagtcagtccttccttagcctggaagtcagtagtggagtcacaaagcccatgtgttttgccatctaggccttcacctggtctgtggacttatacctgtgtgcttggtttacaggtccagtggttcttcagcccatgacagatgagaaggggctatattgaagggcaaagaggaactgttgtttgaattttcctgagagcctggcttagtgctgggccttctcttaaacctcattacaatgaggttagtacttttagtccctgttttacaggggttagaatagactgttaaggggcaactgagaaagaacagagaagtgacagctaggggttgagaggggccagaaaaacatgaatgcaggcagatttcgtgaaatctgccaccactttataaccagatggttcctttcacaaccctgggtcaaaaagagaataatttggcctataatgttaaaagaaagcaggaaggtgggtaaataaaaatcttggtgcctggaa

SEQ ID NO: 1223 - DNA, 2366 bp, Homo sapiens
  source 1..2366: mol_type = unassigned DNA
ctggagggaggggcgtggatacagcgggaaaggagagacccctagcggggtggacaagaagggaggaactccacagaactgcttaatccggctccatccccatcagcgggctttctcagcgcctgcacccctctctatcccatctcgaagcctccagttaatccagagtgagacgcaggaccgccgggaggcgagcggggatgctgaagctagggcaggctaaagccccgcggccaaagggcaggcttgtgcgccctccgccccctctccgccccctctccgcccctccgcgcccaggacctaattgtttgcaaaagcaaacacggaaaagccgacatcggcctggctgcctggggacgcaaggccctggacattgctgagaacgagatgccgggcctgatgcgtatgcgggagcggtactcggcctccaagccactgaagggcgcccgcatcgctggctgcctgcacatgaccgtggagacggccgtcctcattgagaccctcgtcaccctgggtgctgaggtgcagtggtccagctgcaacatcttctccacccaggaccatgcggcggctgccattgccaaggctggcattccggtgtatgcctggaagggcgaaacggacgaggagtacctgtggtgcattgagcagaccctgtacttcaaggacgggcccctcaacatgattctggacgacgggggcgacctcaccaacctcatccacaccaagtacccgcagcttctgccaggcatccgaggcatctctgaggagaccacgactggggtccacaacctctacaagatgatggccaatgggatcctcaaggtgcctgccatcaatgtcaatgactccgtcaccaagagcaagtttgacaacctctatggctgccgggagtccctcatagatggcatcaagcgggccacagatgtgatgattgccggcaaggtagcggtggtagcaggctatggtgatgtgggcaagggctgtgcccaggccctgcggggtttcggagcccgcgtcatcatcaccgagattgaccccatcaacgcactgcaggctgccatggagggctatgaggtgaccaccatggatgaggcctgtcaggagggcaacatctttgtcaccaccacaggctgtattgacatcatccttggccggcactttgagcagatgaaggatgatgccattgtgtgtaacattggacactttgacgtggagatcgatgtcaagtggctcaacgagaacgccgtggagaaggtgaacatcaagccgcaggtggaccggtatcggttgaagaatgggcgccgcatcatcctgctggccgagggtcggctggtcaacctgggttgtgccatgggccaccccagcttcgtgatgagtaactccttcaccaaccaggtgatggcgcagatcgagctgtggacccatccagacaagtaccccgttggggttcatttcctgcccaagaagctggatgaggcagtggctgaagcccacctgggcaagctgaatgtgaagttgaccaagctaactgagaagcaagcccagtacctgggcatgtcctgtgatggccccttcaagccggatcactaccgctactgagagccaggtctgcgtttcaccctccagctgctgtccttgcccaggccccacctctcctccctaagagctaatggcaccaactttgtgattggtttgtcagtgtcccccatcgactctctggggctgatcacttagtttttggcctctgctgcagccgtcatactgttccaaatgtggcagcgggaacagagtaccctcttcaagccccggtcatgatggaggtcccagccacagggaaccatgagctcagtggtcttggaacagctcactaagtcagtccttccttagcctggaagtcagtagtggagtcacaaagcccatgtgttttgccatctaggccttcacctggtctgtggacttatacctgtgtgcttggtttacaggtccagtggttcttcagcccatgacagatgagaaggggctatattgaagggcaaagaggaactgttgtttgaattttcctgagagcctggcttagtgctgggccttctcttaaacctcattacaatgaggttagtacttttagtccctgttttacaggggttagaatagactgttaaggggcaactgagaaagaacagagaagtgacagctaggggttgagaggggccagaaaaacatgaatgcaggcagatttcgtgaaatctgccaccactttataaccagatggttcctttcacaaccctgggtcaaaaagagaataatttggcctataatgttaaaagaaagcaggaaggtgggtaaataaaaatcttggtgcctgg

SEQ ID NO: 1224 - DNA, 3040 bp, Homo sapiens
  source 1..3040: mol_type = unassigned DNA
gggccccaggtgggggtcgggggcgcctgcgcgggttgcctccggcagatctgagtgggacatacttttgaaggatgtgcaatgttcaatcataagtgtgacaaaaactgacaagcaggaagcttatgtactcagtgagagtagcatgtttgtctccaagagacgtttcattttgaagacatgtggtaccaccctcttgctgaaagcactggttcccctgttgaagcttgctagggattacagtgggtttgactcaattcaaagcttcttttattctcgtaagaatttcatgaagccttctcaccaagggtacccacaccggaatttccaggaagaaatagagtttcttaatgcaattttcccaaatggagcagcatattgtatgggacgtatgaattctgactgttggtacttatatactctggatttcccagagagtcgggtaatcagtcagccagatcaaaccttggaaattctgatgagtgagcttgacccagcagttatggaccagttctacatgaaagatggtgttactgcaaaggatgtcactcgtgagagtggaattcgtgacctgataccaggttctgtcattgatgccacaatgttcaatccttgtgggtattcgatgaatggaatgaaatcggatggaacttattggactattcacatcactccagaaccagaattttcttatgttagctttgaaacaaacttaagtcagacctcctatgatgacctgatcaggaaagttgtagaagtcttcaagccaggaaaatttgtgaccaccttgtttgttaatcagagttctaaatgtcgcacagtgcttgcttcgccccagaagattgaaggttttaagcgtcttgattgccagagtgctatgttcaatgattacaattttgtttttaccagttttgctaagaagcagcaacaacagcagagttgattaagaaaaatgaagaaaaaacgcaaaaagagaacacatgtagaaggtggtggatgctttctagatgtcgatgctgggggcagtgctttccataaccaccactgtgtagttgcagaaagccctagatgtaatgatagtgtaatcattttgaattgtatgcattattatatcaaggagttagatatcttgcatgaatgctctcttctgtgtttaggtattctctgccactcttgctgtgaaattgaagtgcatgtagaaaaaaccttttactatatgaaactttacaacacttgtgaaagcaactcaatttggtttatgcacagtgtaatatttctccaagtatcatccaaaattccccacagacaaggctttcgtcctcattaggtgttggcctcagcctaaccctctaggactgttctattaaattgctgccagaattttacatccagttacctccactttctagaacatattctttactaatgttattgaaaccaatttctacttcatactgatgtttttggaaacagcaattaaagtttttcttccatgagttgagtccttaagaaaatgattccagttactcattttgcatatttgctattttaacattattggaccctgcatttatagtcctttgatttcttccctctccctggtgtctcccccaagaccccaaataaagcaatacactgttaacactgtgggtttatatactaattctataccccagatggggaatgggggagatggtccctgggcttaatattctttaaagggcatgggaatttagcctctcttttattgtaatgtgctcttttggaaaatagttggttagcagggaagacccagagttgtagattgagattagggtgtactggctgaactgtggaaaacatacaattctgtgttcctcagtaaatgagattagcgtctaatgagtagcacccctttactaacttagtagtagtataaaatcatttttatttagttaattaccagagagatttagcataattttgttctggattcagtaaatcaagtcagcttggatcattcaccttaacttttcctttagcagccatttccactagtttccattaagtagtgttctataaactttgatccaaagcagaatcaatgtcttttccatctcgtgacttaaagttctgtgactgtgatgcatgtgagtgttccgacttcatctgttcctcttaactacggtgtttcccttaccatggcattcataggatgaaatgaatgactgcccagaatgagaatttgtccagattattcagataaacatcataaagcagaatacattataaataagtagaatatgaataaatagaataataaaattccaaaatactcaatgggaaatgactagtaatataggctttcaagagttggtaccttttagctatatttgcagattctctgggattttaaggaactgagaaaacagcaaagttgactaaattttatatttcttgtcctctaaatattttgataatttctggattgatgcagtgatgtttttgttccttccgtatttataaatgaaacacctttttttagtgtttctaaacctaaaatctacttggtttgaaatcaagtggttggaacactgtttgacttttatttgaagcatgttgttgattgaaaatttcattgaggaagttttcaatcagtgtgatcagtttgattctgtaatgagcacagcacctaatattttgaggagctctgttttgaggaccaatgcttaaggtggactttgttcgtaaacaatatcccaatagatttgttgacttgaggtctggtttggttttgtttttgttttgttttgttttgttttgtttccaatagaattaagaattctaatgttgaaaaactgcacaaatttttatgggacaaagcctagaaaagagaaatgtagtttgaatcataatctaaatcatcgtatgatagaagagggaaagttttggtgccataatttctcctttcactggtgttggacttaaatcagttgaaatgtatttctgtaccacaatttacgcttcaataaaagtttaattgtctagtgacattcagaaa

SEQ ID NO: 1225 - DNA, 1605 bp, Homo sapiens
  source 1..1605: mol_type = unassigned DNA
gcttacacagtatggccggcgacattagctagcgctcgctctactctctctaacgggaaagcagcggaatacaagagactgaactgtatctgcctctatttccaaaagactcacgttcaactttcgctcacacaaagccgggaaaattttattagtcctttttttaaaaaaagttaatataaaattatagcaaaaaaaaaaaggaacctgaactttagtaacacagctggaacaatccgcagcggcggcggcagcggcgggagaagaggtttaatttagttgattttctgtggttgttggttgttcgctagtctcacggtgatggaagctgcacattttttcgaagggaccgagaagctgctggaggtttggttctcccggcagcagcccgacgcaaaccaaggatctggggatcttcgcactatcccaagtgagagtagcatgtttgtctccaagagacgtttcattttgaagacatgtggtaccaccctcttgctgaaagcactggttcccctgttgaagcttgctagggattacagtgggtttgactcaattcaaagcttcttttattctcgtaagaatttcatgaagccttctcaccaagggtacccacaccggaatttccaggaagaaatagagtttcttaatgcaattttcccaaatggagcagcatattgtatgggacgtatgaattctgactgttggtacttatatactctggatttcccagagagtcgggtaatcagtcagccagatcaaaccttggaaattctgatgagtgagcttgacccagcagttatggaccagttctacatgaaagatggtgttactgcaaaggatgtcactcgtgagagtggaattcgtgacctgataccaggttctgtcattgatgccacaatgttcaatccttgtgggtattcgatgaatggaatgaaatcggatggaacttattggactattcacatcactccagaaccagaattttcttatgttagctttgaaacaaacttaagtcagacctcctatgatgacctgatcaggaaagttgtagaagtcttcaagccaggaaaatttgtgaccaccttgtttgttaatcagagttctaaatgtcgcacagtgcttgcttcgccccagaagattgaaggttttaagcgtcttgattgccagagtgctatgttcaatgattacaattttgtttttaccagttttgctaagaagcagcaacaacagcagagttgattaagaaaaatgaagaaaaaacgcaaaaagagaacacatgtagaaggtggtggatgctttctagatgtcgatgctgggggcagtgctttccataaccaccactgtgtagttgcagaaagccctagatgtaatgatagtgtaatcattttgaattgtatgcattattatatcaaggagttagatatcttgcatgaatgctctcttctgtgtttaggtattctctgccactcttgctgtgaaattgaagtgcatgtagaaaaaaccttttactatatgaaactttacaacacttgtgaaagcaactcaatttggtttatgcacagtgtaatatttctccaagtatcatccaaaattccccacagacaa

SEQ ID NO: 1226 - DNA, 3121 bp, Homo sapiens
  source 1..3121: mol_type = unassigned DNA
tcacgcagcgctctcgcttacacagtatggccggcgacattagctagcgctcgctctactctctctaacgggaaagcagcggaatacaagagactgaactgtatctgcctctatttccaaaagactcacgttcaactttcgctcacacaaagccgggaaaattttattagtcctttttttaaaaaaagttaatataaaattatagcaaaaaaaaaaaggaacctgaactttagtaacacagctggaacaatccgcagcggcggcggcagcggcgggagaagaggtttaatttagttgattttctgtggttgttggttgttcgctagtctcacggtgatggaagctgcacattttttcgaagggaccgagaagctgctggaggtttggttctcccggcagcagcccgacgcaaaccaaggatctggggatcttcgcactatcccaagatggagcagcatattgtatgggacgtatgaattctgactgttggtacttatatactctggatttcccagagagtcgggtaatcagtcagccagatcaaaccttggaaattctgatgagtgagcttgacccagcagttatggaccagttctacatgaaagatggtgttactgcaaaggatgtcactcgtgagagtggaattcgtgacctgataccaggttctgtcattgatgccacaatgttcaatccttgtgggtattcgatgaatggaatgaaatcggatggaacttattggactattcacatcactccagaaccagaattttcttatgttagctttgaaacaaacttaagtcagacctcctatgatgacctgatcaggaaagttgtagaagtcttcaagccaggaaaatttgtgaccaccttgtttgttaatcagagttctaaatgtcgcacagtgcttgcttcgccccagaagattgaaggttttaagcgtcttgattgccagagtgctatgttcaatgattacaattttgtttttaccagttttgctaagaagcagcaacaacagcagagttgattaagaaaaatgaagaaaaaacgcaaaaagagaacacatgtagaaggtggtggatgctttctagatgtcgatgctgggggcagtgctttccataaccaccactgtgtagttgcagaaagccctagatgtaatgatagtgtaatcattttgaattgtatgcattattatatcaaggagttagatatcttgcatgaatgctctcttctgtgtttaggtattctctgccactcttgctgtgaaattgaagtgcatgtagaaaaaaccttttactatatgaaactttacaacacttgtgaaagcaactcaatttggtttatgcacagtgtaatatttctccaagtatcatccaaaattccccacagacaaggctttcgtcctcattaggtgttggcctcagcctaaccctctaggactgttctattaaattgctgccagaattttacatccagttacctccactttctagaacatattctttactaatgttattgaaaccaatttctacttcatactgatgtttttggaaacagcaattaaagtttttcttccatgagttgagtccttaagaaaatgattccagttactcattttgcatatttgctattttaacattattggaccctgcatttatagtcctttgatttcttccctctccctggtgtctcccccaagaccccaaataaagcaatacactgttaacactgtgggtttatatactaattctataccccagatggggaatgggggagatggtccctgggcttaatattctttaaagggcatgggaatttagcctctcttttattgtaatgtgctcttttggaaaatagttggttagcagggaagacccagagttgtagattgagattagggtgtactggctgaactgtggaaaacatacaattctgtgttcctcagtaaatgagattagcgtctaatgagtagcacccctttactaacttagtagtagtataaaatcatttttatttagttaattaccagagagatttagcataattttgttctggattcagtaaatcaagtcagcttggatcattcaccttaacttttcctttagcagccatttccactagtttccattaagtagtgttctataaactttgatccaaagcagaatcaatgtcttttccatctcgtgacttaaagttctgtgactgtgatgcatgtgagtgttccgacttcatctgttcctcttaactacggtgtttcccttaccatggcattcataggatgaaatgaatgactgcccagaatgagaatttgtccagattattcagataaacatcataaagcagaatacattataaataagtagaatatgaataaatagaataataaaattccaaaatactcaatgggaaatgactagtaatataggctttcaagagttggtaccttttagctatatttgcagattctctgggattttaaggaactgagaaaacagcaaagttgactaaattttatatttcttgtcctctaaatattttgataatttctggattgatgcagtgatgtttttgttccttccgtatttataaatgaaacacctttttttagtgtttctaaacctaaaatctacttggtttgaaatcaagtggttggaacactgtttgacttttatttgaagcatgttgttgattgaaaatttcattgaggaagttttcaatcagtgtgatcagtttgattctgtaatgagcacagcacctaatattttgaggagctctgttttgaggaccaatgcttaaggtggactttgttcgtaaacaatatcccaatagatttgttgacttgaggtctggtttggttttgtttttgttttgttttgttttgttttgtttccaatagaattaagaattctaatgttgaaaaactgcacaaatttttatgggacaaagcctagaaaagagaaatgtagtttgaatcataatctaaatcatcgtatgatagaagagggaaagttttggtgccataatttctcctttcactggtgttggacttaaatcagttgaaatgtatttctgtaccacaatttacgcttcaataaaagtttaattgtctagtgacattcagaaa

SEQ ID NO: 1227 - DNA, 3438 bp, Homo sapiens
  source 1..3438: mol_type = unassigned DNA
tcacgcagcgctctcgcttacacagtatggccggcgacattagctagcgctcgctctactctctctaacgggaaagcagcggaatacaagagactgaactgtatctgcctctatttccaaaagactcacgttcaactttcgctcacacaaagccgggaaaattttattagtcctttttttaaaaaaagttaatataaaattatagcaaaaaaaaaaaggaacctgaactttagtaacacagctggaacaatccgcagcggcggcggcagcggcgggagaagaggtttaatttagttgattttctgtggttgttggttgttcgctagtctcacggtgatggaagctgcacattttttcgaagggaccgagaagctgctggaggtttggttctcccggcagcagcccgacgcaaaccaaggatctggggatcttcgcactatcccaagatctgagtgggacatacttttgaaggatgtgcaatgttcaatcataagtgtgacaaaaactgacaagcaggaagcttatgtactcagtgagagtagcatgtttgtctccaagagacgtttcattttgaagacatgtggtaccaccctcttgctgaaagcactggttcccctgttgaagcttgctagggattacagtgggtttgactcaattcaaagcttcttttattctcgtaagaatttcatgaagccttctcaccaagggtacccacaccggaatttccaggaagaaatagagtttcttaatgcaattttcccaaatggagcagcatattgtatgggacgtatgaattctgactgttggtacttatatactctggatttcccagagagtcgggtaatcagtcagccagatcaaaccttggaaattctgatgagtgagcttgacccagcagttatggaccagttctacatgaaagatggtgttactgcaaaggatgtcactcgtgagagtggaattcgtgacctgataccaggttctgtcattgatgccacaatgttcaatccttgtgggtattcgatgaatggaatgaaatcggatggaacttattggactattcacatcactccagaaccagaattttcttatgttagctttgaaacaaacttaagtcagacctcctatgatgacctgatcaggaaagttgtagaagtcttcaagccaggaaaatttgtgaccaccttgtttgttaatcagagttctaaatgtcgcacagtgcttgcttcgccccagaagattgaaggttttaagcgtcttgattgccagagtgctatgttcaatgattacaattttgtttttaccagttttgctaagaagcagcaacaacagcagagttgattaagaaaaatgaagaaaaaacgcaaaaagagaacacatgtagaaggtggtggatgctttctagatgtcgatgctgggggcagtgctttccataaccaccactgtgtagttgcagaaagccctagatgtaatgatagtgtaatcattttgaattgtatgcattattatatcaaggagttagatatcttgcatgaatgctctcttctgtgtttaggtattctctgccactcttgctgtgaaattgaagtgcatgtagaaaaaaccttttactatatgaaactttacaacacttgtgaaagcaactcaatttggtttatgcacagtgtaatatttctccaagtatcatccaaaattccccacagacaaggctttcgtcctcattaggtgttggcctcagcctaaccctctaggactgttctattaaattgctgccagaattttacatccagttacctccactttctagaacatattctttactaatgttattgaaaccaatttctacttcatactgatgtttttggaaacagcaattaaagtttttcttccatgagttgagtccttaagaaaatgattccagttactcattttgcatatttgctattttaacattattggaccctgcatttatagtcctttgatttcttccctctccctggtgtctcccccaagaccccaaataaagcaatacactgttaacactgtgggtttatatactaattctataccccagatggggaatgggggagatggtccctgggcttaatattctttaaagggcatgggaatttagcctctcttttattgtaatgtgctcttttggaaaatagttggttagcagggaagacccagagttgtagattgagattagggtgtactggctgaactgtggaaaacatacaattctgtgttcctcagtaaatgagattagcgtctaatgagtagcacccctttactaacttagtagtagtataaaatcatttttatttagttaattaccagagagatttagcataattttgttctggattcagtaaatcaagtcagcttggatcattcaccttaacttttcctttagcagccatttccactagtttccattaagtagtgttctataaactttgatccaaagcagaatcaatgtcttttccatctcgtgacttaaagttctgtgactgtgatgcatgtgagtgttccgacttcatctgttcctcttaactacggtgtttcccttaccatggcattcataggatgaaatgaatgactgcccagaatgagaatttgtccagattattcagataaacatcataaagcagaatacattataaataagtagaatatgaataaatagaataataaaattccaaaatactcaatgggaaatgactagtaatataggctttcaagagttggtaccttttagctatatttgcagattctctgggattttaaggaactgagaaaacagcaaagttgactaaattttatatttcttgtcctctaaatattttgataatttctggattgatgcagtgatgtttttgttccttccgtatttataaatgaaacacctttttttagtgtttctaaacctaaaatctacttggtttgaaatcaagtggttggaacactgtttgacttttatttgaagcatgttgttgattgaaaatttcattgaggaagttttcaatcagtgtgatcagtttgattctgtaatgagcacagcacctaatattttgaggagctctgttttgaggaccaatgcttaaggtggactttgttcgtaaacaatatcccaatagatttgttgacttgaggtctggtttggttttgtttttgttttgttttgttttgttttgtttccaatagaattaagaattctaatgttgaaaaactgcacaaatttttatgggacaaagcctagaaaagagaaatgtagtttgaatcataatctaaatcatcgtatgatagaagagggaaagttttggtgccataatttctcctttcactggtgttggacttaaatcagttgaaatgtatttctgtaccacaatttacgcttcaataaaagtttaattgtctagtgacattcagaaa

SEQ ID NO: 1228 - DNA, 1181 bp, Homo sapiens
  source 1..1181: mol_type = unassigned DNA
cgcttacacagtatggccggcgacattagctagcgctcgctctactctctctaacgggaaagcagcggaatacaagagactgaactgtatctgcctctatttccaaaagactcacgttcaactttcgctcacacaaagccgggaaaattttattagtcctttttttaaaaaaagttaatataaaattatagcaaaaaaaaaaaggaacctgaactttagtaacacagctggaacaatccgcagcggcggcggcagcggcgggagaagaggtttaatttagttgattttctgtggttgttggttgttcgctagtctcacggtgatggaagctgcacattttttcgaagggaccgagaagctgctggaggtttggttctcccggcagcagcccgacgcaaaccaaggatctggggatcttcgcactatcccaaggtacttatatactctggatttcccagagagtcgggtaatcagtcagccagatcaaaccttggaaattctgatgagtgagcttgacccagcagttatggaccagttctacatgaaagatggtgttactgcaaaggatgtcactcgtgagagtggaattcgtgacctgataccaggttctgtcattgatgccacaatgttcaatccttgtgggtattcgatgaatggaatgaaatcggatggaacttattggactattcacatcactccagaaccagaattttcttatgttagctttgaaacaaacttaagtcagacctcctatgatgacctgatcaggaaagttgtagaagtcttcaagccaggaaaatttgtgaccaccttgtttgttaatcagagttctaaatgtcgcacagtgcttgcttcgccccagaagattgaaggttttaagcgtcttgattgccagagtgctatgttcaatgattacaattttgtttttaccagttttgctaagaagcagcaacaacagcagagttgattaagaaaaatgaagaaaaaacgcaaaaagagaacacatgtagaaggtggtggatgctttctagatgtcgatgctgggggcagtgctttccataaccaccactgtgtagttgcagaaagccctagatgtaatgatagtgtaatcattttgaattgtatgcattattatatcaaggagttagatatcttgcatgaatgctctcttctgtgtttag

SEQ ID NO: 1229 - DNA, 12503 bp, Homo sapiens
  source 1..12503: mol_type = unassigned DNA
gcggccgctgcatggcgctgagatggcgggggcgccgcgcggcggaggcggcggcggaggcggcgcgggcgagcccgggggcgccgagcgggcggccgggacaagccgccggcgcgggctccgggcgtgcgacgaggagttcgcttgcccagagctggaggcgctgttccgcggctacacgctgcggctggagcaggcggccacgctgaaggcgctggccgttctcagcctgctggcgggcgcgctggcgctggccgagctgctgggcgcgccggggcccgcgcccggcctggccaagggctcacacccggtgcactgcgtcctcttcctggcgctgctcgtggtaaccaacgtccggtccctgcaggtgccccagctgcagcaggtcggccagctggcgctgctcttcagcctcaccttcgcgctgctctgctgtcctttcgcgctgggcggccccgcccggggttccgccggggccgctggggggccagcgaccgccgaacaaggggtttggcagctccttttggtcaccttcgtgtcctatgccttgctgcccgtgcgcagcctgctggccataggctttgggctcgtggtggctgcgtcgcacttgctggtcacagccaccttggtccccgccaagcgcccacgtctctggaggacgctcggtgccaatgccttgctcttcgtcggtgtgaacatgtatggggtctttgtgcggattctgactgagcgttcacagaggaaggcgttcctgcaggcccggagctgcattgaggaccgactgaggctggaggatgagaacgagaagcaggagcggctcctcatgagcctcctgccccggaacgttgccatggagatgaaggaggacttcctgaagccccctgagaggattttccacaagatttacatccagaggcacgacaatgtgagcatcctgtttgctgacatcgtgggtttcacgggcttggcatcccagtgcacagcccaggagctggtgaaactcctcaatgagctcttcggcaagttcgatgaattagccacggagaaccactgtcgccgcatcaagattctcggggactgctactactgcgtgtcgggcctcacccagcccaagactgaccatgcccactgctgtgtggagatgggactcgacatgattgataccatcacatctgtggctgaagccaccgaggtggatctgaacatgcgtgtgggtctgcacacgggcagggtcctctgtggtgtcctgggcttgcgcaagtggcagtacgacgtgtggtccaatgatgtgaccttggccaatgtcatggaagccgctggcctgccagggaaggttcatatcacaaagacgaccctagcgtgcttgaatggggactacgaggtagaaccgggttacggacatgagaggaacagtttcttgaaaactcataacatcgaaaccttttttattgtgccatcccatcgccgaaagatatttccaggcctgattctctcagatataaaaccggccaaaaggatgaagttcaagactgtctgctacctgctggtgcagctcatgcactgccggaaaatgttcaaggccgagatccccttctccaatgtcatgacctgcgaggacgatgacaagcggagggcattaagaacagcctcggaaaaactcagaaaccgctcatctttttctaccaacgttgtctacaccaccccgggcactcgcgtcaacaggtacatcagccgcctcttagaagcccgccagacagagctggagatggcagacctgaacttctttaccctgaagtacaaacatgtcgaacgggagcaaaagtaccaccagcttcaggacgagtatttcaccagcgccgttgtcctcaccctcatcctggctgccttatttggccttgtctaccttctaatattcccacagagtgtggtcgtcctgctcctgctagtattctgcatctgcttcctggtggcctgtgtcctgtacctgcacatcacccgggtccagtgttttccagggtgcctgacgattcagattcgcactgtcctgtgtattttcatagtggtcttaatctactcagtagcccaaggttgtgtggtgggctgcctgccttgggcctggagctccaagcccaacagttccctggtggtcctttcgtctgggggccagcgcacagccctgcccaccctgccctgcgagtctacacaccatgccctgctctgctgcctggtgggcaccctcccgctagccatatttttccgggtgtcctccttgccaaaaatgatcctgctctccgggctcaccacgtcctacatcctcgttctggagctcagcggatacaccaggactgggggtggtgccgtctccgggcgcagctacgagccgattgtggccatcctgctcttctcctgtgcgctggccctgcatgccaggcaggtggacatcaggctgaggctggactacctctgggccgcacaggcagaggaggagcgagaggacatggagaaggtgaagctggacaacaggcgcatcctcttcaacctcctgccggcccacgtcgcccagcacttcctcatgtccaaccctcggaacatggacctctactaccagtcctactcccaggtgggcgtcatgtttgcctccatccccaacttcaatgacttctacatcgagctggacggcaacaacatgggggtggagtgtctgcggcttctcaacgagatcatcgccgactttgacgagctcatggaaaaagacttttacaaggacatagagaagatcaagaccatcgggagcacctacatggccgctgtggggctagcgcccacctcggggaccaaggctaagaagtccatctcctcccacctgagcacgctggcggactttgccattgagatgtttgacgttctggatgaaatcaactaccagtcttacaacgactttgtcctccgagttggcatcaatgttggccctgtggtggctggagtgattggcgctcgcaggccccagtacgacatctggggaaacacagtcaacgtggccagtcggatggatagcacaggggtccagggcagaatccaggtgactgaggaagtccaccggctgctgagaaggtgcccctaccactttgtgtgccgaggcaaagtcagtgtcaagggcaaaggcgagatgttgacatactttctagaaggcaggactgatggaaacggctcccaaatcaggtccctgggcttggatcggaaaatgtgtccatttgggagagctggccttcagggcagacgtccccccgtgtgccccatgcctggcgtctcagtcagggctgggctccctccacactccccaggccagtacctgccctctgcagcagctgggaaggaggcttagtggagcccacgtgggcctctggggtgcacatggggtgggaatgctccgggggtgacacaggccacggtggctccagccaggaccagccagaccagcagagcagggagccacttgccagggtggaggaggagcattgtccaggcatggcctgtggcccgagggccaaccaccgagcaggcacagcacagcagtgactcggtgaggggaggacacccgactgtgcacacttccaggcctccctggagaggtgtccactccatccttccctccgtggcgtagggagcactgtttctttccagcaagcctgttcaggtttggccaggtcggcatcaatgtaaggaccttcagagcatcccagggttacagcaagagccactgaggtgtggctggcagagcaactgaggagctctgcgagagtgtgccctctgagacagccctgtccgccccgcccaggtgggacctgacatacaggcggctccagccctgggcagcggcttcaagagccagagtgggaagtcaggcctctctgggaaggtcacaaggcctggggttgttcacaccacaggcacaatacagagctgtccactcttgaactggaccgtctggggagaattgagaagctgcctctcactgcatggatagtggtggctgctggctttcaagcgtggttttttgctaagagccagaggcaggtcttctggagttctcaggggggccctgtgaccccctctccacaaccatggccagcatcggcttcttgctgcacctgtgcattctccacccctccgccaatggcttccagctcctaaaacacctggacattccccatcctgcaccggcactgtgtttgttcagagaaaacgaagggtgtcatttcttcttttccctgtggcatcgtggatcctttacatttagcaacaacagtgtgaggctccacttctgttgaatatgagcggctgtcacacccatgagcaagtttccttgatggaagatgctgtttctccggcagaaccaaccctccaggacgaagtttcagaattggctgatggtcgtgagtgcaggtgtccctgttgtaatttgcagggaaattgactgcaggtgatagtgttgacgtctgacgtctgacaacctcctatgtgcatgtctaaatagtcacaatgaagatgaaaataaggatgatggggacggggtccaggagggccactgggaaggcactatccagaaatagtggacagaggtctggcatgtggaaaccttggatctcggtcacagggaggaaggcagctagaaatgggagggaagcttctgggtaggcaccatagtaggggaatgtctaaagacccactgctctgagatgtggtcagagaggtttctgtggactgcagatgaggcctgagccctgcctatgctcaaagccagcagggttgggggtccgcctcctcactgctcctcaacagctgtaaccctttcctgagggccccgacttttcagaataggagcagagagaagcccagacttccttccctggagtgtagacctgtgtgtgggacctgctccaggctgatccctgtccgcacaggtgggtgatgtccttggctgctgccgtcagaggcagccccctgcacagggaggggctgatcctgcctcagctgtgtggccatgtgggggcagcaggggcctgggccatagctgggggaggccagaccctgagggctttgcagggcggccagtgcagtgatgcctggcgcttccagctgagacaggagtccggacagaggtgggcagggtggatggcttcgggcagggaaggcgggtagaggctgcatgtgggggcccctgtctgcctgtccttagggtgtggattaggctctggcttctgtgatggtgcaagaggcaggatggtctccagacaccttcttgcagagtgattttgaccaatgcctttccagcaccttcccctggttatgacagggagctcccaggccaggccacatgaccccacaggtaggctgaccccatggacccactggagactttgagggcagagctcgggcacctttcatcttccttgggtggtcctcatgtcgctgtccgctcatgttcctggtgttctggcatcaccttgtgccggtgggggctgggctcccgtgaggtcctagggcagaaggaggtgcttgcagggcctctcgctgctactgggacatccacaggacctaatgtttatgtggaatctccaggctgccatcgagggctcctgagctcatcctgaggacccagggtccatctgagctggctgtgggctgagatcctggctggggccctgctgtcaacctctcctccaggccctgccttgtccctgctcctgtgctttcctctcttcaggacaaatggtttgtccttatggtcccctttccactaggattttctcatcctcatctgtctatcccagccggatttaaagcagtcacttcagacaggagccacagggagcctgtgagggagtagtgcggtggtggtgagtgtggctgccctggctcccccagctcaccgtggtgctgtccttgacccacgagctgttgagaagggtgcagagcccctggcacagccaaccctgttgcccccagtgccgctgcccagcttcggccatccaggtggtgggtagacagaggagtgaaccccaaaggtgtccatgccccagttctaagccctgtggccaggtgctgtcacacagcaaaggggactttgcaggtggaattagggttagggatctaaggatgggaggggaacttggtttatctgggtgggctcagtgaccccttggaatggctgagggaggcaggagagcctggaaagattcgaagtgtcacagagatggtgccgtcattgctggcttaaagacaaggggccaggagccaacaccagaggccactccacaaccccagcgccagtcagcaaggaagccgggtgtcgctcacacaaccagaaggagctgagtttggcaacaacccaagtgagcctgaagcagattcgccccagagcctccaggcgtgagtggagcccagtccagcgacaccttggtttggcctgtgagactgagaagagagccagccacgccatgctgtgcctggggtccacagagccgggaggtcacacatgtacatcctggaagctgcccaaggtgtggccacttgtagggcagtgagaggaagccgtcgcggggaccatgctgccttctctgggctcacgactgttctggaaaggaccccatggcagacttggcaaggtctccacttcaggggcaaacatctccatcatcagcaactccaaaccccagccacttcctgggagttcaggaactgtgtttagccataatgtcccttggggtttggtgaaaaacaacttcctttttatttgtgggaaaactgtattatattgccttatttatttttaatcatgtacaatattcatgtacaaatgttagagccattcgggtaggattctctctaaattatttattgaagaggctttgtaaatagtgcaccagtgacaggtgctgcctgtttactcgtaccaaaaatgaagacaagccccacacccacctcagcccttgcttggccatgctgtggccctttggaaatgaccctgtgtgctcccctcgcgacccttgcatgcctttcatgcctgatgccgtagagtagaacacagccccggaatgcttccagttgcttgcaagggaccatgccggcccgggtggtccatgcctgcggggtgtctgtatcctgcaggaggacgcccctacagacccagcaacccaagttgccagcccgtgtttctcagactttaaagccaccagggcttctggaacacctgtcatagaagcaataactctaactctatactgtagagatgagtctggtccgaagcagattagtaatttagagataagccatgcatacaagtttgccccattctctggcttggggtggtgggaggcggggagctgccactcccaaagcctccaccccttcctgaagacccagctatgaaaccgcagttcctgtgggttgggctgcccaggctggtcagagctcagcaccccaggtctggtgagcagacagagccggcgttaaaccccgatcaggtcattgtcaccacacccttgcttggatgaggaaggaaggaggcaaaggcacccactccatccaagatccgttccaattgatgagcctcagtactggcctcacactgaccaacggtggtatgctgcagtttgttggtttggtgcagagtctaaaggataacatatcaaggcttacctgtgataggccattttaaggaaatggtggcactctgaaggctgtccccattcaccttccacaatgctggtaccatcctggtagaagagccctctgaacaggacacctgttcaggcctgggggccccatgctaggcttgcctgggtgtgagaaggtcgaactgggtggcttaggccttcaaattgagcttgggggtgtccaagagaggggtcttattcgaggaactcacataccccaaataaccatcagtgcacaaatcattccatgctctttggcaccaggcaggagatgctgcaggcaggtgtccgtagttggcaaaaatgggcagtaggggaaatggagttgcttcaacctttctcagtcccggccctcactgcacccaccaagtcaagcagagctgggtgggctgagaccagcatcccagctggactgagcctggggggaggggctggagccaaggagcccccctgggtgggggcatcaggagcaggggcagggcctgaggactgctccccctgcatggagggcaggccaggatggagcccagggtagactttgaggaaggctcagtgggctcagcagaaggaaggctcttctcatagttgtggtttttcacagatggatttgggtgatctgagtgtggtcaggccctgccgttggggaatgaatgccacacggggtttgtctgtaagctgcagtgtctgtgattctgtgtgaactgacagcagggagctgaaggacaggccccggccttgggagaggacacgggcatgggctgctggatgcagggctcccagggctgtgaaggcagaggggtctctggaggcagacagggtgggctgggggccagcagcagggggcagagccccagccagggcagctgcttcctgcacatagacattcctcctgcgcagggccaagtgcccatgagcacagccccagacagacacggtggggagcttggagccctccgctcacctagaggagccctgggacacgcactggaaagtattctaggggcttcctgccttatccttctgtttgttcatacacttagtgaaagcagatcctgtactaggatgtgaggatatctgtcacctgcgtggtccattccataaacaccagattccatttcagttgccacacattttggggctagacttccctaaacaacatgccattgtgaaataatgcatatatttgtatttttaaatttccctgaaaatttaatctattctgttccatatgaagtctgtttcactaccttaaaaaatagatactccactagaggctgtgcttaattcaaatccatgtgtgtgcctgcattacatgtgtgaacacgtgtttctgtcgtgtgtgtcatgcacatctgtgtgttgcatagcataagccaaatgaaaatcatttgttcatgggattcatatgaggaacaaaattaaatttgaatacagtcagataactgccacgcagggcatttggggaaccatccccgaatgccctgatgtgatttccctcagaaaatccttgttattagaggagaaggtctgggcaggggcagcagcatctcagacatcaagtcaactttatcatctactacatcagcactgaagtccaggggcattgaggcactaactaggttccattttctttggtttggttacttattttttctttttgggttctcggtgtgcagaggctgtagagagagcctcagggcggtgaccgctgcaggaattcggccctccagctcccctccagttaccaggagccgatttggaggccaggccttcccagctgagtgtctgtcagcttcattctctctcagctgtgcagtggaagagcaacaacagacaggtgaccttcttgggttgtgcttcacaatggactgggaaaaacatctttgaaatcaggaaatcaggccgggcgcagtggctcatgcctgtaagcccagcactttgggaggcggaggcgggtggatccattgaggtcaggagctcaagaccagcctggtcaacatggtgaaaccccgtctctactaaaaatacaaaaaaaaaattagctgggcgtgttggcgggagcctgtagtcccagctacacgggaggctaaggtgggagaattgcttgaacccgggaggcggaggttgcagtgagctgagattgcaccattgcactccagcctgggcgacagagcaagactctctcaaaaaaaaaaaaaaaagaaagaaagaaatcagaaaatcgaccacagtggtagccacctggcctaatgctgtgtttttgtacctgacaggggtcactcattttaggcacaactccttcattctttgtgaaattagtgagtttccttctacccgtcaccagattcaatatgttctattaatacaccgataaccacaggggaagggcacttgtcgctctcccacctggttaccacagtctccatgggtcttttgccgtgaccacaaataaaggaaacactcatcactagtatctaagtcgggctttacagtaactatgcaccttctgtgtgcttcacctcactctctacttcaaacagcccatggagggaggtattattatactccttatgttgacagtgaagaatctgaggcccagagaggttggggacttgagtaaagtcacacagccctgagaggcaggaccagggttccattcctgctctatccagttccaagcccttgtgttttccattatgtttagtgcctctttgctaacagcaacatctgcaagatttgtgttggttttgatggagaactctagctcatccacatgctagtgcccaagtggtggaggggccacctcagcaggtgggttctgaatgcagccaaggctgtccccgcaatgggtgagactcgctccaactgcccgccctcagagcaggtgcctaagtcctccctggcactggcaggccttacctcacattgctaaattaaagcaatgcaattcctcttgggtaagaggaattcctccttctttactaactgatccccagcaaggaaataaaatgttaggctttaaaaatccctactttgtcatatcagactatattctaaaactatatttgagcgaaacctgtcattgcgtctaatttcaaatatacagaatctccttaagagctgttgccttatttttttgtaaagcctctctgacatcaaatggggagaaatggtggcacctccagacaccctgaaactacacaccatttcttccctgctcagcttctgctcaggagttctgtgagctatgggaaggccattggttgtatttgctacttttactttcatcttcctctgctgtagagccatttaatgttattgtcatatgctgctggtgaggtaaaggtgggtccgggtgccttcccaggggttagaggatgttcaaagggccgatttcagcaggagttcagagggcttatgatggatggtgagagatttgacaaccaccagagcacatgtgctctgaccctctcctgggcattggttcctgctggtaccgggcggttcagaccttcaaataggttgctttcaaaagagctttcaggcacttattgagaattaatgtttaaacagacataatagcctagatgaactcccaagagatctattaaatcttgtgggctgaataaatatctcgtgcaggactgtgcaacagtagcccagagcatcctgcctgtgggcatccacctcccaggtgagggcagtgggaagctggcccgacggcagccagaacttgtttctcacctcccaccagcaaccccccacccaactctgggccccaggcacacgaagcacaagtctcaggggaccattcccacattgggggatcctgagggagcccatcaccgcctcttgcatacaactgtccactaggaggcacgcccagtgtgggagagatgtatggtcttgccttccacctgtaaaaactgcacatatgcaagccatttgcactctggaactgcatgccgtgaaaactcctaatggtgtggaacttagtttgaatttgaaatcacgccgcatgcacaaagggacaggcccaggcccgacctcaggtcatccgcccgctggctgcagagcatccctgggagccaaggcgaggcccgtggagcctgagctttgtgtagctcgagctttgtgtagctcgtgcacttattatgcaccacctcccttcagtcaccactcctcttcctccgccatcctcatttatactgattgcacaccccccgctcaaacaacaatgtccttattatgatgaccatctcgtagtggtacattccattcctatttaaggtaagcccaaagcccacttttggattttctcgactgtccgagaaaagttgtgtaagcgcctgcgttcttctgggtttggctagatagggttgtgtccctctatggaatggagagtgatgtgggcaagggtgtcattttctcgcacaatacaactcactgaggatgcttctgtagaagtgagaaacacgatgagtacattcagaattacaataactcactctcactgggtaacttctcatgatagatttgtatgatcaatacgggtctatttttatgtcaactgaacactgtagggtaccttccagtctttttcaagattgttaaattgagacaagtaattgaataatttgtcctatttttattttaaaaaaagtgaatggactgaaatgttaaatgtgaatgtacatttcttaattgcaacttttctactgagtgtttgcactatactttctggaatcttatttaacaaaaataaagggaaaaaattgcttgactaaa

SEQ ID NO: 1230 - DNA, 12497 bp, Homo sapiens
  source 1..12497: mol_type = unassigned DNA
ccgctgcatggcgctgagatggcgggggcgccgcgcggcggaggcggcggcggaggcggcgcgggcgagcccgggggcgccgagcgggcggccgggacaagccgccggcgcgggctccgggcgtgcgacgaggagttcgcttgcccagagctggaggcgctgttccgcggctacacgctgcggctggagcaggcggccacgctgaaggcgctggccgttctcagcctgctggcgggcgcgctggcgctggccgagctgctgggcgcgccggggcccgcgcccggcctggccaagggctcacacccggtgcactgcgtcctcttcctggcgctgctcgtggtaaccaacgtccggtccctgcaggtgccccagctgcagcaggtcggccagctggcgctgctcttcagcctcaccttcgcgctgctctgctgtcctttcgcgctgggcggccccgcccggggttccgccggggccgctggggggccagcgaccgccgaacaaggggtttggcagctccttttggtcaccttcgtgtcctatgccttgctgcccgtgcgcagcctgctggccataggctttgggctcgtggtggctgcgtcgcacttgctggtcacagccaccttggtccccgccaagcgcccacgtctctggaggacgctcggtgccaatgccttgctcttcgtcggtgtgaacatgtatggggtctttgtgcggattctgactgagcgttcacagaggaaggcgttcctgcaggcccggagctgcattgaggaccgactgaggctggaggatgagaacgagaagcaggagcggctcctcatgagcctcctgccccggaacgttgccatggagatgaaggaggacttcctgaagccccctgagaggattttccacaagatttacatccagaggcacgacaatgtgagcatcctgtttgctgacatcgtgggtttcacgggcttggcatcccagtgcacagcccaggagctggtgaaactcctcaatgagctcttcggcaagttcgatgaattagccacggagaaccactgtcgccgcatcaagattctcggggactgctactactgcgtgtcgggcctcacccagcccaagactgaccatgcccactgctgtgtggagatgggactcgacatgattgataccatcacatctgtggctgaagccaccgaggtggatctgaacatgcgtgtgggtctgcacacgggcagggtcctctgtggtgtcctgggcttgcgcaagtggcagtacgacgtgtggtccaatgatgtgaccttggccaatgtcatggaagccgctggcctgccagggaaggttcatatcacaaagacgaccctagcgtgcttgaatggggactacgaggtagaaccgggttacggacatgagaggaacagtttcttgaaaactcataacatcgaaaccttttttattgtgccatcccatcgccgaaagatatttccaggcctgattctctcagatataaaaccggccaaaaggatgaagttcaagactgtctgctacctgctggtgcagctcatgcactgccggaaaatgttcaaggccgagatccccttctccaatgtcatgacctgcgaggacgatgacaagcggagggcattaagaacagcctcggaaaaactcagaaaccgctcatctttttctaccaacgttgtctacaccaccccgggcactcgcgtcaacaggtacatcagccgcctcttagaagcccgccagacagagctggagatggcagacctgaacttctttaccctgaagtacaaacatgtcgaacgggagcaaaagtaccaccagcttcaggacgagtatttcaccagcgccgttgtcctcaccctcatcctggctgccttatttggccttgtctaccttctaatattcccacagagtgtggtcgtcctgctcctgctagtattctgcatctgcttcctggtggcctgtgtcctgtacctgcacatcacccgggtccagtgttttccagggtgcctgacgattcagattcgcactgtcctgtgtattttcatagtggtcttaatctactcagtagcccaaggttgtgtggtgggctgcctgccttgggcctggagctccaagcccaacagttccctggtggtcctttcgtctgggggccagcgcacagccctgcccaccctgccctgcgagtctacacaccatgccctgctctgctgcctggtgggcaccctcccgctagccatatttttccgggtgtcctccttgccaaaaatgatcctgctctccgggctcaccacgtcctacatcctcgttctggagctcagcggatacaccaggactgggggtggtgccgtctccgggcgcagctacgagccgattgtggccatcctgctcttctcctgtgcgctggccctgcatgccaggcaggtggacatcaggctgaggctggactacctctgggccgcacaggcagaggaggagcgagaggacatggagaaggtgaagctggacaacaggcgcatcctcttcaacctcctgccggcccacgtcgcccagcacttcctcatgtccaaccctcggaacatggacctctactaccagtcctactcccaggtgggcgtcatgtttgcctccatccccaacttcaatgacttctacatcgagctggacggcaacaacatgggggtggagtgtctgcggcttctcaacgagatcatcgccgactttgacgagctcatggaaaaagacttttacaaggacatagagaagatcaagaccatcgggagcacctacatggccgctgtggggctagcgcccacctcggggaccaaggctaagaagtccatctcctcccacctgagcacgctggcggactttgccattgagatgtttgacgttctggatgaaatcaactaccagtcttacaacgactttgtcctccgagttggcatcaatgttggccctgtggtggctggagtgattggcgctcgcaggccccagtacgacatctggggaaacacagtcaacgtggccagtcggatggatagcacaggggtccagggcagaatccaggtgactgaggaagtccaccggctgctgagaaggtgccccccactttgtgtgccgaggcaaagtcagtgtcaagggcaaaggcgagatgttgacatactttctagaaggcaggactgatggaaacggctcccaaatcaggtccctgggcttggatcggaaaatgtgtccatttgggagagctggccttcagggcagacgtccccccgtgtgccccatgcctggcgtctcagtcagggctgggctccctccacactccccaggccagtacctgccctctgcagcagctgggaaggaggcttagtggagcccacgtgggcctctggggtgcacatggggtgggaatgctccgggggtgacacaggccacggtggctccagccaggaccagccagaccagcagagcagggagccacttgccagggtggaggaggagcattgtccaggcatggcctgtggcccgagggccaaccaccgagcaggcacagcacagcagtgactcggtgaggggaggacacccgactgtgcacacttccaggcctccctggagaggtgtccactccatccttccctccgtggcgtagggagcactgtttctttccagcaagcctgttcaggtttggccaggtcggcatcaatgtaaggaccttcagagcatcccagggttacagcaagagccactgaggtgtggctggcagagcaactgaggagctctgcgagagtgtgccctctgagacagccctgtccgccccgcccaggtgggacctgacatacaggcggctccagccctgggcagcggcttcaagagccagagtgggaagtcaggcctctctgggaaggtcacaaggcctggggttgttcacaccacaggcacaatacagagctgtccactcttgaactggaccgtctggggagaattgagaagctgcctctcactgcatggatagtggtggctgctggctttcaagcgtggttttttgctaagagccagaggcaggtcttctggagttctcaggggggccctgtgaccccctctccacaaccatggccagcatcggcttcttgctgcacctgtgcattctccacccctccgccaatggcttccagctcctaaaacacctggacattccccatcctgcaccggcactgtgtttgttcagagaaaacgaagggtgtcatttcttcttttccctgtggcatcgtggatcctttacatttagcaacaacagtgtgaggctccacttctgttgaatatgagcggctgtcacacccatgagcaagtttccttgatggaagatgctgtttctccggcagaaccaaccctccaggacgaagtttcagaattggctgatggtcgtgagtgcaggtgtccctgttgtaatttgcagggaaattgactgcaggtgatagtgttgacgtctgacgtctgacaacctcctatgtgcatgtctaaatagtcacaatgaagatgaaaataaggatgatggggacggggtccaggagggccactgggaaggcactatccagaaatagtggacagaggtctggcatgtggaaaccttggatctcggtcacagggaggaaggcagctagaaatgggagggaagcttctgggtaggcaccatagtaggggaatgtctaaagacccactgctctgagatgtggtcagagaggtttctgtggactgcagatgaggcctgagccctgcctatgctcaaagccagcagggttgggggtccgcctcctcactgctcctcaacagctgtaaccctttcctgagggccccgacttttcagaataggagcagagagaagcccagacttccttccctggagtgtagacctgtgtgtgggacctgctccaggctgatccctgtccgcacaggtgggtgatgtccttggctgctgccgtcagaggcagccccctgcacagggaggggctgatcctgcctcagctgtgtggccatgtgggggcagcaggggcctgggccatagctgggggaggccagaccctgagggctttgcagggcggccagtgcagtgatgcctggcgcttccagctgagacaggagtccggacagaggtgggcagggtggatggcttcgggcagggaaggcgggtagaggctgcatgtgggggcccctgtctgcctgtccttagggtgtggattaggctctggcttctgtgatggtgcaagaggcaggatggtctccagacaccttcttgcagagtgattttgaccaatgcctttccagcaccttcccctggttatgacagggagctcccaggccaggccacatgaccccacaggtaggctgaccccatggacccactggagactttgagggcagagctcgggcacctttcatcttccttgggtggtcctcatgtcgctgtccgctcatgttcctggtgttctggcatcaccttgtgccggtgggggctgggctcccgtgaggtcctagggcagaaggaggtgcttgcagggcctctcgctgctactgggacatccacaggacctaatgtttatgtggaatctccaggctgccatcgagggctcctgagctcatcctgaggacccagggtccatctgagctggctgtgggctgagatcctggctggggccctgctgtcaacctctcctccaggccctgccttgtccctgctcctgtgctttcctctcttcaggacaaatggtttgtccttatggtcccctttccactaggattttctcatcctcatctgtctatcccagccggatttaaagcagtcacttcagacaggagccacagggagcctgtgagggagtagtgcggtggtggtgagtgtggctgccctggctcccccagctcaccgtggtgctgtccttgacccacgagctgttgagaagggtgcagagcccctggcacagccaaccctgttgcccccagtgccgctgcccagcttcggccatccaggtggtgggtagacagaggagtgaaccccaaaggtgtccatgccccagttctaagccctgtggccaggtgctgtcacacagcaaaggggactttgcaggtggaattagggttagggatctaaggatgggaggggaacttggtttatctgggtgggctcagtgaccccttggaatggctgagggaggcaggagagcctggaaagattcgaagtgtcacagagatggtgccgtcattgctggcttaaagacaaggggccaggagccaacaccagaggccactccacaaccccagcgccagtcagcaaggaagccgggtgtcgctcacacaaccagaaggagctgagtttggcaacaacccaagtgagcctgaagcagattcgccccagagcctccaggcgtgagtggagcccagtccagcgacaccttggtttggcctgtgagactgagaagagagccagccacgccatgctgtgcctggggtccacagagccgggaggtcacacatgtacatcctggaagctgcccaaggtgtggccacttgtagggcagtgagaggaagccgtcgcggggaccatgctgccttctctgggctcacgactgttctggaaaggaccccatggcagacttggcaaggtctccacttcaggggcaaacatctccatcatcagcaactccaaaccccagccacttcctgggagttcaggaactgtgtttagccataatgtcccttggggtttggtgaaaaacaacttcctttttatttgtgggaaaactgtattatattgccttatttatttttaatcatgtacaatattcatgtacaaatgttagagccattcgggtaggattctctctaaattatttattgaagaggctttgtaaatagtgcaccagtgacaggtgctgcctgtttactcgtaccaaaaatgaagacaagccccacacccacctcagcccttgcttggccatgctgtggccctttggaaatgaccctgtgtgctcccctcgcgacccttgcatgcctttcatgcctgatgccgtagagtagaacacagccccggaatgcttccagttgcttgcaagggaccatgccggcccgggtggtccatgcctgcggggtgtctgtatcctgcaggaggacgcccctacagacccagcaacccaagttgccagcccgtgtttctcagactttaaagccaccagggcttctggaacacctgtcatagaagcaataactctaactctatactgtagagatgagtctggtccgaagcagattagtaatttagagataagccatgcatacaagtttgccccattctctggcttggggtggtgggaggcggggagctgccactcccaaagcctccaccccttcctgaagacccagctatgaaaccgcagttcctgtgggttgggctgcccaggctggtcagagctcagcaccccaggtctggtgagcagacagagccggcgttaaaccccgatcaggtcattgtcaccacacccttgcttggatgaggaaggaaggaggcaaaggcacccactccatccaagatccgttccaattgatgagcctcagtactggcctcacactgaccaacggtggtatgctgcagtttgttggtttggtgcagagtctaaaggataacatatcaaggcttacctgtgataggccattttaaggaaatggtggcactctgaaggctgtccccattcaccttccacaatgctggtaccatcctggtagaagagccctctgaacaggacacctgttcaggcctgggggccccatgctaggcttgcctgggtgtgagaaggtcgaactgggtggcttaggccttcaaattgagcttgggggtgtccaagagaggggtcttattcgaggaactcacataccccaaataaccatcagtgcacaaatcattccatgctctttggcaccaggcaggagatgctgcaggcaggtgtccgtagttggcaaaaatgggcagtaggggaaatggagttgcttcaacctttctcagtcccggccctcactgcacccaccaagtcaagcagagctgggtgggctgagaccagcatcccagctggactgagcctggggggaggggctggagccaaggagcccccctgggtgggggcatcaggagcaggggcagggcctgaggactgctccccctgcatggagggcaggccaggatggagcccagggtagactttgaggaaggctcagtgggctcagcagaaggaaggctcttctcatagttgtggtttttcacagatggatttgggtgatctgagtgtggtcaggccctgccgttggggaatgaatgccacacggggtttgtctgtaagctgcagtgtctgtgattctgtgtgaactgacagcagggagctgaaggacaggccccggccttgggagaggacacgggcatgggctgctggatgcagggctcccagggctgtgaaggcagaggggtctctggaggcagacagggtgggctgggggccagcagcagggggcagagccccagccagggcagctgcttcctgcacatagacattcctcctgcgcagggccaagtgcccatgagcacagccccagacagacacggtggggagcttggagccctccgctcacctagaggagccctgggacacgcactggaaagtattctaggggcttcctgccttatccttctgtttgttcatacacttagtgaaagcagatcctgtactaggatgtgaggatatctgtcacctgcgtggtccattccataaacaccagattccatttcagttgccacacattttggggctagacttccctaaacaacatgccattgtgaaataatgcatatatttgtatttttaaatttccctgaaaatttaatctattctgttccatatgaagtctgtttcactaccttaaaaaatagatactccactagaggctgtgcttaattcaaatccatgtgtgtgcctgcattacatgtgtgaacacgtgtttctgtcgtgtgtgtcatgcacatctgtgtgttgcatagcataagccaaatgaaaatcatttgttcatgggattcatatgaggaacaaaattaaatttgaatacagtcagataactgccacgcagggcatttggggaaccatccccgaatgccctgatgtgatttccctcagaaaatccttgttattagaggagaaggtctgggcaggggcagcagcatctcagacatcaagtcaactttatcatctactacatcagcactgaagtccaggggcattgaggcactaactaggttccattttctttggtttggttacttattttttctttttgggttctcggtgtgcagaggctgtagagagagcctcagggcggtgaccgctgcaggaattcggccctccagctcccctccagttaccaggagccgatttggaggccaggccttcccagctgagtgtctgtcagcttcattctctctcagctgtgcagtggaagagcaacaacagacaggtgaccttcttgggttgtgcttcacaatggactgggaaaaacatctttgaaatcaggaaatcaggccgggcgcagtggctcatgcctgtaagcccagcactttgggaggcggaggcgggtggatccattgaggtcaggagctcaagaccagcctggtcaacatggtgaaaccccgtctctactaaaaatacaaaaaaaaaattagctgggcgtgttggcgggagcctgtagtcccagctacacgggaggctaaggtgggagaattgcttgaacccgggaggcggaggttgcagtgagctgagattgcaccattgcactccagcctgggcgacagagcaagactctctcaaaaaaaaaaaaaaaagaaagaaagaaatcagaaaatcgaccacagtggtagccacctggcctaatgctgtgtttttgtacctgacaggggtcactcattttaggcacaactccttcattctttgtgaaattagtgagtttccttctacccgtcaccagattcaatatgttctattaatacaccgataaccacaggggaagggcacttgtcgctctcccacctggttaccacagtctccatgggtcttttgccgtgaccacaaataaaggaaacactcatcactagtatctaagtcgggctttacagtaactatgcaccttctgtgtgcttcacctcactctctacttcaaacagcccatggagggaggtattattatactccttatgttgacagtgaagaatctgaggcccagagaggttggggacttgagtaaagtcacacagccctgagaggcaggaccagggttccattcctgctctatccagttccaagcccttgtgttttccattatgtttagtgcctctttgctaacagcaacatctgcaagatttgtgttggttttgatggagaactctagctcatccacatgctagtgcccaagtggtggaggggccacctcagcaggtgggttctgaatgcagccaaggctgtccccgcaatgggtgagactcgctccaactgcccgccctcagagcaggtgcctaagtcctccctggcactggcaggccttacctcacattgctaaattaaagcaatgcaattcctcttgggtaagaggaattcctccttctttactaactgatccccagcaaggaaataaaatgttaggctttaaaaatccctactttgtcatatcagactatattctaaaactatatttgagcgaaacctgtcattgcgtctaatttcaaatatacagaatctccttaagagctgttgccttatttttttgtaaagcctctctgacatcaaatggggagaaatggtggcacctccagacaccctgaaactacacaccatttcttccctgctcagcttctgctcaggagttctgtgagctatgggaaggccattggttgtatttgctacttttactttcatcttcctctgctgtagagccatttaatgttattgtcatatgctgctggtgaggtaaaggtgggtccgggtgccttcccaggggttagaggatgttcaaagggccgatttcagcaggagttcagagggcttatgatggatggtgagagatttgacaaccaccagagcacatgtgctctgaccctctcctgggcattggttcctgctggtaccgggcggttcagaccttcaaataggttgctttcaaaagagctttcaggcacttattgagaattaatgtttaaacagacataatagcctagatgaactcccaagagatctattaaatcttgtgggctgaataaatatctcgtgcaggactgtgcaacagtagcccagagcatcctgcctgtgggcatccacctcccaggtgagggcagtgggaagctggcccgacggcagccagaacttgtttctcacctcccaccagcaaccccccacccaactctgggccccaggcacacgaagcacaagtctcaggggaccattcccacattgggggatcctgagggagcccatcaccgcctcttgcatacaactgtccactaggaggcacgcccagtgtgggagagatgtatggtcttgccttccacctgtaaaaactgcacatatgcaagccatttgcactctggaactgcatgccgtgaaaactcctaatggtgtggaacttagtttgaatttgaaatcacgccgcatgcacaaagggacaggcccaggcccgacctcaggtcatccgcccgctggctgcagagcatccctgggagccaaggcgaggcccgtggagcctgagctttgtgtagctcgagctttgtgtagctcgtgcacttattatgcaccacctcccttcagtcaccactcctcttcctccgccatcctcatttatactgattgcacaccccccgctcaaacaacaatgtccttattatgatgaccatctcgtagtggtacattccattcctatttaaggtaagcccaaagcccacttttggattttctcgactgtccgagaaaagttgtgtaagcgcctgcgttcttctgggtttggctagatagggttgtgtccctctatggaatggagagtgatgtgggcaagggtgtcattttctcgcacaatacaactcactgaggatgcttctgtagaagtgagaaacacgatgagtacattcagaattacaataactcactctcactgggtaacttctcatgatagatttgtatgatcaatacgggtctatttttatgtcaactgaacactgtagggtaccttccagtctttttcaagattgttaaattgagacaagtaattgaataatttgtcctatttttattttaaaaaaagtgaatggactgaaatgttaaatgtgaatgtacatttcttaattgcaacttttctactgagtgtttgcactatactttctggaatcttatttaacaaaaataaagggaaaaaattgcttgactaaa

SEQ ID NO: 1231 - DNA, 6575 bp, Homo sapiens
  source 1..6575: mol_type = unassigned DNA
aggcggcgcgggggtgggacgcgggcggccgcggcgagcggcgctgcccgggccgggcgcgcacggcgggcgccctgtgagcggccccgatgtggcaggaggcgatgcggcgccgccgctacctgcgggaccgctccgaggaggcggcgggcggcggagacgggctgccgcggtcccgggactggctctacgagtcctactactgcatgagccagcagcacccgctcatcgtcttcctgctgctcatcgtcatgggctcctgcctcgccctgctcgccgtcttcttcgcgctcgggctggaagttgaagaccatgtggcgtttctaataacagttccaactgccctggcgattttctttgcgatatttatcctggtctgcatcgagtctgtgtttaagaagctgctgcgcctcttctcgttggtgatatggatatgccttgttgccatgggatacctgttcatgtgttttggaggcaccgtctctccctgggaccaggtatcgttcttcctcttcatcatcttcgtggtgtacaccatgctgcccttcaacatgcgagacgccatcattgccagcgtcctcacctcctcctcccacaccatcgtgcttagcgtctgcctgtctgcaacaccgggaggcaaggagcacctggtctggcagatcctggccaatgtgatcattttcatctgtgggaacctggcgggagcctaccataagcacctcatggaactcgctcttcagcaaacatatcaggacacctgtaattgcatcaagtcgcggatcaagttggaatttgaaaaacgtcaacaggagcggcttctgctctccctgctgccggcccacatcgccatggagatgaaagcggagatcatccagaggctgcagggccccaaggcgggccagatggagaacacaaataacttccacaacctgtatgtgaagcggcatacaaacgtgagcatcttatacgctgacatcgttggctttacccggctggcaagtgactgctccccgggagaactagtccacatgctgaatgagctctttggaaagtttgatcaaattgcaaaggagaatgaatgcatgagaattaaaattttaggagactgctactactgtgtatctggactccctatatctctccctaaccatgccaagaactgtgtgaaaatggggctggacatgtgtgaagccataaagaaagtgagggatgctactggagttgatatcaacatgcgcgtgggcgtgcattctgggaatgtcctgtgtggcgtgattggtctgcagaagtggcaatatgatgtgtggtcacatgatgtgaccttggccaaccacatggaagctggaggggtccctggacgtgttcacatttcttctgtcaccctggagcacttgaatggcgcttataaagtggaggagggagatggtgacattagggacccatatttaaaacagcacctggtgaaaacctactttgtgatcaaccccaagggagaacgacggagcccccagcatctcttcagacctcgccacacccttgatggagccaaaatgagggcctcggtccgcatgacccggtacttggagtcctggggggcagccaagccctttgcacacctacatcacagggacagcatgaccacagagaacggcaagatcagcaccacggatgtacccatgggtcagcataattttcaaaatcgcaccttaagaaccaagtcacaaaagaagagatttgaagaagaattgaatgaaaggatgattcaagcaattgatgggattaatgcacagaagcaatggctcaagtctgaagacattcagagaatctcactgcttttctataacaaagtactagaaaaagagtaccgggccacggcactgccagcgttcaagtattatgtgacttgtgcctgtctcatattcttctgcatcttcattgtgcagattctcgtgctgccaaaaacgtccgtcctgggcatctcctttggggctgcgtttctcttgctggccttcatcctcttcgtctgctttgctggacagcttctgcaatgcagcaaaaaagcctctcccctgctcatgtggcttttgaagtcctcgggcatcattgccaaccgcccctggccacggatctctctcacgatcatcaccacagccatcatattaatgatggccgtgttcaacatgtttttcctgagtgactcagaggaaacaatccctccaactgccaacacaacaaacacaagcttttcagcctcaaataatcaggtggcgattctgcgtgcgcagaatttatttttcctcccgtactttatctacagctgcattctgggactgatatcctgttccgtgttcctgcgggtaaactatgagctgaagatgttgatcatgatggtggccttggtgggctacaacaccatcctactccacacccacgcccacgtcctgggcgactacagccaggtcttatttgagagaccaggcatttggaaagacctgaagaccatgggctctgtgtctctctctatattcttcatcacactgcttgttctgggtagacagaatgaatattactgtaggttagacttcttatggaagaacaaattcaaaaaagagcgggaggagatagagaccatggagaacctgaaccgcgtgctgctggagaacgtgcttcccgcgcacgtggctgagcacttcctggccaggagcctgaagaatgaggagctataccaccagtcctatgactgcgtctgcgtcatgtttgcctccattccggatttcaaagaattttatacagaatccgacgtgaacaaggagggcttggaatgccttcggctcctgaacgagatcatcgctgactttgatgatcttctttccaagccaaaattcagtggagttgaaaagattaagaccattggcagcacatacatggcagcaacaggtctgagcgctgtgcccagccaggagcactcccaggagcccgagcggcagtacatgcacattggcaccatggtggagtttgcttttgccctggtagggaagctggatgccatcaacaagcactccttcaacgacttcaaattgcgagtgggtattaaccatggacctgtgatagctggtgtgattggagctcagaagccacaatatgatatctggggcaacactgtcaatgtggccagtaggatggacagcaccggagtcctggacaaaatacaggttaccgaggagacgagcctcgtcctgcagaccctcggatacacgtgcacctgtcgaggaataatcaacgtgaaaggaaagggggacctgaagacgtactttgtaaacacagaaatgtcaaggtccctttcccagagcaacgtggcatcctgaagagtcaccttcattttggcaagaagactgtattttcaggaaggtatcacacactttctgactgcaacttctgtcccttgtttttgatgtgcgtgctgtctgtcctatggagcctctgcagactcgttctcgtgacccagtggcataccgtttggtgtctgatgtgtgcccagatcgttctgccacttgcactgtgcttgctcctaagcaaaagggaaaaggagcgcgcgtgatagaagaaaagcactgggagaactaacagaggagaaaggtgaaacacacacacattcttaaggcaataaaactagggggtgtatattatcttctggtgcatgttcttttctggaaaatatggtagctcgccaaccgcatctgctcatctgatattcaaacacacagtattcgtgaataagttgattctgtcccccacgtggactctgtgctcacccattgtctcattgccagtggtgtccaagggcccccgttgggacccacggctctcgtccctctgctccgtgtgtctcatgccagcagcacgtcgccatccgtcaccagaattagtcctcacagcctaggaccagttttgtatcaaactcgtctgatgttttgatgccatttgtcttttgtaaagttaattcattaaaagttttatgtactttgatttacagtgcctgtatcttttattttcctgtcttctttctcctgtggtttgctccagaattaaggtttgttttccatccattctcccttttgacacagttgtttcagaaagagctctccagaagccaatattgagatgtaattcagattaggacacagtgtgtgacgcagataactggttactcagctccctggaaagcaggcaagcatgttgaatgtatctagtggtctgattttaatttgggcatctctagagaacgctttcagggaaaaatactttaatagtaaaaagattctctgcgagcaacagtgccccctccgtccactacgctcctgtctccaagaatgttttgctagagctaacagacatagactgcaaaagaataatttggaatcagctatgcaaatcagtctcacaatagcgtgagctaactgagagaagtactaagacccacaaactgcctgttaagtctgagaaggctaaagaagacacacagccaacgttcatgcatttttaaagacagaaggccttgaagaatttgttcttgtaaatccaacacaagttgtttggtacttttaacataaagaaatcatactttgccaaatagtgaaaagtagagcaatcgtgtataagctaatgtttaaaagcaaaactgcaaattgtagcccagttggtcaaacttgttttctttttataactcatggcaggcatctgtaagaagtagagaacccagatgatctcttaggaagccttttattcgtgggaactcgaacttgaagcacaagttcctggtttgaatcctggctctgattttttactggctgtgtgactttgaacacatctcttagtccctcttaggagtactttccttattggcaacttatggactcgctagtgattaaacgaggcaatgactgtgagcgagcctggcaggtgccccgtggtacattcacagcacgggcacagctgctgtgccaggactgtgactcattcccagtaaaaggcacttatcgaagctgataaccgtccttcatcaccgaagtgtgagtagagcatgacttatttagtattctgcctcaatggggaattttttgatcctgtaatcacaactcagcattggccttaatatacctaaatctccaaaaacagtgattaaagcaagagaattattacaagggcttttctctttcctctaactcattcttcacggatgccgtagcgtttccgtgagctcaaactggccttggtgtaaaatgtgtaaggatgagcagcaggcgtgcctcgtgggttcttcctctgttacatcctgctacactcatccgcaggtcaccttagttcacctaccctgagtgaacacccccagctgggtggtccaccaagttctcataaacagagtccctcccattcccccacggggtgcaccgaacttgggtttgcgctaaaaagaactcaaaaggagaactgtgctctcccaaagccatatcaccagtcttaccaaacaataggcttttaaaagcattgagtcattgtcagaatccactatgggaagctctgtgtgtacctggtcccttctaggtgtggtcccataggagcagccttagcatcccctgtgaacttatcaaaaatgcaaattctcaggccccaacctgaaggaggaccctgaatttgagatccccggggctggggcccagcacaactgctgtttagtgaacaggttctccaggtgattctgatccctgatcaagcttcagacctccctccctccccagtgtttttgcaggtgaggaaacaggggcagagtaattcaggcacatgtgttcagagttccacagttgattagcagttgaggccaggctagaatggaaaactgcctgttccttgaatctgaaagagcattattcctggtcaaagctccttaaagttctgggcagctaaaagcatccctgtgagcaaaaatgccaggcagaaaactggcagtgcacctctcatcagcccaggtcccagtgccattggcttcaagaaaaaaaaaaaatctctccccaatgctctccttaacctttaagtcttacaggaagcctctcatagaaattgcctccagtccagtttcccaaaaaccccagtgttttacatatctgtttaggagtgtctaagttttgtcatcaatccaggatgttattcttccttcccaactcactgtgctcctaaaggcagcaaccattcatctttcctttgctctggatacaccgaatgaccaggtaacatcatcaggccgggtgcagtggctcctataatcccaatattttgggaggccgaggagagaggatcacttaagcccaggagtctgagaccagcctgggcaacatagcaagacccccatctctgcaaaaaaataagaaaattagcttggcatggtggcacgtgcctgtagtcccagctacatgggaggctgaggtgggaggatcacttgagcccaggaagtccagaacgtagtgagccttgattataccactgcactccagcctgggtgacagagcgagactctgtctcag

SEQ ID NO: 1232 - DNA, 5052 bp, Homo sapiens
  source 1..5052: mol_type = unassigned DNA
ccccgatgtggcaggaggcgatgcggcgccgccgctacctgcgggaccgctccgaggaggcggcgggcggcggagacgggctgccgcggtcccgggactggctctacgagtcctactactgcatgagccagcagcacccgctcatcgtcttcctgctgctcatcgtcatgggctcctgcctcgccctgctcgccgtcttcttcgcgctcgggctggaagttgaagaccatgtggcgtttctaataacagttccaactgccctggcgattttctttgcgatatttatcctggtctgcatcgagtctgtgtttaagaagctgctgcgcctcttctcgttggtgatatggatatgccttgttgccatgggatacctgttcatgtgttttggaggcaccgtctctccctgggaccaggtatcgttcttcctcttcatcatcttcgtggtgtacaccatgctgcccttcaacatgcgagacgccatcattgccagcgtcctcacctcctcctcccacaccatcgtgcttagcgtctgcctgtctgcaacaccgggaggcaaggagcacctggtctggcagatcctggccaatgtgatcattttcatctgtgggaacctggcgggagcctaccataagcacctcatggaactcgctcttcagcaaacatatcaggacacctgtaattgcatcaagtcgcggatcaagttggaatttgaaaaacgtcaacaggagcggcttctgctctccctgctgccggcccacatcgccatggagatgaaagcggagatcatccagaggctgcagggccccaaggcgggccagatggagaacacaaataacttccacaacctgtatgtgaagcggcatacaaacgtgagcatcttatacgctgacatcgttggctttacccggctggcaagtgactgctccccgggagaactagtccacatgctgaatgagctctttggaaagtttgatcaaattgcaaaggagaatgaatgcatgagaattaaaattttaggagactgctactactgtgtatctggactccctatatctctccctaaccatgccaagaactgtgtgaaaatggggctggacatgtgtgaagccataaagaaagtgagggatgctactggagttgatatcaacatgcgcgtgggcgtgcattctgggaatgtcctgtgtggcgtgattggtctgcagaagtggcaatatgatgtgtggtcacatgatgtgaccttggccaaccacatggaagctggaggggtccctggacgtgttcacatttcttctgtcaccctggagcacttgaatggcgcttataaagtggaggagggagatggtgacattagggacccatatttaaaacagcacctggtgaaaacctactttgtgatcaaccccaagggagaacgacggagcccccagcatctcttcagacctcgccacacccttgatggagccaaaatgagggcctcggtccgcatgacccggtacttggagtcctggggggcagccaagccctttgcacacctacatcacagggacagcatgaccacagagaacggcaagatcagcaccacggatgtacccatgggtcagcataattttcaaaatcgcaccttaagaaccaagtcacaaaagaagagatttgaagaagaattgaatgaaaggatgattcaagcaattgatgggattaatgcacagaagcaatggctcaagtctgaagacattcagagaatctcactgcttttctataacaaagtactagaaaaagagtaccgggccacggcactgccagcgttcaagtattatgtgacttgtgcctgtctcatattcttctgcatcttcattgtgcagattctcgtgctgccaaaaacgtccgtcctgggcatctcctttggggctgcgtttctcttgctggccttcatcctcttcgtctgctttgctggacagcttctgcaatgcagcaaaaaagcctctcccctgctcatgtggcttttgaagtcctcgggcatcattgccaaccgcccctggccacggatctctctcacgatcatcaccacagccatcatattaatgatggccgtgttcaacatgtttttcctgagtgactcagaggaaacaatccctccaactgccaacacaacaaacacaagcttttcagcctcaaataatcaggtggcgattctgcgtgcgcagaatttatttttcctcccgtactttatctacagctgcattctgggactgatatcctgttccgtgttcctgcgggtaaactatgagctgaagatgttgatcatgatggtggccttggtgggctacaacaccatcctactccacacccacgcccacgtcctgggcgactacagccaggtcttatttgagagaccaggcatttggaaagacctgaagaccatgggctctgtgtctctctctatattcttcatcacactgcttgttctgggtagacagaatgaatattactgtaggttagacttcttatggaagaacaaattcaaaaaagagcgggaggagatagagaccatggagaacctgaaccgcgtgctgctggagaacgtgcttcccgcgcacgtggctgagcacttcctggccaggagcctgaagaatgaggagctataccaccagtcctatgactgcgtctgcgtcatgtttgcctccattccggatttcaaagaattttatacagaatccgacgtgaacaaggagggcttggaatgccttcggctcctgaacgagatcatcgctgactttgatgatcttctttccaagccaaaattcagtggagttgaaaagattaagaccattggcagcacatacatggcagcaacaggtctgagcgctgtgcccagccaggagcactcccaggagcccgagcggcagtacatgcacattggcaccatggtggagtttgcttttgccctggtagggaagctggatgccatcaacaagcactccttcaacgacttcaaattgcgagtgggagttaccgaggagacgagcctcgtcctgcagaccctcggatacacgtgcacctgtcgaggaataatcaacgtgaaaggaaagggggacctgaagacgtactttgtaaacacagaaatgtcaaggtccctttcccagagcaacgtggcatcctgaagagtcaccttcattttggcaagaagactgtattttcaggaaggtatcacacactttctgactgcaacttctgtcccttgtttttgatgtgcgtgctgtctgtcctatggagcctctgcagactcgttctcgtgacccagtggcataccgtttggtgtctgatgtgtgcccagatcgttctgccacttgcactgtgcttgctcctaagcaaaagggaaaaggagcgcgcgtgatagaagaaaagcactgggagaactaacagaggagaaaggtgaaacacacacacattcttaaggcaataaaactagggggtgtatattatcttctggtgcatgttcttttctggaaaatatggtagctcgccaaccgcatctgctcatctgatattcaaacacacagtattcgtgaataagttgattctgtcccccacgtggactctgtgctcacccattgtctcattgccagtggtgtccaagggcccccgttgggacccacggctctcgtccctctgctccgtgtgtctcatgccagcagcacgtcgccatccgtcaccagaattagtcctcacagcctaggaccagttttgtatcaaactcgtctgatgttttgatgccatttgtcttttgtaaagttaattcattaaaagttttatgtactttgatttacagtgcctgtatcttttattttcctgtcttctttctcctgtggtttgctccagaattaaggtttgttttccatccattctcccttttgacacagttgtttcagaaagagctctccagaagccaatattgagatgtaattcagattaggacacagtgtgtgacgcagataactggttactcagctccctggaaagcaggcaagcatgttgaatgtatctagtggtctgattttaatttgggcatctctagagaacgctttcagggaaaaatactttaatagtaaaaagattctctgcgagcaacagtgccccctccgtccactacgctcctgtctccaagaatgttttgctagagctaacagacatagactgcaaaagaataatttggaatcagctatgcaaatcagtctcacaatagcgtgagctaactgagagaagtactaagacccacaaactgcctgttaagtctgagaaggctaaagaagacacacagccaacgttcatgcatttttaaagacagaaggccttgaagaatttgttcttgtaaatccaacacaagttgtttggtacttttaacataaagaaatcatactttgccaaatagtgaaaagtagagcaatcgtgtataagctaatgtttaaaagcaaaactgcaaattgtagcccagttggtcaaacttgttttctttttataactcatggcaggcatctgtaagaagtagagaacccagatgatctcttaggaagccttttattcgtgggaactcgaacttgaagcacaagttcctggtttgaatcctggctctgattttttactggctgtgtgactttgaacacatctcttagtccctcttaggagtactttccttattggcaacttatggactcgctagtgattaaacgaggcaatgactgtgagcgagcctggcaggtgccccgtggtacattcacagcacgggcacagctgctgtgccaggactgtgactcattcccagtaaaaggcacttatcgaagctgataaccgtccttcatcaccgaagtgtgagtagagcatgacttatttagtattctgcctcaatggggaattttttgatcctgtaatcacaactcagcattggccttaatatacctaaatctccaaaaacagtgattaaagcaagagaattattacaagggcttttctctttcctctaactcattcttcacggatgccgtagcgtttccgtgagct

SEQ ID NO: 1233 - DNA, 2970 bp, Homo sapiens
  source 1..2970: mol_type = unassigned DNA
gaggagtttggtagaaatcccagaagagctgttgagaagaccagtggagccacacgtctagaggtcatggacctgcgctgggccagagatctgcatttgagagaagccagcagatcagtagcatttaccaccctgaggctgggcgcagtcaccacgggactcctgacattcagagagccaggagataaagagaagtcaggaaagggccttgggaagagatggcgcatccagcgagaggaaagccaggagcggcttctgctctccctgctgccggcccacatcgccatggagatgaaagcggagatcatccagaggctgcagggccccaaggcgggccagatggagaacacaaataacttccacaacctgtatgtgaagcggcatacaaacgtgagcatcttatacgctgacatcgttggctttacccggctggcaagtgactgctccccgggagaactagtccacatgctgaatgagctctttggaaagtttgatcaaattgcaaaggagaatgaatgcatgagaattaaaattttaggagactgctactactgtgtatctggactccctatatctctccctaaccatgccaagaactgtgtgaaaatggggctggacatgtgtgaagccataaagaaagtgagggatgctactggagttgatatcaacatgcgcgtgggcgtgcattctgggaatgtcctgtgtggcgtgattggtctgcagaagtggcaatatgatgtgtggtcacatgatgtgaccttggccaaccacatggaagctggaggggtccctggacgtgttcacatttcttctgtcaccctggagcacttgaatggcgcttataaagtggaggagggagatggtgacattagggacccatatttaaaacagcacctggtgaaaacctactttgtgatcaaccccaagggagaacgacggagcccccagcatctcttcagacctcgccacacccttgatggagccaaaatgagggcctcggtccgcatgacccggtacttggagtcctggggggcagccaagccctttgcacacctacatcacagggacagcatgaccacagagaacggcaagatcagcaccacggatgtacccatgggtcagcataattttcaaaatcgcaccttaagaaccaagtcacaaaagaagagatttgaagaagaattgaatgaaaggatgattcaagcaattgatgggattaatgcacagaagcaatggctcaagtctgaagacattcagagaatctcactgcttttctataacaaagtactagaaaaagagtaccgggccacggcactgccagcgttcaagtattatgtgacttgtgcctgtctcatattcttctgcatcttcattgtgcagattctcgtgctgccaaaaacgtccgtcctgggcatctcctttggggctgcgtttctcttgctggccttcatcctcttcgtctgctttgctggacagcttctgcaatgcagcaaaaaagcctctcccctgctcatgtggcttttgaagtcctcgggcatcattgccaaccgcccctggccacggatctctctcacgatcatcaccacagccatcatattaatgatggccgtgttcaacatgtttttcctgagtgactcagaggaaacaatccctccaactgccaacacaacaaacacaagcttttcagcctcaaataatcaggtggcgattctgcgtgcgcagaatttatttttcctcccgtactttatctacagctgcattctgggactgatatcctgttccgtgttcctgcgggtaaactatgagctgaagatgttgatcatgatggtggccttggtgggctacaacaccatcctactccacacccacgcccacgtcctgggcgactacagccaggtcttatttgagagaccaggcatttggaaagacctgaagaccatgggctctgtgtctctctctatattcttcatcacactgcttgttctgggtagacagaatgaatattactgtaggttagacttcttatggaagaacaaattcaaaaaagagcgggaggagatagagaccatggagaacctgaaccgcgtgctgctggagaacgtgcttcccgcgcacgtggctgagcacttcctggccaggagcctgaagaatgaggagctataccaccagtcctatgactgcgtctgcgtcatgtttgcctccattccggatttcaaagaattttatacagaatccgacgtgaacaaggagggcttggaatgccttcggctcctgaacgagatcatcgctgactttgatgatcttctttccaagccaaaattcagtggagttgaaaagattaagaccattggcagcacatacatggcagcaacaggtctgagcgctgtgcccagccaggagcactcccaggagcccgagcggcagtacatgcacattggcaccatggtggagtttgcttttgccctggtagggaagctggatgccatcaacaagcactccttcaacgacttcaaattgcgagtgggtattaaccatggacctgtgatagctggtgtgattggagctcagaagccacaatatgatatctggggcaacactgtcaatgtggccagtaggatggacagcaccggagtcctggacaaaatacaggttaccgaggagacgagcctcgtcctgcagaccctcggatacacgtgcacctgtcgaggaataatcaacgtgaaaggaaagggggacctgaagacgtactttgtaaacacagaaatgtcaaggtccctttcccagagcaacgtggcatcctgaagagtcaccttcattttggcaagaagactgtattttcaggaaggtatcacacactttctgactgcaacttctgtcccttgtttttgatgtgcgtgctgtctgtcctatggagcctctgcagactcgttctcgtgacccagtggcataccgtttggtgtctgatgtgtg

SEQ ID NO: 1234 - DNA, 3532 bp, Homo sapiens
  source 1..3532: mol_type = unassigned DNA
aggctcttagaaaccagaatatttggtgactcttattgttcttcttctctgcccgtaggtatcgttcttcctcttcatcatcttcgtggtgtacaccatgctgcccttcaacatgcgagacgccatcattgccagcgtcctcacctcctcctcccacaccatcgtgcttagcgtctgcctgtctgcaacaccgggaggcaaggagcacctggtctggcagatcctggccaatgtgatcattttcatctgtgggaacctggcgggagcctaccataagcacctcatggaactcgctcttcagcaaacatatcaggacacctgtaattgcatcaagtcgcggatcaagttggaatttgaaaaacgtcaacaggagcggcttctgctctccctgctgccggcccacatcgccatggagatgaaagcggagatcatccagaggctgcagggccccaaggcgggccagatggagaacacaaataacttccacaacctgtatgtgaagcggcatacaaacgtgagcatcttatacgctgacatcgttggctttacccggctggcaagtgactgctccccgggagaactagtccacatgctgaatgagctctttggaaagtttgatcaaattgcaaaggagaatgaatgcatgagaattaaaattttaggagactgctactactgtgtatctggactccctatatctctccctaaccatgccaagaactgtgtgaaaatggggctggacatgtgtgaagccataaagaaagtgagggatgctactggagttgatatcaacatgcgcgtgggcgtgcattctgggaatgtcctgtgtggcgtgattggtctgcagaagtggcaatatgatgtgtggtcacatgatgtgaccttggccaaccacatggaagctggaggggtccctggacgtgttcacatttcttctgtcaccctggagcacttgaatggcgcttataaagtggaggagggagatggtgacattagggacccatatttaaaacagcacctggtgaaaacctactttgtgatcaaccccaagggagaacgacggagcccccagcatctcttcagacctcgccacacccttgatggagccaagccctttgcacacctacatcacagggacagcatgaccacagagaacggcaagatcagcaccacggatgtacccatgggtcagcataattttcaaaatcgcaccttaagaaccaagtcacaaaagaagagatttgaagaagaattgaatgaaaggatgattcaagcaattgatgggattaatgcacagaagcaatggctcaagtctgaagacattcagagaatctcactgcttttctataacaaagtactagaaaaagagtaccgggccacggcactgccagcgttcaagtattatgtgacttgtgcctgtctcatattcttctgcatcttcattgtgcagattctcgtgctgccaaaaacgtccgtcctgggcatctcctttggggctgcgtttctcttgctggccttcatcctcttcgtctgctttgctggacagcttctgcaatgcagcaaaaaagcctctcccctgctcatgtggcttttgaagtcctcgggcatcattgccaaccgcccctggccacggatctctctcacgatcatcaccacagccatcatattaatgatggccgtgttcaacatgtttttcctgagtgactcagaggaaacaatccctccaactgccaacacaacaaacacaagcttttcagcctcaaataatcaggtggcgattctgcgtgcgcagaatttatttttcctcccgtactttatctacagctgcattctgggactgatatcctgttccgtgttcctgcgggtaaactatgagctgaagatgttgatcatgatggtggccttggtgggctacaacaccatcctactccacacccacgcccacgtcctgggcgactacagccaggtcttatttgagagaccaggcatttggaaagacctgaagaccatgggctctgtgtctctctctatattcttcatcacactgcttgttctgggtagacagaatgaatattactgtaggttagacttcttatggaagaacaaattcaaaaaagagcgggaggagatagagaccatggagaacctgaaccgcgtgctgctggagaacgtgcttcccgcgcacgtggctgagcacttcctggccaggagcctgaagaatgaggagctataccaccagtcctatgactgcgtctgcgtcatgtttgcctccattccggatttcaaagaattttatacagaatccgacgtgaacaaggagggcttggaatgccttcggctcctgaacgagatcatcgctgactttgatgatcttctttccaagccaaaattcagtggagttgaaaagattaagaccattggcagcacatacatggcagcaacaggtctgagcgctgtgcccagccaggagcactcccaggagcccgagcggcagtacatgcacattggcaccatggtggagtttgcttttgccctggtagggaagctggatgccatcaacaagcactccttcaacgacttcaaattgcgagtgggtattaaccatggacctgtgatagctggtgtgattggagctcagaagccacaatatgatatctggggcaacactgtcaatgtggccagtaggatggacagcaccggagtcctggacaaaatacaggttaccgaggagacgagcctcgtcctgcagaccctcggatacacgtgcacctgtcgaggaataatcaacgtgaaaggaaagggggacctgaagacgtactttgtaaacacagaaatgtcaaggtccctttcccagagcaacgtggcatcctgaagagtcaccttcattttggcaagaagactgtattttcaggaaggtatcacacactttctgactgcaacttctgtcccttgtttttgatgtgcgtgctgtctgtcctatggagcctctgcagactcgttctcgtgacccagtggcataccgtttggtgtctgatgtgtgcccagatcgttctgccacttgcactgtgcttgctcctaagcaaaagggaaaaggagcgcgcgtgatagaagaaaagcactgggagaactaacagaggagaaaggtgaaacacacacacattcttaaggcaataaaactagggggtgtatattatcttctggtgcatgttcttttctggaaaatatggtagctcgccaaccgcatctgctcatctgatattcaaacacacagtattcgtgaataagttgattctgtcccccacgtggactctgtgctcacccattgtctcattgccagtggtgtccaagggcccccgttgggacccacggctctcgtccctctgctccgtgtgtctcatgccagcagcacgtcgccatccgtcaccagaattagtcctcacagcctaggaccagttttgtatcaaactcgtctgatgttttgatgccatttgtcttttgtaaagttaattcattaaaagttttatgtactttg

SEQ ID NO: 1235 - DNA, 5050 bp, Homo sapiens
  source 1..5050: mol_type = unassigned DNA
cgggcctgacggcgggagatcgcgctccggccgggccccgaggcgctgccggggcggcgcggctctgcggggagcagccctcgggcgcgccgagctctcccgccccagcccgcgcggggaccgtcccggagcacgcggtggccgagttcccgcacaggtaaacgcaggggcagggccaggcttccgggggggaagacagcgccccgagcgtgggaagggggccggatcggagcccgagcctccaagggtttggtggaaaaaggaagtaaacagaaggaaggctcaggaatcccccacgatggtcctgatttctttccggcacattttatttacagcttctaaggactgggcctggagggaatttaggtgaggaagtcggggactgagaaagaagagatgacagagagaaaccggttaccagggatggaaaggcggctaggcccttccacaagccagggacaggaaattgagtgtctggcgtggacaggactaagtgtgcctgcggtgggcggtggtgtgagccgggggtggcagggaaggccctgggttgggaggctcttgcagcagagatccttttatgagggttagggcgggtcatggggaaaccgcaaggtaggagggaagaggtgcttctactcagcaatgcccttttcagttctagctgatcagtgctacctgtgctctggaaacccgctctgcgttcctgctggaggtggcctcccctccgccccagacaagaagaggccctcagccctcccccggtctcagagagccctgagaggaggcccagtccagagctcttcctccgttcccagtccacttctctagggccagtagcagacaccagccagtatgccgaggaaccagggcttctccgagcccgaatactcggccgagtactcagccgagtactccgtcagcctgccctccgaccctgaccgcggggtgggccggacccatgaaatctcggtccggaactcgggctcctgcctgtgcctgcctcgcttcatgcggctgactttcgtgccggagtccttggagaacctctaccagacctacttcaaaaggcagcgccacgagaccctgctggtgctggtggtctttgcagccctctttgactgctacgtggtggtcatgtgtgctgtggtcttctccagcgacaagctggcttccctcgccgtggctggaattggactggtgttggacatcatcctcttcgtgctctgcaaaaaggggctgctcccggaccgggtcacccgcagagtgctgccctacgtgctgtggctgctcataaccgcccagatcttctcctacctgggcctgaacttcgcgcgtgcccacgcggctagtgacacggtgggctggcaggtcttctttgtcttctccttcttcatcacgctgcccctcagcctcagccccatcgtgatcatctccgtggtctcctgtgtggtgcacacgttggtcctgggggtcaccgtggcccagcagcagcaggaggagctcaaggggatgcagctgctgcgggagatcctggccaacgtcttcctctacctgtgcgccatcgctgtgggcatcatgtcctactacatggctgaccgcaagcaccgcaaggccttcctggaggcccgccagtcgctggaggtgaagatgaacctggaagagcagagccagcagcaggagaacctcatgctttccatcctgcccaagcacgtggctgacgagatgctgaaagacatgaagaaagacgagagccagaaggaccagcagcagttcaacaccatgtacatgtaccgtcacgagaacgtcagcatcctctttgccgacatcgtgggctttacccagctgtcttctgcctgcagtgcccaggagcttgtgaagctgctcaacgagctctttgcccgctttgacaagctggcagctaaataccaccagctgcggattaagatcctgggcgactgctactactgcatctgcggcttgcccgactaccgggaggaccacgccgtctgctccatcctcatggggctggccatggtggaggccatctcgtatgtgcgggagaagaccaagactggggtggacatgcgtgtgggggtgcacacgggcaccgtgctggggggcgtcctgggccagaagcgctggcagtacgacgtgtggtcgactgatgtcactgtagccaacaagatggaggccggcggcatccctgggcgcgtgcacatctcccagagcaccatggactgcctgaaaggggagtttgatgtggagccaggcgatgggggcagccgctgtgattacctagaagagaagggtattgaaacctacctcatcattgcctccaagccagaggtgaagaaaacagccacccagaatggcctcaatggctcggccctgcccaatggagcaccagcttcctcaaagtccagctcccctgccctcattgagaccaaggagcccaacgggagtgcccacagcagtgggtccacgtcggagaagcccgaggagcaggatgcccaggccgacaacccctcattccccaacccacgccggaggctgcgcctgcaggacctggctgaccgagtggtggatgcctctgaagatgagcacgagctcaaccagctgctcaacgaggccctgcttgagcgagagtccgcccaagtagtaaagaagagaaacaccttcctcttgtccatgcggttcatggaccccgagatggaaacccgctactcggtggagaaggagaagcagagtggggctgccttcagctgctcctgcgtcgtcctgctctgcacggccctggtcgagatactcatcgacccctggctaatgacaaactatgtgaccttcatggtgggggagattctgctcctcatcctgaccatctgctccctggctgccatctttccccgggcctttcctaagaagcttgtggccttctcaacttggattgaccggacccgctgggccaggaacacctgggccatgctcgccatcttcatcctggtgatggcaaatgtcgtggacatgctcagctgtctccagtactacacgggacccagcaatgcaacggcagggatggaaacggagggcagctgcctggagaaccccaagtattacaactatgtggccgtgctgtccctcatcgccaccatcatgctggtgcaggtcagccacatggtgaagctcacgctcatgctgctcgtcgcaggcgccgtggccaccatcaacctctatgcctggcgtcccgtctttgatgaatacgaccacaagcgttttcgggagcacgacttacctatggtggccttagagcagatgcaaggattcaaccctgggctcaatggcactgacaggctgcccctggtgccttccaagtactctatgacggtgatggtgttcctcatgatgctcagcttctactacttctcccgccacgtagaaaaactggcacggacacttttcttgtggaagattgaggtccacgaccagaaggaacgtgtctatgagatgcgacgctggaacgaggccttggtcaccaacatgttgcctgagcacgtggcacgccatttcctggggtccaagaagagagatgaggagctgtatagccagacgtatgatgagattggagtcatgtttgcctccctgcccaactttgctgacttctacacagaggagagcatcaacaatggtggtattgagtgtctgcgtttcctcaatgaaatcatctcagattttgactctctcctggacaatcccaagttccgggtgatcaccaagatcaaaaccattggcagcacgtatatggcggcttcaggagtcacccccgatgtcaacaccaatggctttgccagctccaacaaggaagacaagtccgagagagagcgctggcagcacctggctgacctggccgacttcgcgctggccatgaaggatacgctcaccaacatcaacaaccagtccttcaataacttcatgctgcgcataggcatgaacaaaggcggggttctggctggggtcatcggagcccggaaaccacactacgacatctggggcaatacagtcaatgtagccagcaggatggagtccacgggggtcatgggcaacattcaggtggtagaagaaacccaagtcatcctccgagagtacggcttccgctttgtgaggcgaggccccatctttgtgaaggggaagggggagctgctgaccttcttcttgaaggggcgggataagctagccaccttccccaatggcccctctgtcacactgccccaccaggtggtggacaactcctgaatggcctcgagcctgcaacagtccaaaccggaagggagaatttattttttgaaactgaaggaagtcccgaccttcctggattgaagtgcacactcatggactttaggtttagaaacctcctcagccttcatttgttcgtggatgtgtgagctctgagggtggccctgctattcctgtgtgtgcctgtagtgtccccagcataggggtcttaggcatagggctgaacagtccttccagagccctcgttccaatccctgccgtccttgcccctgaggggccctgaccactgtgagcaggagggtggcagagctgggacaaagctgcctttgccgctgggctttccgggactgtggagggagcacaggcggggaagctccacttcagacagggcttggtggggcaggacatggctcccattttgaagggaggtctccatgtggtccgagtgaggtgagacggccctcgtcctggtgttcctgatcatcttgaaaggttcttctggaactcctgtccccttagtcatgagaacagaaagtgcaatatttcctttcacctggcaggggaggggggatttatttctgaaagaaaaatatataaacagatcttctacatttatatttttaatcttctgttaaatacactttccgatattgccttgccttttgagctcttgctacagtcgcctttgctactgctttaagagaatttacaggtattgataaagaacaagactgttttattaaaagctttattcaacttgaaa

SEQ ID NO: 1236 - DNA, 4325 bp, Homo sapiens
  source 1..4325: mol_type = unassigned DNA
cttttcagttctagctgatcagtgctacctgtgctctggaaacccgctctgcgttcctgctggaggtggcctcccctccgccccagacaagaagaggccctcagccctcccccggtctcagagagccctgagaggaggcccagtccagagctcttcctccgttcccagtccacttctctagggccagtagcagacaccagccagtatgccgaggaaccagggcttctccgagcccgaatactcggccgagtactcagccgagtactccgtcagcctgcctcgcttcatgcggctgactttcgtgccggagtccttggagaacctctaccagacctacttcaaaaggcagcgccacgagaccctgctggtgctggtggtctttgcagccctctttgactgctacgtggtggtcatgtgtgctgtggtcttctccagcgacaagctggcttccctcgccgtggctggaattggactggtgttggacatcatcctcttcgtgctctgcaaaaaggggctgctcccggaccgggtcacccgcagagtgctgccctacgtgctgtggctgctcataaccgcccagatcttctcctacctgggcctgaacttcgcgcgtgcccacgcggctagtgacacggtgggctggcaggtcttctttgtcttctccttcttcatcacgctgcccctcagcctcagccccatcgtgatcatctccgtggtctcctgtgtggtgcacacgttggtcctgggggtcaccgtggcccagcagcagcaggaggagctcaaggggatgcagctgctgcgggagatcctggccaacgtcttcctctacctgtgcgccatcgctgtgggcatcatgtcctactacatggctgaccgcaagcaccgcaaggccttcctggaggcccgccagtcgctggaggtgaagatgaacctggaagagcagagccagcagcaggagaacctcatgctttccatcctgcccaagcacgtggctgacgagatgctgaaagacatgaagaaagacgagagccagaaggaccagcagcagttcaacaccatgtacatgtaccgtcacgagaacgtcagcatcctctttgccgacatcgtgggctttacccagctgtcttctgcctgcagtgcccaggagcttgtgaagctgctcaacgagctctttgcccgctttgacaagctggcagctaaataccaccagctgcggattaagatcctgggcgactgctactactgcatctgcggcttgcccgactaccgggaggaccacgccgtctgctccatcctcatggggctggccatggtggaggccatctcgtatgtgcgggagaagaccaagactggggtggacatgcgtgtgggggtgcacacgggcaccgtgctggggggcgtcctgggccagaagcgctggcagtacgacgtgtggtcgactgatgtcactgtagccaacaagatggaggccggcggcatccctgggcgcgtgcacatctcccagagcaccatggactgcctgaaaggggagtttgatgtggagccaggcgatgggggcagccgctgtgattacctagaagagaagggtattgaaacctacctcatcattgcctccaagccagaggtgaagaaaacagccacccagaatggcctcaatggctcggccctgcccaatggagcaccagcttcctcaaagtccagctcccctgccctcattgagaccaaggagcccaacgggagtgcccacagcagtgggtccacgtcggagaagcccgaggagcaggatgcccaggccgacaacccctcattccccaacccacgccggaggctgcgcctgcaggacctggctgaccgagtggtggatgcctctgaagatgagcacgagctcaaccagctgctcaacgaggccctgcttgagcgagagtccgcccaagtagtaaagaagagaaacaccttcctcttgtccatgcggttcatggaccccgagatggaaacccgctactcggtggagaaggagaagcagagtggggctgccttcagctgctcctgcgtcgtcctgctctgcacggccctggtcgagatactcatcgacccctggctaatgacaaactatgtgaccttcatggtgggggagattctgctcctcatcctgaccatctgctccctggctgccatctttccccgggcctttcctaagaagcttgtggccttctcaacttggattgaccggacccgctgggccaggaacacctgggccatgctcgccatcttcatcctggtgatggcaaatgtcgtggacatgctcagctgtctccagtactacacgggacccagcaatgcaacggcagggatggaaacggagggcagctgcctggagaaccccaagtattacaactatgtggccgtgctgtccctcatcgccaccatcatgctggtgcaggtcagccacatggtgaagctcacgctcatgctgctcgtcgcaggcgccgtggccaccatcaacctctatgcctggcgtcccgtctttgatgaatacgaccacaagcgttttcgggagcacgacttacctatggtggccttagagcagatgcaaggattcaaccctgggctcaatggcactgacaggctgcccctggtgccttccaagtactctatgacggtgatggtgttcctcatgatgctcagcttctactacttctcccgccacgtagaaaaactggcacggacacttttcttgtggaagattgaggtccacgaccagaaggaacgtgtctatgagatgcgacgctggaacgaggccttggtcaccaacatgttgcctgagcacgtggcacgccatttcctggggtccaagaagagagatgaggagctgtatagccagacgtatgatgagattggagtcatgtttgcctccctgcccaactttgctgacttctacacagaggagagcatcaacaatggtggtattgagtgtctgcgtttcctcaatgaaatcatctcagattttgactctctcctggacaatcccaagttccgggtgatcaccaagatcaaaaccattggcagcacgtatatggcggcttcaggagtcacccccgatgtcaacaccaatggctttgccagctccaacaaggaagacaagtccgagagagagcgctggcagcacctggctgacctggccgacttcgcgctggccatgaaggatacgctcaccaacatcaacaaccagtccttcaataacttcatgctgcgcataggcatgaacaaaggcggggttctggctggggtcatcggagcccggaaaccacactacgacatctggggcaatacagtcaatgtagccagcaggatggagtccacgggggtcatgggcaacattcaggtggtagaagaaacccaagtcatcctccgagagtacggcttccgctttgtgaggcgaggccccatctttgtgaaggggaagggggagctgctgaccttcttcttgaaggggcgggataagctagccaccttccccaatggcccctctgtcacactgccccaccaggtggtggacaactcctgaatggcctcgagcctgcaacagtccaaaccggaagggagaatttattttttgaaactgaaggaagtcccgaccttcctggattgaagtgcacactcatggactttaggtttagaaacctcctcagccttcatttgttcgtggatgtgtgagctctgagggtggccctgctattcctgtgtgtgcctgtagtgtccccagcataggggtcttaggcatagggctgaacagtccttccagagccctcgttccaatccctgccgtccttgcccctgaggggccctgaccactgtgagcaggagggtggcagagctgggacaaagctgcctttgccgctgggctttccgggactgtggagggagcacaggcggggaagctccacttcagacagggcttggtggggcaggacatggctcccattttgaagggaggtctccatgtggtccgagtgaggtgagacggccctcgtcctggtgttcctgatcatcttgaaaggttcttctggaactcctgtccccttagtcatgagaacagaaagtgcaatatttcctttcacctggcaggggaggggggatttatttctgaaagaaaaatatataaacagatcttctacatttatatttttaatcttctgttaaatacactttccgatattgccttgccttttgagctcttgctacagtcgcctttgctactgctttaagagaatttacaggtattgataaagaacaagactgttttattaaaagctttattcaacttg

SEQ ID NO: 1237 - DNA, 572 bp, Homo sapiens
  source 1..572: mol_type = unassigned DNA
atttacagcttctaaggactgggcctggagggaatttagttctagctgatcagtgctacctgtgctctggaaacccgctctgcgttcctgctggaggtggcctcccctccgccccagacaagaagaggccctcagccctcccccggtctcagagagccctgagaggaggcccagtccagagctcttcctccgttcccagtccacttctctagggccagtagcagacaccagccagtatgccgaggaaccagggcttctccgagcccgaatactcggccgagtactcagccgagtactccgtcagcctgccctccgaccctgaccgcggggtgggccggacccatgaaatctcggtccggaactcgggctcctgcctgtgcctgcctcgcttcatgcggctgactttcgtgccggagtccttggagaacctctaccagacctacttcaaaaggcagcgccacgagaccctgctggtgctggtggtctttgcagccctctttgactgctacgtggtggtcatgtgtgctgtggtcttctccagcgacaagctggcttccctcgccgtggctgga

SEQ ID NO: 1238 - DNA, 3415 bp, Homo sapiens
  source 1..3415: mol_type = unassigned DNA
agagcgcagcggcgagcgtgactccgccatcaggtccccggctccctccccggacctagcccactccgctgcgccagcgccgcgggcaccccggggctcggggctggggagatcatggcccgcctcttcagcccccggccgccccccagcgaagacctcttctacgagacctactacagcctgagccagcagtacccgctgctgctgctgctgctggggatcgtgctctgtgcgctcgcggcgctgctcgcagtggcctgggccagcggcagggagctgacctcagacccgagcttcctgaccactgtgctgtgcgcgctgggcggcttctcgctgctgctgggcctcgcttcccgggagcagcgactgcagcgctggacgcgtcccctgtccggcttggtatgggtcgcgctgctagcgctaggccacgccttcctgttcaccgggggcgtggtgagcgcctgggaccaggtgtcctattttctcttcgtcatcttcacggcgtatgccatgctgcccttgggcatgcgggacgccgccgtcgcgggcctcgcctcctcactctcgcatctgctggtcctcgggctgtatcttgggccacagccggactcacggcctgcactgctgccgcagttggcagcaaacgcagtgctgttcctgtgcgggaacgtggcaggagtgtaccacaaggcgctgatggagcgcgccctgcgggccacgttccgggaggcactcagctccctgcactcacgccggcggctggacaccgagaagaagcaccaggaacaccttctcttgtccatccttcctgcctacctggcccgagagatgaaggcagagatcatggcacggctgcaggcaggacaggggtcacggccagagagcactaacaatttccacagcctctatgtcaagaggcaccagggagtcagcgtgctgtatgctgacatcgtgggcttcacgcggctggccagcgagtgttcccctaaggagctggtgctcatgctcaatgagctctttggcaagttcgaccagattgccaaggagcatgaatgcatgcggatcaagatcctgggggactgttactactgtgtctctgggctgccactctcactgccagaccatgccatcaactgcgtgcgcatgggcctggacatgtgccgggccatcaggaaactgcgggcagccactggcgtggacatcaacatgcgtgtgggcgtgcactcaggcagcgtactgtgtggagtcatcgggctgcagaagtggcagtacgacgtttggtcacatgatgtcacactggctaaccacatggaggcaggcggtgtaccagggcgagtgcacatcacaggggctaccctggccctgctggcaggggcttatgctgtggaggacgcaggcatggagcatcgggacccctaccttcgggagctaggggagcctacctatctggtcatcgatccacgggcagaggaggaggatgagaagggcactgcaggaggcttgctgtcctcgcttgagggcctcaagatgcgtccatcactgctgatgacccgttacctggagtcctggggcgcagccaagccttttgcccacctgagccacggagacagccctgtgtccacctccacccctctcccggagaagaccctggcttccttcagcacccagtggagcctggatcggagccgtaccccccggggactagatgatgaactggacaccggggatgccaagttcttccaggtcattgagcagctcaactcgcagaaacagtggaagcagtcgaaggacttcaacccactgacactgtacttcagagagaaggagatggagaaagagtaccgactctctgcaatccccgccttcaaatactatgaagcctgcaccttcctggtttttctctccaacttcatcatccagatgctagtgacaaacaggcccccagctctggccatcacgtatagcatcaccttcctcctcttcctcctcatcctttttgtctgcttctcagaggacctgatgaggtgtgtcctgaaaggccccaagatgctgcactggctgcctgcactgtctggcctggtggccacacgaccaggactgagaatagccttgggcaccgccaccatcctccttgtctttgccatggccattaccagcctgttcttcttcccaacatcatcagactgccctttccaagctcccaatgtgtcctccatgatttccaacctctcctgggagctccctgggtctctgcctctcatcagtgtcccatactccatgcactgctgcacgctgggcttcctctcctgctccctctttctgcacatgagcttcgagctgaagctgctgctgctcctgctgtggctggcggcatcctgctccctcttcctgcactcccatgcctggctgtcggaatgcctcatcgtccgcctctatctgggccccttggactccaggcccggagtgctgaaggagcccaaactgatgggtgctatctccttcttcatcttcttcttcaccctccttgtcctggctcgccagaatgagtactactgccgcctggacttcctgtggaagaagaagctgaggcaggagagggaggagacagagacgatggagaacctgactcggctgctcttggagaacgtgctccctgcacacgtggccccccagttcattggccagaaccggcgcaacgaggatctctaccaccagtcctatgaatgcgtttgtgtcctcttcgcctcagtcccagacttcaaggagttctactctgaatccaacatcaatcatgagggcctagagtgtctgaggctgctcaatgagataattgctgattttgatgagctgctctccaagcccaagttcagtggggtggagaagatcaagaccatcggcagcacctacatggcagccacaggcttaaatgccacctctggacaggatgcacaacaggatgctgaacggagctgcagccaccttggcactatggtggaatttgccgtggccctggggtctaagctggacgtcatcaacaagcattcattcaacaacttccgcctgcgagtggggttgaaccatggacccgtagtagctggagttattggggcccagaagccgcaatatgacatttggggcaacacagtgaacgtggccagccgcatggagagtacaggagtccttggcaaaatccaagtgactgaggagacagcatgggccctacagtccctgggctacacctgctacagccggggtgtcatcaaggtgaaaggcaaagggcagctctgcacctacttcctgaacacagacttgacacgaactggacctccttcagctaccctaggctgagattgcactcgccttctaagaacctcaataaagagactctggggtgtctggagcccattgatgtctg

SEQ ID NO: 1239 - DNA, 2148 bp, Homo sapiens
  source 1..2148: mol_type = unassigned DNA
gcgggtgagaaaagctcaggtggggcccgccgggccgaaggaggtaacccggcgcccggccctagccagccccggggctcggggctggggagatcatggcccgcctcttcagcccccggccgccccccagcgaagacctcttctacgagacctactacagcctgagccagcagtacccgctgctgctgctgctgctggggatcgtgctctgtgcgctcgcggcgctgctcgcagtggcctgggccagcggcagggagctgacctcagacccgagcttcctgaccactgtgctgtgcgcgctgggcggcttctcgctgctgctgggcctcgcttcccgggagcagcgactgcagcgctggacgcgtcccctgtccggcttggtatgggtcgcgctgctagcgctaggccacgccttcctgttcaccgggggcgtggtgagcgcctgggaccaggtgtcctattttctcttcgtcatcttcacggcgtatgccatgctgcccttgggcatgcgggacgccgccgtcgcgggcctcgcctcctcactctcgcatctgctggtcctcgggctgtatcttgggccacagccggactcacggcctgcactgctgccgcagttggcagcaaacgcagtgctgttcctgtgcgggaacgtggcaggagtgtaccacaaggcgctgatggagcgcgccctgcgggccacgttccgggaggcactcagctccctgcactcacgccggcggctggacaccgagaagaagcaccaggaacaccttctcttgtccatccttcctgcctacctggcccgagagatgaaggcagagatcatggcacggctgcaggcaggacaggggtcacggccagagagcactaacaatttccacagcctctatgtcaagaggcaccagggagtcagcgtgctgtatgctgacatcgtgggcttcacgcggctggccagcgagtgttcccctaaggagctggtgctcatgctcaatgagctctttggcaagttcgaccagattgccaaggaaactgcgggcagccactggcgtggacatcaacatgcgtgtgggcgtgcactcaggcagcgtactgtgtggagtcatcgggctgcagaagtggcagtacgacgtttggtcacatgatgtcacactggctaaccacatggaggcaggcggtgtaccagggcgagtgcacatcacaggggctaccctggccctgctggcaggggcttatgctgtggaggacgcaggcatggagcatcgggacccctaccttcgggagctaggggagcctacctatctggtcatcgatccacgggcagaggaggaggatgagaagggcactgcaggaggcttgctgtcctcgcttgagggcctcaagatgcgtccatcactgctgatgacccgttacctggagtcctggggcgcagccaagccttttgcccacctgagccacggagacagccctgtgtccacctccacccctctcccggagaagaccctggcttccttcagcacccagtggagcctggatcggagccgtaccccccggggactagatgatgaactggacaccggggatgccaagttcttccaggtcattgagcagctcaactcgcagaaacagtggaagcagtcgaaggacttcaacccactgacactgtacttcagagagaaggagatggagaaagagtaccgactctctgcaatccccgccttcaaatactatgaagcctgcaccttcctggtttttctctccaacttcatcatccagatgctagtgacaaacaggcccccagctctggccatcacgtatagcatcaccttcctcctcttcctcctcatcctttttgtctgcttctcagaggacctgatgaggtgtgtcctgaaaggccccaagatgctgcactggctgcctgcactgtctggcctggtggccacacgaccaggactgagaatagccttgggcaccgccaccatcctccttgtctttgccatggccattaccagcctgttcttcttcccaacatcatcagactgccctttccaagctcccaatgtgtcctccatgatttccaacctctcctgggagctccctgggtctctgcctctcatcagtgtcccagtgagtgttcccacatgcccttaa

SEQ ID NO: 1240 - DNA, 3353 bp, Homo sapiens
  source 1..3353: mol_type = unassigned DNA
gcgggtgagaaaagctcaggtggggcccgccgggccgaaggaggtaacccggcgcccggccctagccagccccggggctcggggctggggagatcatggcccgcctcttcagcccccggccgccccccagcgaagacctcttctacgagacctactacagcctgagccagcagtacccgctgctgctgctgctgctggggatcgtgctctgtgcgctcgcggcgctgctcgcagtggcctgggccagcggcagggagctgacctcagacccgagcttcctgaccactgtgctgtgcgcgctgggcggcttctcgctgctgctgggcctcgcttcccgggagcagcgactgcagcgctggacgcgtcccctgtccggcttggtatgggtcgcgctgctagcgctaggccacgccttcctgttcaccgggggcgtggtgagcgcctgggaccaggtgtcctattttctcttcgtcatcttcacggcgtatgccatgctgcccttgggcatgcgggacgccgccgtcgcgggcctcgcctcctcactctcgcatctgctggtcctcgggctgtatcttgggccacagccggactcacggcctgcactgctgccgcagttggcagcaaacgcagtgctgttcctgtgcgggaacgtggcaggagtgtaccacaaggcgctgatggagcgcgccctgcgggccacgttccgggaggcactcagctccctgcactcacgccggcggctggacaccgagaagaagcaccaggaacaccttctcttgtccatccttcctgcctacctggcccgagagatgaaggcagagatcatggcacggctgcaggcaggacaggggtcacggccagagagcactaacaatttccacagcctctatgtcaagaggcaccagggagtcagcgtgctgtatgctgacatcgtgggcttcacgcggctggccagcgagtgttcccctaaggagctggtgctcatgctcaatgagctctttggcaagttcgaccagattgccaaggagcatgaatgcatgcggatcaagatcctgggggactgttactactgtgtctctgggctgccactctcactgccagaccatgccatcaactgcgtgcgcatgggcctggacatgtgccgggccatcaggaaactgcgggcagccactggcgtggacatcaacatgcgtgtgggcgtgcactcaggcagcgtactgtgtggagtcatcgggctgcagaagtggcagtacgacgtttggtcacatgatgtcacactggctaaccacatggaggcaggcggtgtaccagggcgagtgcacatcacaggggctaccctggccctgctggcaggggcttatgctgtggaggacgcaggcatggagcatcgggacccctaccttcgggagctaggggagcctacctatctggtcatcgatccacgggcagaggaggaggatgagaagggcactgcaggaggcttgctgtcctcgcttgagggcctcaagatgcgtccatcactgctgatgacccgttacctggagtcctggggcgcagccaagccttttgcccacctgagccacggagacagccctgtgtccacctccacccctctcccggagaagaccctggcttccttcagcacccagtggagcctggatcggagccgtaccccccggggactagatgatgaactggacaccggggatgccaagttcttccaggtcattgagcagctcaactcgcagaaacagtggaagcagtcgaaggacttcaacccactgacactgtacttcagagagaaggagatggagaaagagtaccgactctctgcaatccccgccttcaaatactatgaagcctgcaccttcctggtttttctctccaacttcatcatccagatgctagtgacaaacaggcccccagctctggccatcacgtatagcatcaccttcctcctcttcctcctcatcctttttgtctgcttctcagaggacctgatgaggtgtgtcctgaaaggccccaagatgctgcactggctgcctgcactgtctggcctggtggccacacgaccaggactgagaatagccttgggcaccgccaccatcctccttgtctttgccatggccattaccagcctgttcttcttcccaacatcatcagactgccctttccaagctcccaatgtgtcctccatgatttccaacctctcctgggagctccctgggtctctgcctctcatcagtgtcccatactccatgcactgctgcacgctgggcttcctctcctgctccctctttctgcacatgagcttcgagctgaagctgctgctgctcctgctgtggctggcggcatcctgctccctcttcctgcactcccatgcctggctgtcggaatgcctcatcgtccgcctctatctgggccccttggactccaggcccggagtgctgaaggagcccaaactgatgggtgctatctccttcttcatcttcttcttcaccctccttgtcctggctcgccagaatgagtactactgccgcctggacttcctgtggaagaagaagctgaggcaggagagggaggagacagagacgatggagaacctgactcggctgctcttggagaacgtgctccctgcacacgtggccccccagttcattggccagaaccggcgcaacgaggatctctaccaccagtcctatgaatgcgtttgtgtcctcttcgcctcagtcccagacttcaaggagttctactctgaatccaacatcaatcatgagggcctagagtgtctgaggctgctcaatgagataattgctgattttgatgagctgctctccaagcccaagttcagtggggtggagaagatcaagaccatcggcagcacctacatggcagccacaggcttaaatgccacctctggacaggatgcacaacaggatgctgaacggagctgcagccaccttggcactatggtggaatttgccgtggccctggggtctaagctggacgtcatcaacaagcattcattcaacaacttccgcctgcgagtggggttgaaccatggacccgtagtagctggagttattggggcccagaagccgcaatatgacatttggggcaacacagtgaacgtggccagccgcatggagagtacaggagtccttggcaaaatccaagtgactgaggagacagcatgggccctacagtccctgggctacacctgctacagccggggtgtcatcaaggtgaaaggcaaagggcagctctgcacctacttcctgaacacagacttgacacgaactggacctccttcagctaccctaggctgagattgcactcgccttctaagaacc

SEQ ID NO: 1241 - DNA, 3404 bp, Homo sapiens
  source 1..3404: mol_type = unassigned DNA
agagcgcagcggcgagcgtgactccgccatcaggtccccggctccctccccggacctagcccactccgctgcgccagcgccgcgggcaccagccccggggctcggggctggggagatcatggcccgcctcttcagcccccggccgccccccagcgaagacctcttctacgagacctactacagcctgagccagcagtacccgctgctgctgctgctgctggggatcgtgctctgtgcgctcgcggcgctgctcgcagtggcctgggccagcggcagggagctgacctcagacccgagcttcctgaccactgtgctgtgcgcgctgggcggcttctcgctgctgctgggcctcgcttcccgggagcagcgactgcagcgctggacgcgtcccctgtccggcttggtatgggtcgcgctgctagcgctaggccacgccttcctgttcaccgggggcgtggtgagcgcctgggaccaggtgtcctattttctcttcgtcatcttcacggcgtatgccatgctgcccttgggcatgcgggacgccgccgtcgcgggcctcgcctcctcactctcgcatctgctggtcctcgggctgtatcttgggccacagccggactcacggcctgcactgctgccgcagttggcagcaaacgcagtgctgttcctgtgcgggaacgtggcaggagtgtaccacaaggcgctgatggagcgcgccctgcgggccacgttccgggaggcactcagctccctgcactcacgccggcggctggacaccgagaagaagcaccaggaacaccttctcttgtccatccttcctgcctacctggcccgagagatgaaggcagagatcatggcacggctgcaggcaggacaggggtcacggccagagagcactaacaatttccacagcctctatgtcaagaggcaccagggagtcagcgtgctgtatgctgacatcgtgggcttcacgcggctggccagcgagtgttcccctaaggagctggtgctcatgctcaatgagctctttggcaagttcgaccagattgccaaggagcatgaatgcatgcggatcaagatcctgggggactgttactactgtgtctctgggctgccactctcactgccagaccatgccatcaactgcgtgcgcatgggcctggacatgtgccgggccatcaggaaactgcgggcagccactggcgtggacatcaacatgcgtgtgggcgtgcactcaggcagcgtactgtgtggagtcatcgggctgcagaagtggcagtacgacgtttggtcacatgatgtcacactggctaaccacatggaggcaggcggtgtaccagggcgagtgcacatcacaggggctaccctggccctgctggcaggggcttatgctgtggaggacgcaggcatggagcatcgggacccctaccttcgggagctaggggagcctacctatctggtcatcgatccacgggcagaggaggaggatgagaagggcactgcaggaggcttgctgtcctcgcttgagggcctcaagatgcgtccatcactgctgatgacccgttacctggagtcctggggcgcagccaagccttttgcccacctgagccacggagacagccctgtgtccacctccacccctctcccggagaagaccctggcttccttcagcacccagtggagcctggatcggagccgtaccccccggggactagatgatgaactggacaccggggatgccaagttcttccaggtcattgagcagctcaactcgcagaaacagtggaagcagtcgaaggacttcaacccactgacactgtacttcagagagaaggagatggagaaagagtaccgactctctgcaatccccgccttcaaatactatgaagcctgcaccttcctggtttttctctccaacttcatcatccagatgctagtgacaaacaggcccccagctctggccatcacgtatagcatcaccttcctcctcttcctcctcatcctttttgtctgcttctcagaggacctgatgaggtgtgtcctgaaaggccccaagatgctgcactggctgcctgcactgtctggcctggtggccacacgaccaggactgagaatagccttgggcaccgccaccatcctccttgtctttgccatggccattaccagcctgttcttcttcccaacatcatcagactgccctttccaagctcccaatgtgtcctccatgatttccaacctctcctgggagctccctgggtctctgcctctcatcagtgtcccatactccatgcactgctgcacgctgggcttcctctcctgctccctctttctgcacatgagcttcgagctgaagctgctgctgctcctgctgtggctggcggcatcctgctccctcttcctgcactcccatgcctggctgtcggaatgcctcatcgtccgcctctatctgggccccttggactccaggcccggagtgctgaaggagcccaaactgatgggtgctatctccttcttcatcttcttcttcaccctccttgtcctggctcgccagaatgagtactactgccgcctggacttcctgtggaagaagaagctgaggcaggagagggaggagacagagacgatggagaacctgactcggctgctcttggagaacgtgctccctgcacacgtggccccccagttcattggccagaaccggcgcaacgaggatctctaccaccagtcctatgaatgcgtttgtgtcctcttcgcctcagtcccagacttcaaggagttctactctgaatccaacatcaatcatgagggcctagagtgtctgaggctgctcaatgagataattgctgattttgatgagctgctctccaagcccaagttcagtggggtggagaagatcaagaccatcggcagcacctacatggcagccacaggcttaaatgccacctctggacaggatgcacaacaggatgctgaacggagctgcagccaccttggcactatggtggaatttgccgtggccctggggtctaagctggacgtcatcaacaagcattcattcaacaacttccgcctgcgagtggggttgaaccatggacccgtagtagctggagttattggggcccagaagccgcaatatgacatttggggcaacacagtgaacgtggccagccgcatggagagtacaggagtccttggcaaaatccaagtgactgaggagacagcatgggccctacagtccctgggctacacctgctacagccggggtgtcatcaaggtgaaaggcaaagggcagctctgcacctacttcctgaacacagacttgacacgaactggacctccttcagctaccctaggctgagattgcactcgccttctaagaacctcaataaagagactctggggtgtctgga

SEQ ID NO: 1242 - DNA, 559 bp, Homo sapiens
  source 1..559: mol_type = unassigned DNA
agagcgcagcggcgagcgtgactccgccatcaggtccccggctccctccccggacctagcccactccgctgcgccagcgccgcgggcagtgagttcggggatcaggggaacccggggctccctcgcaccaaccccaaatcctgccctcctggcgatgaggcttttctagggcacctctacaatccggccccggggctcggggctggggagatcatggcccgcctcttcagcccccggccgccccccagcgaagacctcttctacgagacctactacagcctgagccagcagtacccgctgctgctgctgctgctggggatcgtgctctgtgcgctcgcggcgctgctcgcagtggcctgggccagcggcagggagctgacctcagacccgagcttcctgaccactgtgctgtgcgcgctgggcggcttctcgctgctgctgggcctcgcttcccgggagcagcgactgcagcgctggacgcgtcccctgtccggcttggtatgggtcgcgctgctagcgctaggccacgccttcctgttcaccgggggcgtggtgagcg

SEQ ID NO: 1243 - DNA, 2841 bp, Homo sapiens
  source 1..2841: mol_type = unassigned DNA
tataaatgtcctagggaaggaggttattgcctttagcccctttttggggaagcgtctggaagtaagtcctgaggaatgaagtctcagaaagagggctgttgcagcagaggtgacctgtccattcagacaggtcctggaggagaatgggccccacggaggcttgtctccaatgttctcattttctcctgcaccaacatcgtgggtgtctgcacccactatccggctgaggtctcccagagacaggctttccaggagacccgagagtgcatccaggcgcggctccactcgcagcgggagaaccagcagcaggaacggctcctgctgtctgtccttccccgtcatgttgccatggagatgaaagcagacatcaacgccaagcaggaggatatgatgttccataagatttacatccagaaacatgacaacgtgagcatcctgtttgctgacatcgagggcttcaccagcctggcgtcccagtgcactgcacaggaactggtcatgaccctcaacgagctcttcgcccgctttgacaagctggccgcagagaatcactgtttacgtattaagatccttggggattgttattactgcgtctcggggctgcctgaagcaagggctgaccacgcccactgctgtgtggagatgggcatggacatgatcgaggccatctcgttggtccgggaggtgacaggggtgaacgtgaacatgcgtgtgggaattcacagcgggcgagtacactgcggtgtccttggtctcaggaagtggcagttcgacgtctggtctaacgatgtcacgctagccaaccacatggaggctggcggcaaggcaggacgcatccacatcaccaaggctacactcaactacctgaatggggactacgaggtggagccaggctgtgggggcgagcgcaacgcctacctcaaggagcacagtatcgagaccttcctcatcctgcgctgcacccagaagcggaaagaagagaaggccatgatcgccaagatgaaccgccagagaaccaactccatcgggcacaacccaccacactggggggctgagcgccccttctacaaccacctgggtggcaaccaggtgtccaaggagatgaagcggatgggctttgaagaccccaaggacaagaacgcccaggagagtgcgaaccctgaggatgaagtggatgagtttctgggccgtgccattgacgccaggagcattgataggcttcggtctgagcacgtccgcaagttcctcctgaccttcagggagcctgacttagagaagaagtactccaagcaggtagacgaccgatttggtgcctatgtggcgtgtgcctcgctcgtcttcctcttcatctgctttgtccagatcaccatcgtgccccactccatattcatgctcagcttctacctgacctgttccctgctgctgaccttggtggtgtttgtgtctgtgatctactcctgcgtaaagctcttcccctccccactgcagaccctctccaggaagatcgtgcggtccaagatgaacagcaccctggttggggtgttcaccatcaccctggtgttcctggcggcttttgtcaacatgttcacgtgcaactccagggacctgctgggctgcttggcacaggagcacaacatcagcgcgagccaggtcaacgcgtgtcacgtggcggagtcggccgtcaactacagcctgggcgatgagcagggcttctgtggcagcccctggcccaactgcaacttccccgagtacttcacctacagcgtgctgctcagcctgctggcctgctccgtgttcctgcagatcagctgcatcgggaagctggtgctcatgctggccatcgagctcatctacgtgctcatcgtggaggtgccaggtgtcacgctcttcgacaacgccgacctgctggtcaccgccaacgccatagacttcttcaacaacgggacctcccagtgccctgagcatgcaaccaaggtggcattgaaggtggtgacgcccatcatcatctcagtctttgtgctggccctgtacctgcacgcccagcaggtggagtccactgcccgcctcgacttcctctggaaactgcaggccacagaggagaaagaggagatggaggagctgcaggcctacaaccggcggctgctgcacaacatcctgcccaaggacgtggccgctcacttcctggcccgcgagcggcgcaatgatgagctctactatcagtcctgtgagtgtgtggcggtcatgttcgcctccatcgccaacttctccgagttctacgttgagctggaggccaacaacgagggtgtcgagtgcctgcggctactcaatgagatcatcgctgactttgatgagatcatcagcgaggatcggttccggcagctggagaagatcaagaccatcggcagcacctacatggctgcctccggcctcaacgactctacctacgacaaggtgggcaagacccacatcaaggcactggccgactttgccatgaagctgatggaccagatgaagtacatcaatgagcactccttcaacaacttccagatgaagatcgggctcaacatcggccccgtggtggccggggtgataggggcacgaaagcctcagtacgacatctggggcaataccgtgaacgtggccagccgcatggacagcaccggtgtacccgaccgcatccaggtcaccacagacatgtaccaggtgctggctgccaacacgtaccagctggagtgccggggcgtggtcaaggtcaagggcaaaggcgagatgatgacctacttcctcaatggagggcccccgctcagttagcagctgttggccaatggtgccaggcagcct

SEQ ID NO: 1244 - DNA, 7311 bp, Homo sapiens
  source 1..7311: mol_type = unassigned DNA
gggcgagaagggaggagcggcgcgagcggccggagcggcgcagggcccgaagcgtgcatggcgcgccctgagccgggctcccgcgggcccccccggagcgcctctcgggcgccgcggctctcaggcgggcccctctgggccggctgcttctgagccccggcgctggatctctggatgccttactccccgggagaagcctgcctgcgtcggggcagaaccgcggcagcgctgcgccggattccgtcctccgcctagtcgttccgcgccggccgcggtgggcccgcagccggcgacgaggagcttggggcttgcgaagcgggcgcgacagctctccgggccggcaggtcccggccggccccgctccgtttgcgggaaagggagaggcgagaggggaagggccgcaccgcaggagccggtccctgacccggaccccgccccctgcgcggacgcgccgaaggctcggctcggctttcgccggggccacgcatccactctcgccgcgagaggtgggggatgcgggcaacggcccccccgggctccaggaccctcccccccggggctccggagctgttgctccgcccgtcgccccctcccccgtcctctccacctcccatcccacctccccacccctcgtaagaaaataatgctggctggcgcccgcacctcccagtcgctcccagtccgctgcgaggaaagcgcacccgcagtgtctcttcgccgggacccccgccgagccgccctcgccgccgccgagccccgagagcagctgggctccgcttaggcggaatcagcgagcgccgcgcccgggcactgccggcccgaggaggcaccgcccgcaaggacaccactccgtcccgtctcgtccgcaactccggccctcgtcgagctcgacgcgagccaggatcccggacgtctctccgcgtgcggcgcagcagcagccagaccagtccctgcgaccccacctcggaggcaactccatttcggacctgggacttctgacgcggatcctcagctacttctcacctcggggctgtgccctcctcctccgctcaggacgggggtgccaagatgccccgctgcagcgcagggccccgggccgcccccgacgtgtgaccctagcctggtccccctgctcggccgtccgccctccccttggagacccccggcccggcttccgggggaggaggaaggagacgacgaggccgagggggggatgtccggctccaaaagcgtgagccccccgggctacgcggcgcagaagactgcggcgccggcgccccggggaggccccgaacaccgctctgcgtggggcgaggccgattcccgcgcgaatggctacccccatgcccccgggggctctgcccgcggctccaccaagaaacccgggggggcggtgaccccgcagcagcagcagcgcctggccagccgctggcgcagcgacgacgacgacgatcctccgctgagcggtgacgaccccctggccgggggcttcggcttcagcttccgctccaagtccgcctggcaggagcgcggcggcgacgactgcggtcgcggcagccgccggcagcggcggggcgcggccagcgggggcagcacccgggcgccccctgcgggcggcggcggcggctcggcggcggcggctgcctcggcgggcgggacggaggtgcgccctcgctcggtggaggtgggtctggaggagcggcggggcaaggggcgcgcggccgacgagctggaggccggcgccgtcgagggcggcgaggggtccggggatggcggcagctcggcggactcgggctcgggcgcggggcccggcgcggtgctgtccctgggcgcctgctgcctggcgttgctgcagatattccgctccaagaagttcccgtcggacaaactggagcggctgtaccagcgctacttcttccgcctgaaccagagcagcctcaccatgctcatggccgtgctggtgctcgtgtgcctggtcatgttggccttccacgcggcgcggcccccgctccagctgccctacctggccgtgctggcggccgccgtcggcgtgatcctcatcatggctgtgctttgcaaccgcgccgccttccaccaggaccacatgggcctggcctgctatgcgctcatcgccgtggtgctggccgtccaggtggtgggcctgctgctgccgcagccacgcagcgcctctgagggcatctggtggaccgtgttcttcatctacaccatctacacgctgctgcccgtgcgcatgcgggccgcagtgctcagcggggtgctcctgtccgccctccacctggccatcgccctgcgcaccaacgcccaggaccagttcctgctgaagcagcttgtctccaatgttctcattttctcctgcaccaacatcgtgggtgtctgcacccactatccggctgaggtctcccagagacaggctttccaggagacccgagagtgcatccaggcgcggctccactcgcagcgggagaaccagcagcaggaacggctcctgctgtctgtccttccccgtcatgttgccatggagatgaaagcagacatcaacgccaagcaggaggatatgatgttccataagatttacatccagaaacatgacaacgtgagcatcctgtttgctgacatcgagggcttcaccagcctggcgtcccagtgcactgcacaggaactggtcatgaccctcaacgagctcttcgcccgctttgacaagctggccgcagagaatcactgtttacgtattaagatccttggggattgttattactgcgtctcggggctgcctgaagcaagggctgaccacgcccactgctgtgtggagatgggcatggacatgatcgaggccatctcgttggtccgggaggtgacaggggtgaacgtgaacatgcgtgtgggaattcacagcgggcgagtacactgcggtgtccttggtctcaggaagtggcagttcgacgtctggtctaacgatgtcacgctagccaaccacatggaggctggcggcaaggcaggacgcatccacatcaccaaggctacactcaactacctgaatggggactacgaggtggagccaggctgtgggggcgagcgcaacgcctacctcaaggagcacagtatcgagaccttcctcatcctgcgctgcacccagaagcggaaagaagagaaggccatgatcgccaagatgaaccgccagagaaccaactccatcgggcacaacccaccacactggggggctgagcgccccttctacaaccacctgggtggcaaccaggtgtccaaggagatgaagcggatgggctttgaagaccccaaggacaagaacgcccaggagagtgcgaaccctgaggatgaagtggatgagtttctgggccgtgccattgacgccaggagcattgataggcttcggtctgagcacgtccgcaagttcctcctgaccttcagggagcctgacttagagaagaagtactccaagcaggtagacgaccgatttggtgcctatgtggcgtgtgcctcgctcgtcttcctcttcatctgctttgtccagatcaccatcgtgccccactccatattcatgctcagcttctacctgacctgttccctgctgctgaccttggtggtgtttgtgtctgtgatctactcctgcgtaaagctcttcccctccccactgcagaccctctccaggaagatcgtgcggtccaagatgaacagcaccctggttggggtgttcaccatcaccctggtgttcctggcggcttttgtcaacatgttcacgtgcaactccagggacctgctgggctgcttggcacaggagcacaacatcagcgcgagccaggtcaacgcgtgtcacgtggcggagtcggccgtcaactacagcctgggcgatgagcagggcttctgtggcagcccctggcccaactgcaacttccccgagtacttcacctacagcgtgctgctcagcctgctggcctgctccgtgttcctgcagatcagctgcatcgggaagctggtgctcatgctggccatcgagctcatctacgtgctcatcgtggaggtgccaggtgtcacgctcttcgacaacgccgacctgctggtcaccgccaacgccatagacttcttcaacaacgggacctcccagtgccctgagcatgcaaccaaggtggcattgaaggtggtgacgcccatcatcatctcagtctttgtgctggccctgtacctgcacgcccagcaggtggagtccactgcccgcctcgacttcctctggaaactgcaggccacagaggagaaagaggagatggaggagctgcaggcctacaaccggcggctgctgcacaacatcctgcccaaggacgtggccgctcacttcctggcccgcgagcggcgcaatgatgagctctactatcagtcctgtgagtgtgtggcggtcatgttcgcctccatcgccaacttctccgagttctacgttgagctggaggccaacaacgagggtgtcgagtgcctgcggctactcaatgagatcatcgctgactttgatgagatcatcagcgaggatcggttccggcagctggagaagatcaagaccatcggcagcacctacatggctgcctccggcctcaacgactctacctacgacaaggtgggcaagacccacatcaaggcactggccgactttgccatgaagctgatggaccagatgaagtacatcaatgagcactccttcaacaacttccagatgaagatcgggctcaacatcggccccgtggtggccggggtgataggggcacgaaagcctcagtacgacatctggggcaataccgtgaacgtggccagccgcatggacagcaccggtgtacccgaccgcatccaggtcaccacagacatgtaccaggtgctggctgccaacacgtaccagctggagtgccggggcgtggtcaaggtcaagggcaaaggcgagatgatgacctacttcctcaatggagggcccccgctcagttagcagctgttggccaatggtgccaggcagcctggcctccagaggcatggaagcagcttctctgtgtgccgggggtggcggggaagccatgctccagcccgcagggctgcgctgctgagattttccacttggactccagagcagcttctgcctttgctggtgggcagcggcctctgtcccaggccccggggtgccagcgtcctgcgagcacccagctgaccaaagatgtttccctctgtagaagactctgctagactgggtctgaagcttgagttttctaacaggtgctgctgcacaggtggaaaggagccgtgggaatgtgtgtgtggcacggcccagacaagggcagggctgaggggcctccgactcagctgggggtagacgggctcgaatgtggcctgggagagcctagggggccccaggggtctgcttttctatgtgagcctttaaacttcagacaggccaccaccctgcacctgcaggggctttggcacaggagtgctggctttggagggactgtggccttcatcgtggtcctctgcccacacctccacgcacacagacagtgccctaggagggaaacagaactaattacgagggggaggcaagaggacgccaagcaaggagtggtgattctgagaaaaatatttattaaataaaacaaaacaagttctccgtgcccttctttagactatgctagttgtatgcgtgtaagagacacacaagcaaacgaggacgccactcggggggagggcggggatccccacttgtcttttttgtattttttattttgtattattgaaagccttggagatctcacagatagatatgccaaattctatattttgtaaattctctatattagaaaacagctgtgcacagcagggcgggtgtgctcatttgtactgtgtgtatgtcggtgtatgtactggtgtatatgtgtgtgtgttcatgctgtggaactggtctcacacaggatgtgtttccctcatttcagatttggcagttttgggttttccaaggtaccaccagagcagtgggtgtgtgcttttggggtaccatatgctcagattaagtaggaggatgcatggacacactgccccatcttttctgacacacgcacacgtatgtacacacatgcacacaccctccttcccctaagcaaaacgcagatggaataagaaaacaaaaagctgctttcccatcccaggccgagctggaaccaagggaagcaatctcatcctgcgacaggcagtgtggtgccctccacaccctgagatttcagacgtttgcggcttacagaggcagcgcccacagattccagagtgcttacagaaggccaggtgctttgcaggctgggacgaggaagccaagcctccctggcctactcagttggccaaggtgcaggtggctcttcctggagatgttcactcagactgggggatgcaatgtgcagccttcaggtttgcggaaagggagtggccttgacctccaccggcaaaccaggcagaggaatgggtagagcccagctttagagtccacagggaaagctagcaggaattttgttttagtgggagggggcagttaaacataccaagaaaaaaatactatttttataacctatgaggaagacatttggaaaatgatactctagcacagaattcagtggaatccttagggcccatgcccaaatctttccattgcttctcaggttagaatgatcttcacctccaacatgagcttggaggtgatgaggcagtggctctgtgccagctgccacaatgtgactttgatgtccacctgtaccacctctcactgggctctagcaccaccctcccctccccgcacaccaactgaacacagctctgagaagcaaagtgtgtggacccaaaactgccaagcctgagtctgtcccgtgcttctgctgctccatcctttgagttctgcattgccatcctgacgtcggccacaggaggcctgctttcttccagctgttgttctcaagttccctgcccctccacatcgcccgccagtggtgttgggttttcgttctgcttccaacctgagtaaagtgtgtgtgctgagttcatcccatgttctcccatggtcatggcttcccggccccatggggacccctctcccatcccagcagtgactggtgacagtgtgcaggtgcagtgctagctcttcgttccctctaaagggtgtgcactctttttattcctactcttgcaaaaacagatacgattatgatttcccatggaaattgaaaagtctatttaaataatttaactattaaacactttcactggtaa

SEQ ID NO: 1245 - DNA, 3962 bp, Homo sapiens
  source 1..3962: mol_type = unassigned DNA
agatgcatggagggcctggaatcatgatgaggggaggggatgcggtgctctctcgggcaccggctgcactatcagcgttccctggagaaacagaacccttaggatttatatagacatatagaaagatttactgtgggggattggctcatgccgttacggagactgagaagacccatgagctgttgtctgtaagctggaggaccagaaaagccagtgacgtggtttcagtccaagcctgaaggcctgaaacccaggagagacaatgttgtaagtcccagcctaagtcagaggcctgagaaccaggagcccgctttccaagggcaggggaagatggatgtctcagctcaagaagagagtgaattctcccctcctctacctttttgctctattcaagccttcagtggatttgataacgcccacctgaatttggcaatctctggggcccctggatccctgctgaggtgcccatggtcccctccatccccacagggcagcctgtgtagtgctgggtagggcccaggcctgtcccacggaagacatggccccatctaggttccgcactcagttggagcttgtctccaatgttctcattttctcctgcaccaacatcgtgggtgtctgcacccactatccggctgaggtctcccagagacaggctttccaggagacccgagagtgcatccaggcgcggctccactcgcagcgggagaaccagcagcaggaacggctcctgctgtctgtccttccccgtcatgttgccatggagatgaaagcagacatcaacgccaagcaggaggatatgatgttccataagatttacatccagaaacatgacaacgtgagcatcctgtttgctgacatcgagggcttcaccagcctggcgtcccagtgcactgcacaggaactggtcatgaccctcaacgagctcttcgcccgctttgacaagctggccgcagagaatcactgtttacgtattaagatccttggggattgttattactgcgtctcggggctgcctgaagcaagggctgaccacgcccactgctgtgtggagatgggcatggacatgatcgaggccatctcgttggtccgggaggtgacaggggtgaacgtgaacatgcgtgtgggaattcacagcgggcgagtacactgcggtgtccttggtctcaggaagtggcagttcgacgtctggtctaacgatgtcacgctagccaaccacatggaggctggcggcaaggcaggacgcatccacatcaccaaggctacactcaactacctgaatggggactacgaggtggagccaggctgtgggggcgagcgcaacgcctacctcaaggagcacagtatcgagaccttcctcatcctgcgctgcacccagaagcggaaagaagagaaggccatgatcgccaagatgaaccgccagagaaccaactccatcgggcacaacccaccacactggggggctgagcgccccttctacaaccacctgggtggcaaccaggtgtccaaggagatgaagcggatgggctttgaagaccccaaggacaagaacgcccaggagagtgcgaaccctgaggatgaagtggatgagtttctgggccgtgccattgacgccaggagcattgataggcttcggtctgagcacgtccgcaagttcctcctgaccttcagggagcctgacttagagaagaagtactccaagcaggtagacgaccgatttggtgcctatgtggcgtgtgcctcgctcgtcttcctcttcatctgctttgtccagatcaccatcgtgccccactccatattcatgctcagcttctacctgacctgttccctgctgctgaccttggtggtgtttgtgtctgtgatctactcctgcgtaaagctcttcccctccccactgcagaccctctccaggaagatcgtgcggtccaagatgaacagcaccctggttggggtgttcaccatcaccctggtgttcctggcggcttttgtcaacatgttcacgtgcaactccagggacctgctgggctgcttggcacaggagcacaacatcagcgcgagccaggtcaacgcgtgtcacgtggcggagtcggccgtcaactacagcctgggcgatgagcagggcttctgtggcagcccctggcccaactgcaacttccccgagtacttcacctacagcgtgctgctcagcctgctggcctgctccgtgttcctgcagatcagctgcatcgggaagctggtgctcatgctggccatcgagctcatctacgtgctcatcgtggaggtgccaggtgtcacgctcttcgacaacgccgacctgctggtcaccgccaacgccatagacttcttcaacaacgggacctcccagtggagcctgtgtgagaacctcagacacaggagaatggaagctggtacctactttccctctggagtcaaggaacaaagccctgagcatgcaaccaaggtggcattgaaggtggtgacgcccatcatcatctcagtctttgtgctggccctgtacctgcacgcccagcaggtggagtccactgcccgcctcgacttcctctggaaactgcaggccacagaggagaaagaggagatggaggagctgcaggcctacaaccggcggctgctgcacaacatcctgcccaaggacgtggccgctcacttcctggcccgcgagcggcgcaatgatgagctctactatcagtcctgtgagtgtgtggcggtcatgttcgcctccatcgccaacttctccgagttctacgttgagctggaggccaacaacgagggtgtcgagtgcctgcggctactcaatgagatcatcgctgactttgatgagatcatcagcgaggatcggttccggcagctggagaagatcaagaccatcggcagcacctacatggctgcctccggcctcaacgactctacctacgacaaggtgggcaagacccacatcaaggcactggccgactttgccatgaagctgatggaccagatgaagtacatcaatgagcactccttcaacaacttccagatgaagatcgggctcaacatcggccccgtggtggccggggtgataggggcacgaaagcctcagtacgacatctggggcaataccgtgaacgtggccagccgcatggacagcaccggtgtacccgaccgcatccaggtcaccacagacatgtaccaggtgctggctgccaacacgtaccagctggagtgccggggcgtggtcaaggtcaagggcaaaggcgagatgatgacctacttcctcaatggagggcccccgctcagttagcagctgttggccaatggtgccaggcagcctggcctccagaggcatggaagcagcttctctgtgtgccgggggtggcggggaagccatgctccagcccgcagggctgcgctgctgagattttccacttggactccagagcagcttctgcctttgctggtgggcagcggcctctgtcccaggccccggggtgccagcgtcctgcgagcacccagctgaccaaagatgtttccctctgtagaagactctgctagactgggtctgaagcttgagttttctaacaggtgctgctgcacaggtggaaaggagccgtgggaatgtgtgtgtggcacggcccagacaagggcagggctgaggggcctccgactcagctgggggtagacgggctcgaatgtggcctgggagagcctagggggccccaggggtctgcttttctatgtgagcctttaaacttcagacaggccaccaccctgcacctgcaggggctttggcacaggagtgctggctttggagggactgtggccttcatcgtggtcctctgcccacacctccacgcacacagacagtgccctaggagggaaacagaactaattacgagggggaggcaagaggacgccaagcaaggagtggtgattctgagaaaaatatttattaaataaaacaaaac

SEQ ID NO: 1246 - DNA, 6464 bp, Homo sapiens
  source 1..6464: mol_type = unassigned DNA
ccggtctataggtgcataccaccacaccaggctaatttttttttttttgagacggagtctcactctgtcacccaggctggagtgcaatggcgcgatctttgctcactgcaacctctgccacccgggttcaagcaattctcctgcctcagctcctgagtagctgggattacaggcgcccgccaccacgcccggctaatttttgtatttttagtagagacgaggtttcaccatcttggccaggctggtcttgaactcctgaccttgtgatctacctgccagggccttccaaagtgctgggattacggacgtgagccaccacgcctggcccaggctaattttttgaaattttaatagaggcagggtcttgctgtattgcccaggttgctctcacattcctagccttaagccatcctcctatctcggcctcacaaagtgctgggattacaggtgtaagccactgtgcctggttttgggcaagtttcttgtcctgactgtgtcttgggttctcacctgttgattggggatacccttgttgcctacctccaagtaattttatgaggatgaaactcatagcttgtcagtgggaagtgcttaggtaatgagctactagtggtggcagtggctgtgatggtggtattaataccactcctactggatggtctctaatactatctccttccttccctaccagcaacatgtcatggtttagtggcctcctggtccctaaagtggatgaacggaaaacagcctggggtgaacgcaatgggcagaagcgttcgcggcgccgtggcactcgggcaggtggcttctgcacgccccgctatatgagctgcctccgggatgcagagccacccagccccacccctgcgggcccccctcggtgcccctggcaggatgacgccttcatccggaggggcggcccaggcaagggcaaggagctggggctgcgggcagtggccctgggcttcgaggataccgaggtgacaacgacagcgggcgggacggctgaggtggcgcccgacgcggtgcccaggagtgggcgatcctgctggcgccgtctggtgcaggtgttccagtcgaagcagttccgttcggccaagctggagcgcctgtaccagcggtacttcttccagatgaaccagagcagcctgacgctgctgatggcggtgctggtgctgctcacagcggtgctgctggctttccacgccgcacccgcccgccctcagcctgcctatgtggcactgttggcctgtgccgccgccctgttcgtggggctcatggtggtgtgtaaccggcatagcttccgccaggactccatgtgggtggtgagctacgtggtgctgggcatcctggcggcagtgcaggtcgggggcgctctcgcagcagacccgcgcagcccctctgcgggcctctggtgccctgtgttctttgtctacatcgcctacacgctcctccccatccgcatgcgggctgccgtcctcagcggcctgggcctctccaccttgcatttgatcttggcctggcaacttaaccgtggtgatgccttcctctggaagcagctcggtgccaatgtgctgctgttcctctgcaccaacgtcattggcatctgcacacactatccagcagaggtgtctcagcgccaggcctttcaggagacccgcggttacatccaggcccggctccacctgcagcatgagaatcggcagcaggagcggctgctgctgtcggtattgccccagcacgttgccatggagatgaaagaagacatcaacacaaaaaaagaagacatgatgttccacaagatctacatacagaagcatgacaatgtcagcatcctgtttgcagacattgagggcttcaccagcctggcatcccagtgcactgcgcaggagctggtcatgaccctgaatgagctctttgcccggtttgacaagctggctgcggagaatcactgcctgaggatcaagatcttgggggactgttactactgtgtgtcagggctgccggaggcccgggccgaccatgcccactgctgtgtggagatgggggtagacatgattgaggccatctcgctggtacgtgaggtgacaggtgtgaatgtgaacatgcgcgtgggcatccacagcgggcgcgtgcactgcggcgtccttggcttgcggaaatggcagttcgatgtgtggtccaatgatgtgaccctggccaaccacatggaggcaggaggccgggctggccgcatccacatcactcgggcaacactgcagtacctgaacggggactacgaggtggagccaggccgtggtggcgagcgcaacgcgtacctcaaggagcagcacattgagactttcctcatcctgggcgccagccagaaacggaaagaggagaaggccatgctggccaagctgcagcggactcgggccaactccatggaagggctgatgccgcgctgggttcctgatcgtgccttctcccggaccaaggactccaaggccttccgccagatgggcattgatgattccagcaaagacaaccggggcacccaagatgccctgaaccctgaggatgaggtggatgagttcctgagccgtgccatcgatgcccgcagcattgatcagctgcggaaggaccatgtgcgccggtttctgctcaccttccagagagaggatcttgagaagaagtactcccggaaggtggatccccgcttcggagcctacgttgcctgtgccctgttggtcttctgcttcatctgcttcatccagcttctcatcttcccacactccaccctgatgcttgggatctatgccagcatcttcctgctgctgctaatcaccgtgctgatctgtgctgtgtactcctgtggttctctgttccctaaggccctgcaacgtctgtcccgcagcattgtccgctcacgggcacatagcaccgcagttggcatcttttccgtcctgcttgtgtttacttctgccattgccaacatgttcacctgtaaccacacccccatacggagctgtgcagcccggatgctgaatttaacacctgctgacatcactgcctgccacctgcagcagctcaattactctctgggcctggatgctcccctgtgtgagggcaccatgcccacctgcagctttcctgagtacttcatcgggaacatgctgctgagtctcttggccagctctgtcttcctgcacatcagcagcatcgggaagttggccatgatctttgtcttggggctcatctatttggtgctgcttctgctgggtcccccagccaccatctttgacaactatgacctactgcttggcgtccatggcttggcttcttccaatgagacctttgatgggctggactgtccagctgcagggagggtggccctcaaatatatgacccctgtgattctgctggtgtttgcgctggcgctgtatctgcatgctcagcaggtggagtcgactgcccgcctagacttcctctggaaactacaggcaacaggggagaaggaggagatggaggagctacaggcatacaaccggaggctgctgcataacattctgcccaaggacgtggcggcccacttcctggcccgggagcgccgcaatgatgaactctactatcagtcgtgtgagtgtgtggctgttatgtttgcctccattgccaacttctctgagttctatgtggagctggaggcaaacaatgagggtgtcgagtgcctgcggctgctcaacgagatcatcgctgactttgatgagattatcagcgaggagcggttccggcagctggaaaagatcaagacgattggtagcacctacatggctgcctcagggctgaacgccagcacctacgatcaggtgggccgctcccacatcactgccctggctgactacgccatgcggctcatggagcagatgaagcacatcaatgagcactccttcaacaatttccagatgaagattgggctgaacatgggcccagtcgtggcaggtgtcatcggggctcggaagccacagtatgacatctgggggaacacagtgaatgtctctagtcgtatggacagcacgggggtccccgaccgaatccaggtgaccacggacctgtaccaggttctagctgccaagggctaccagctggagtgtcgaggggtggtcaaggtgaagggcaagggggagatgaccacctacttcctcaatgggggccccagcagttaacagggcccagccacaaattcagctgaagggaccaaggtgggcattgagtggactctgtgctcactgggtggagctgtggcagggggcactgagcctccagaccctgctaaccacaaaagggaacatcccagcaggctgtgcttggatcatgctcgtctgccctcaagctggaaaacaaggggctacctaccgagaggattatgcaagtgactttctttcttacttggggtagggctgttccctctccaatcttccagcctttgggagcaggggaggggtcagtagcagaagcagagggaggcctcttgcctgagggattaaaatggcagcttgccatgcctacccttccctgtctgtctgggcagcaggttcagggctgagcccttcttttccctcttttttcctgggaatattttgtacaatattttgtacaaagacaggcatgaggagtgcctattccatgcttgcctttgcaatacctgcatccccagcactggtcctgggcacttccccaccccagccaggtgtccctcctatgcacagagcagaggagggagaagctctggggagccagctttggccatatttcaggagaatgtttccatgtgccaaatcttagtcccatgatctgtccccaaaggggaacaaagggacctctgacagcttagatttagccccagttcctgcacgctccagggaacggggtgtctggcctcactggtactgtgaaaaatgctcagagagcaagcctgtgtgtggggatgtcaggtcaggagctggaagttcacctgcaggtgccaaagagcaggccggccagggctggggcagtgccagactctgatctgaggaccccgtcggggtccagatcaggtcactctgccccagtgctctcttgctgtctgctgacaagggggcatggagcatctcttcctcttctgttgccaaatagaaaagggtcagggcatggagaaaggtgaccctgatcccaaacctgccctcccaagtctctggtgttggggagggcccgtgtgtttgtgtaactgtgtgtgcatgttggtctttgtgtgcatatctgttttccaggtctatgtgagtccttgtgctcctgctcctcagctctccaccccaggttgcctctctcctgtgggcctctgtcttctgggaataaagcagggtttcctacttcaggggatgtagagagatgcccaggttgcacaggagtgggatggggtgtggtagcaaaaggagggagaggagtcctttttgtgccaaatccctaagtgccgttcgggggccatgtgtgcagcatgactctccctgtctgtggcagggacccaagcgcttgcttaagccccagtgctccatgccagcacttgaactgtctggggtttgatggacagaggctgaggaatttcctggcttccccagatagtgtcctgggacatggtatgctttggggctggggtagcatggaatccctctgaggacctggatactggtactacggggtggggaagaggaaccttaaacttggctttccccagccttcagcctgagtctagcatgtttctagctccccagtcccttgtgaagccttgagggctggcagaagggttaggaggttgaactctagattcccttcctgtctttgccttccttttacccctttccctgcaacctccttgactctggcctgaatttgttggtgcctcagtttctctgtctgtacctatttaagccaaaggcactagcctgaattttgcttgaagatcactttgtcttggaaatgactagagaggcagaggagaagggtttccagagttgctaggtttgggagtggaaggggcaggcagtgcacttgcccctcctcatgccccttctgacaccagctccctgtggaggcctggtttctgggtaatgcctcccttgggcatcttcatgcatcaaccaaatgggccatcaggtacttcattagtcatggcagaaggaggggaaaagacttgttttccagacagaaaatctactcccctgtccccagccatatccctggataggaagggataggaagagactacttggtgccatggggtaggggtgagggtataagtagatcagagtgggaagacctcagccttgggtggcttgtctctgcttcttgccaggtgggagggcctgtccacaccctggatccccgtaccacagtgccagccatgcccttcccctgggctaccattgtccctttcctcacccagttggtagagg

SEQ ID NO: 1247 - DNA, 6407 bp, Homo sapiens
  source 1..6407: mol_type = unassigned DNA
tttttttttttttgagacggagtctcactctgtcacccaggctggagtgcaatggcgcgatctttgctcactgcaacctctgccacccgggttcaagcaattctcctgcctcagctcctgagtagctgggattacaggcgcccgccaccacgcccggctaatttttgtatttttagtagagacgaggtttcaccatcttggccaggctggtcttgaactcctgaccttgtgatctacctgccagggccttccaaagtgctgggattacggacgtgagccaccacgcctggcccaggctaattttttgaaattttaatagaggcagggtcttgctgtattgcccaggttgctctcacattcctagccttaagccatcctcctatctcggcctcacaaagtgctgggattacaggtgtaagccactgtgcctggttttgggcaagtttcttgtcctgactgtgtcttgggttctcacctgttgattggggatacccttgttgcctacctccaagtaattttatgaggatgaaactcatagcttgtcagtgggaagtgcttaggtaatgagctactagtggtggcagtggctgtgatggtggtattaataccactcctactggatggtctctaatactatctccttccttccctaccagcaacatgtcatggtttagtggcctcctggtccctaaagtggatgaacggaaaacagcctggggtgaacgcaatgggcagaagcgttcgcggcgccgtggcactcgggcaggtggcttctgcacgccccgctatatgagctgcctccgggatgcagagccacccagccccacccctgcgggcccccctcggtgcccctggcaggatgacgccttcatccggaggggcggcccaggcaagggcaaggagctggggctgcgggcagtggccctgggcttcgaggataccgaggtgacaacgacagcgggcgggacggctgaggtggcgcccgacgcggtgcccaggagtgggcgatcctgctggcgccgtctggtgcaggtgttccagtcgaagcagttccgttcggccaagctggagcgcctgtaccagcggtacttcttccagatgaaccagagcagcctgacgctgctgatggcggtgctggtgctgctcacagcggtgctgctggctttccacgccgcacccgcccgccctcagcctgcctatgtggcactgttggcctgtgccgccgccctgttcgtggggctcatggtggtgtgtaaccggcatagcttccgccaggactccatgtgggtggtgagctacgtggtgctgggcatcctggcggcagtgcaggtcgggggcgctctcgcagcagacccgcgcagcccctctgcgggcctctggtgccctgtgttctttgtctacatcgcctacacgctcctccccatccgcatgcgggctgccgtcctcagcggcctgggcctctccaccttgcatttgatcttggcctggcaacttaaccgtggtgatgccttcctctggaagcagctcggtgccaatgtgctgctgttcctctgcaccaacgtcattggcatctgcacacactatccagcagaggtgtctcagcgccaggcctttcaggagacccgcggttacatccaggcccggctccacctgcagcatgagaatcggcagcaggagcggctgctgctgtcggtattgccccagcacgttgccatggagatgaaagaagacatcaacacaaaaaaagaagacatgatgttccacaagatctacatacagaagcatgacaatgtcagcatcctgtttgcagacattgagggcttcaccagcctggcatcccagtgcactgcgcaggagctggtcatgaccctgaatgagctctttgcccggtttgacaagctggctgcggagaatcactgcctgaggatcaagatcttgggggactgttactactgtgtgtcagggctgccggaggcccgggccgaccatgcccactgctgtgtggagatgggggtagacatgattgaggccatctcgctggtacgtgaggtgacaggtgtgaatgtgaacatgcgcgtgggcatccacagcgggcgcgtgcactgcggcgtccttggcttgcggaaatggcagttcgatgtgtggtccaatgatgtgaccctggccaaccacatggaggcaggaggccgggctggccgcatccacatcactcgggcaacactgcagtacctgaacggggactacgaggtggagccaggccgtggtggcgagcgcaacgcgtacctcaaggagcagcacattgagactttcctcatcctgggcgccagccagaaacggaaagaggagaaggccatgctggccaagctgcagcggactcgggccaactccatggaagggctgatgccgcgctgggttcctgatcgtgccttctcccggaccaaggactccaaggccttccgccagatgggcattgatgattccagcaaagacaaccggggcacccaagatgccctgaaccctgaggatgaggtggatgagttcctgagccgtgccatcgatgcccgcagcattgatcagctgcggaaggaccatgtgcgccggtttctgctcaccttccagagagaggatcttgagaagaagtactcccggaaggtggatccccgcttcggagcctacgttgcctgtgccctgttggtcttctgcttcatctgcttcatccagcttctcatcttcccacactccaccctgatgcttgggatctatgccagcatcttcctgctgctgctaatcaccgtgctgatctgtgctgtgtactcctgtggttctctgttccctaaggccctgcaacgtctgtcccgcagcattgtccgctcacgggcacatagcaccgcagttggcatcttttccgtcctgcttgtgtttacttctgccattgccaacatgtacttcatcgggaacatgctgctgagtctcttggccagctctgtcttcctgcacatcagcagcatcgggaagttggccatgatctttgtcttggggctcatctatttggtgctgcttctgctgggtcccccagccaccatctttgacaactatgacctactgcttggcgtccatggcttggcttcttccaatgagacctttgatgggctggactgtccagctgcagggagggtggccctcaaatatatgacccctgtgattctgctggtgtttgcgctggcgctgtatctgcatgctcagcaggtggagtcgactgcccgcctagacttcctctggaaactacaggcaacaggggagaaggaggagatggaggagctacaggcatacaaccggaggctgctgcataacattctgcccaaggacgtggcggcccacttcctggcccgggagcgccgcaatgatgaactctactatcagtcgtgtgagtgtgtggctgttatgtttgcctccattgccaacttctctgagttctatgtggagctggaggcaaacaatgagggtgtcgagtgcctgcggctgctcaacgagatcatcgctgactttgatgagattatcagcgaggagcggttccggcagctggaaaagatcaagacgattggtagcacctacatggctgcctcagggctgaacgccagcacctacgatcaggtgggccgctcccacatcactgccctggctgactacgccatgcggctcatggagcagatgaagcacatcaatgagcactccttcaacaatttccagatgaagattgggctgaacatgggcccagtcgtggcaggtgtcatcggggctcggaagccacagtatgacatctgggggaacacagtgaatgtctctagtcgtatggacagcacgggggtccccgaccgaatccaggtgaccacggacctgtaccaggttctagctgccaagggctaccagctggagtgtcgaggggtggtcaaggtgaagggcaagggggagatgaccacctacttcctcaatgggggccccagcagttaacagggcccagccacaaattcagctgaagggaccaaggtgggcattgagtggactctgtgctcactgggtggagctgtggcagggggcactgagcctccagaccctgctaaccacaaaagggaacatcccagcaggctgtgcttggatcatgctcgtctgccctcaagctggaaaacaaggggctacctaccgagaggattatgcaagtgactttctttcttacttggggtagggctgttccctctccaatcttccagcctttgggagcaggggaggggtcagtagcagaagcagagggaggcctcttgcctgagggattaaaatggcagcttgccatgcctacccttccctgtctgtctgggcagcaggttcagggctgagcccttcttttccctcttttttcctgggaatattttgtacaatattttgtacaaagacaggcatgaggagtgcctattccatgcttgcctttgcaatacctgcatccccagcactggtcctgggcacttccccaccccagccaggtgtccctcctatgcacagagcagaggagggagaagctctggggagccagctttggccatatttcaggagaatgtttccatgtgccaaatcttagtcccatgatctgtccccaaaggggaacaaagggacctctgacagcttagatttagccccagttcctgcacgctccagggaacggggtgtctggcctcactggtactgtgaaaaatgctcagagagcaagcctgtgtgtggggatgtcaggtcaggagctggaagttcacctgcaggtgccaaagagcaggccggccagggctggggcagtgccagactctgatctgaggaccccgtcggggtccagatcaggtcactctgccccagtgctctcttgctgtctgctgacaagggggcatggagcatctcttcctcttctgttgccaaatagaaaagggtcagggcatggagaaaggtgaccctgatcccaaacctgccctcccaagtctctggtgttggggagggcccgtgtgtttgtgtaactgtgtgtgcatgttggtctttgtgtgcatatctgttttccaggtctatgtgagtccttgtgctcctgctcctcagctctccaccccaggttgcctctctcctgtgggcctctgtcttctgggaataaagcagggtttcctacttcaggggatgtagagagatgcccaggttgcacaggagtgggatggggtgtggtagcaaaaggagggagaggagtcctttttgtgccaaatccctaagtgccgttcgggggccatgtgtgcagcatgactctccctgtctgtggcagggacccaagcgcttgcttaagccccagtgctccatgccagcacttgaactgtctggggtttgatggacagaggctgaggaatttcctggcttccccagatagtgtcctgggacatggtatgctttggggctggggtagcatggaatccctctgaggacctggatactggtactacggggtggggaagaggaaccttaaacttggctttccccagccttcagcctgagtctagcatgtttctagctccccagtcccttgtgaagccttgagggctggcagaagggttaggaggttgaactctagattcccttcctgtctttgccttccttttacccctttccctgcaacctccttgactctggcctgaatttgttggtgcctcagtttctctgtctgtacctatttaagccaaaggcactagcctgaattttgcttgaagatcactttgtcttggaaatgactagagaggcagaggagaagggtttccagagttgctaggtttgggagtggaaggggcaggcagtgcacttgcccctcctcatgccccttctgacaccagctccctgtggaggcctggtttctgggtaatgcctcccttgggcatcttcatgcatcaaccaaatgggccatcaggtacttcattagtcatggcagaaggaggggaaaagacttgttttccagacagaaaatctactcccctgtccccagccatatccctggataggaagggataggaagagactacttggtgccatggggtaggggtgagggtataagtagatcagagtgggaagacctcagccttgggtggcttgtctctgcttcttgccaggtgggagggcctgtccacaccctggatccccgtaccacagtgccagccatgcccttcccctgggctaccattgtccctttcctcacccagttggtagaggagtcaggaggtgggaggccgtgggctttggttttataatgtaaccactgtgggggtgggggaggatggtgaaccatgtatttcagtgaaatatttaatatatttaaatatcaataaaatcaaactctttgtaaaatt

SEQ ID NO: 1248 - DNA, 5877 bp, Homo sapiens
  source 1..5877: mol_type = unassigned DNA
cggacggcggacggcgggcgggacggccaggacgcgcgggctcggaggaccgcgggacggccggccggccggccggagcccgcgggggcggcggggcgggggcccagggcaggcgcggagccgggccggcagcaacatgtcatggtttagtggcctcctggtccctaaagtggatgaacggaaaacagcctggggtgaacgcaatgggcagaagcgttcgcggcgccgtggcactcgggcaggtggcttctgcacgccccgctatatgagctgcctccgggatgcagagccacccagccccacccctgcgggcccccctcggtgcccctggcaggatgacgccttcatccggaggggcggcccaggcaagggcaaggagctggggctgcgggcagtggccctgggcttcgaggataccgaggtgacaacgacagcgggcgggacggctgaggtggcgcccgacgcggtgcccaggagtgggcgatcctgctggcgccgtctggtgcaggtgttccagtcgaagcagttccgttcggccaagctggagcgcctgtaccagcggtacttcttccagatgaaccagagcagcctgacgctgctgatggcggtgctggtgctgctcacagcggtgctgctggctttccacgccgcacccgcccgccctcagcctgcctatgtggcactgttggcctgtgccgccgccctgttcgtggggctcatggtggtgtgtaaccggcatagcttccgccaggactccatgtgggtggtgagctacgtggtgctgggcatcctggcggcagtgcaggtcgggggcgctctcgcagcagacccgcgcagcccctctgcgggcctctggtgccctgtgttctttgtctacatcgcctacacgctcctccccatccgcatgcgggctgccgtcctcagcggcctgggcctctccaccttgcatttgatcttggcctggcaacttaaccgtggtgatgccttcctctggaagcagctcggtgccaatgtgctgctgttcctctgcaccaacgtcattggcatctgcacacactatccagcagaggtgtctcagcgccaggcctttcaggagacccgcggttacatccaggcccggctccacctgcagcatgagaatcggcagcaggagcggctgctgctgtcggtattgccccagcacgttgccatggagatgaaagaagacatcaacacaaaaaaagaagacatgatgttccacaagatctacatacagaagcatgacaatgtcagcatcctgtttgcagacattgagggcttcaccagcctggcatcccagtgcactgcgcaggagctggtcatgaccctgaatgagctctttgcccggtttgacaagctggctgcggagaatcactgcctgaggatcaagatcttgggggactgttactactgtgtgtcagggctgccggaggcccgggccgaccatgcccactgctgtgtggagatgggggtagacatgattgaggccatctcgctggtacgtgaggtgacaggtgtgaatgtgaacatgcgcgtgggcatccacagcgggcgcgtgcactgcggcgtccttggcttgcggaaatggcagttcgatgtgtggtccaatgatgtgaccctggccaaccacatggaggcaggaggccgggctggccgcatccacatcactcgggcaacactgcagtacctgaacggggactacgaggtggagccaggccgtggtggcgagcgcaacgcgtacctcaaggagcagcacattgagactttcctcatcctgggcgccagccagaaacggaaagaggagaaggccatgctggccaagctgcagcggactcgggccaactccatggaagggctgatgccgcgctgggttcctgatcgtgccttctcccggaccaaggactccaaggccttccgccagatgggcattgatgattccagcaaagacaaccggggcacccaagatgccctgaaccctgaggatgaggtggatgagttcctgagccgtgccatcgatgcccgcagcattgatcagctgcggaaggaccatgtgcgccggtttctgctcaccttccagagagaggatcttgagaagaagtactcccggaaggtggatccccgcttcggagcctacgttgcctgtgccctgttggtcttctgcttcatctgcttcatccagcttctcatcttcccacactccaccctgatgcttgggatctatgccagcatcttcctgctgctgctaatcaccgtgctgatctgtgctgtgtactcctgtggttctctgttccctaaggccctgcaacgtctgtcccgcagcattgtccgctcacgggcacatagcaccgcagttggcatcttttccgtcctgcttgtgtttacttctgccattgccaacatgtacttcatcgggaacatgctgctgagtctcttggccagctctgtcttcctgcacatcagcagcatcgggaagttggccatgatctttgtcttggggctcatctatttggtgctgcttctgctgggtcccccagccaccatctttgacaactatgacctactgcttggcgtccatggcttggcttcttccaatgagacctttgatgggctggactgtccagctgcagggagggtggccctcaaatatatgacccctgtgattctgctggtgtttgcgctggcgctgtatctgcatgctcagcaggtggagtcgactgcccgcctagacttcctctggaaactacaggcaacaggggagaaggaggagatggaggagctacaggcatacaaccggaggctgctgcataacattctgcccaaggacgtggcggcccacttcctggcccgggagcgccgcaatgatgaactctactatcagtcgtgtgagtgtgtggctgttatgtttgcctccattgccaacttctctgagttctatgtggagctggaggcaaacaatgagggtgtcgagtgcctgcggctgctcaacgagatcatcgctgactttgatgagattatcagcgaggagcggttccggcagctggaaaagatcaagacgattggtagcacctacatggctgcctcagggctgaacgccagcacctacgatcaggtgggccgctcccacatcactgccctggctgactacgccatgcggctcatggagcagatgaagcacatcaatgagcactccttcaacaatttccagatgaagattgggctgaacatgggcccagtcgtggcaggtgtcatcggggctcggaagccacagtatgacatctgggggaacacagtgaatgtctctagtcgtatggacagcacgggggtccccgaccgaatccaggtgaccacggacctgtaccaggttctagctgccaagggctaccagctggagtgtcgaggggtggtcaaggtgaagggcaagggggagatgaccacctacttcctcaatgggggccccagcagttaacagggcccagccacaaattcagctgaagggaccaaggtgggcattgagtggactctgtgctcactgggtggagctgtggcagggggcactgagcctccagaccctgctaaccacaaaagggaacatcccagcaggctgtgcttggatcatgctcgtctgccctcaagctggaaaacaaggggctacctaccgagaggattatgcaagtgactttctttcttacttggggtagggctgttccctctccaatcttccagcctttgggagcaggggaggggtcagtagcagaagcagagggaggcctcttgcctgagggattaaaatggcagcttgccatgcctacccttccctgtctgtctgggcagcaggttcagggctgagcccttcttttccctcttttttcctgggaatattttgtacaatattttgtacaaagacaggcatgaggagtgcctattccatgcttgcctttgcaatacctgcatccccagcactggtcctgggcacttccccaccccagccaggtgtccctcctatgcacagagcagaggagggagaagctctggggagccagctttggccatatttcaggagaatgtttccatgtgccaaatcttagtcccatgatctgtccccaaaggggaacaaagggacctctgacagcttagatttagccccagttcctgcacgctccagggaacggggtgtctggcctcactggtactgtgaaaaatgctcagagagcaagcctgtgtgtggggatgtcaggtcaggagctggaagttcacctgcaggtgccaaagagcaggccggccagggctggggcagtgccagactctgatctgaggaccccgtcggggtccagatcaggtcactctgccccagtgctctcttgctgtctgctgacaagggggcatggagcatctcttcctcttctgttgccaaatagaaaagggtcagggcatggagaaaggtgaccctgatcccaaacctgccctcccaagtctctggtgttggggagggcccgtgtgtttgtgtaactgtgtgtgcatgttggtctttgtgtgcatatctgttttccaggtctatgtgagtccttgtgctcctgctcctcagctctccaccccaggttgcctctctcctgtgggcctctgtcttctgggaataaagcagggtttcctacttcaggggatgtagagagatgcccaggttgcacaggagtgggatggggtgtggtagcaaaaggagggagaggagtcctttttgtgccaaatccctaagtgccgttcgggggccatgtgtgcagcatgactctccctgtctgtggcagggacccaagcgcttgcttaagccccagtgctccatgccagcacttgaactgtctggggtttgatggacagaggctgaggaatttcctggcttccccagatagtgtcctgggacatggtatgctttggggctggggtagcatggaatccctctgaggacctggatactggtactacggggtggggaagaggaaccttaaacttggctttccccagccttcagcctgagtctagcatgtttctagctccccagtcccttgtgaagccttgagggctggcagaagggttaggaggttgaactctagattcccttcctgtctttgccttccttttacccctttccctgcaacctccttgactctggcctgaatttgttggtgcctcagtttctctgtctgtacctatttaagccaaaggcactagcctgaattttgcttgaagatcactttgtcttggaaatgactagagaggcagaggagaagggtttccagagttgctaggtttgggagtggaaggggcaggcagtgcacttgcccctcctcatgccccttctgacaccagctccctgtggaggcctggtttctgggtaatgcctcccttgggcatcttcatgcatcaaccaaatgggccatcaggtacttcattagtcatggcagaaggaggggaaaagacttgttttccagacagaaaatctactcccctgtccccagccatatccctggataggaagggataggaagagactacttggtgccatggggtaggggtgagggtataagtagatcagagtgggaagacctcagccttgggtggcttgtctctgcttcttgccaggtgggagggcctgtccacaccctggatccccgtaccacagtgccagccatgcccttcccctgggctaccattgtccctttcctcacccagttggtagaggagtcaggaggtgggaggccgtgggctttggttttataatgtaaccactgtgggggtgggggaggatggtgaaccatgtatttcagtgaaatatttaatatatttaaatatcaataaaatcaaactctttgt

SEQ ID NO: 1249 - DNA, 6130 bp, Homo sapiens
  source 1..6130: mol_type = unassigned DNA
agctgaggaactgcgtgtggagtcagcccagtctggatgcacaggaggatgctggcggcacagtgagtgaggcctggtgccagagctgtgcggaccccttgttggccatggagcagcaggcccagaggccctctccccagccctgcttgcctgcctcggagaggacagaggcctaggcccacgggggagggtgttggcagacagatgccctccaggccctggggcctccttaacggccccttaacgacacgcgtgccaagggtggaggatgccagccaaggggcgctacttcctcaacgagggcgaggagggccctgaccaagatgcgctctacgagaagtaccagctcaccagccagcatgggccgctgctgctcacgctcctgctggtggccgccactgcctgcgtggccctcatcatcattgccttcagccagggggacccctccagacaccaggccattctgggcatggcgttcctggtgctggcggtgtttgcggccctctctgtgctgatgtacgtcgagtgtctcctgcggcgctggctcagggccttggcgctgctcacctgggcctgcttggtggcgctgggctatgtgctggtgttcgacgcatggacaaaggcggcctgtgcgtgggagcaggtgcccttcttcctgttcattgtcttcgtggtgtacacactactgcccttcagcatgcggggcgctgtcgccgttggggccgtctccactgcctcccacctcctggtgctcggttctttgatgggaggcttcacgacacccagtgtccgggtggggctgcagctgctggccaacgcagtcatcttcctgtgtgggaacctgacaggcgccttccacaagcaccaaatgcaggatgcatcccgggacctcttcacctacactgtgaagtgcatccagatccgccggaagctgcgcatcgagaagcgccagcaggagaacctgctgctgtcagtgcttccggcccacatctccatgggcatgaagctggccatcatcgaacggctcaaggagcatggtgaccgtcgctgcatgcctgacaacaacttccacagcctctacgtcaagaggcaccagaatgtcagcatcctctatgcggacatcgtgggcttcacgcagctggccagcgactgttctcccaaggagctggtggtggtgctgaatgagctctttggcaagttcgaccagatcgccaaggccaacgagtgcatgcgaatcaagatcctcggcgactgctactactgtgtatcgggcctgcccgtgtcgctgcctacccacgcccggaactgcgtgaagatggggctggacatgtgccaggccatcaagcaggtgcgggaggccacgggcgtggacatcaacatgcgtgtgggcatacactcggggaatgtgctgtgcggggtcatcgggctgcgcaagtggcagtatgacgtgtggtcccacgacgtgtccctggccaaccggatggaggcagccggagtacccggccgggtgcacatcacggaggccacgctaaagcacctggacaaggcgtacgaggtggaggatgggcacgggcagcagcgggacccctacctcaaggagatgaacatccgcacctacctggtcatcgacccccggagccagcagccacccccgcccagccaacacctccccaggcccaagggggacgcggccctgaagatgcgggcgtcagtgcgcatgacccggtacctcgagtcctggggggcggcacggccctttgcacatctcaaccaccgtgagagcgtgagcagtggtgagacccacgtccccaacgggcggaggcctaagagcgttccccagcgccaccgccggaccccagacagaagcatgtcccccaaggggcggtcggaggatgactcgtacgatgacgagatgctgtcagccattgaggggctcagctccacgaggccctgctgctccaagtccgatgacttctacacctttgggtccatcttcctggagaagggctttgagcgcgagtaccgcctggcacccatcccccgggcccgccacgactttgcctgcgccagcctgatcttcgtctgcatcctgctcgtccatgtcctgctcatgcccaggacggcggcactgggtgtgtccttcgggctggtggcctgtgtactggggctggtgctgggcctgtgctttgccaccaagttctcgaggtgctgcccagctcgggggacgctctgcactatctctgagagggtggagacacagcccctgctgaggctgaccctggccgtcctgaccatcggcagcctgctcactgtggccatcatcaacctgcccctgatgcctttccaagttccagagctgcctgttggcaatgagacaggcctactggccgcgagcagcaagacaagagccctgtgtgagcccctcccgtactacacctgcagctgtgtcctgggcttcatcgcctgctcggtcttcctgaggatgagcctggagccaaaggttgtgctgctgacagtggccctggtggcctacctggtgctcttcaacctctccccatgctggcagtgggactgctgcggccaaggcctgggcaacctcaccaagcccaacggcaccaccagtggcacccctagctgttcctggaaggacctgaagaccatgaccaatttctacctggtcctgttctacatcaccctgcttacactctccagacagattgactattactgccgcttggactgcctatggaagaagaagttcaagaaggagcacgaggagtttgagaccatggagaacgtgaaccgccttcttctggagaacgtcctgccagcccacgtggctgcccactttatcggtgacaagttaaacgaggactggtaccatcagtcctatgactgcgtctgtgtcatgtttgcctccgtgccggacttcaaagtgttctacacagagtgcgatgtcaacaaagaagggctggagtgcctacgcctgctcaatgagatcattgccgacttcgacgagctcctactgaagcccaagttcagcggcgtggagaagatcaagaccatcggcagcacgtacatggcagctgcagggctcagcgtcgcctcagggcacgagaaccaggagctggagcggcagcatgcccacattggtgtcatggtggagttcagcatcgccctgatgagtaagctggacggcatcaacaggcactccttcaactccttccgcctccgcgtcggcataaaccatgggcctgtgattgctggagtgattggggcccgaaaacctcagtatgacatctggggaaacactgtcaatgtggccagccgaatggaaagcactggagaacttgggaaaatccaggttaccgaggagacctgcaccatcctccagggcctcgggtactcttgtgaatgccgtggcctgatcaacgtcaaaggcaaaggcgagctgaggacttactttgtctgtacggacactgccaagtttcaggggctggggctgaactgagggctcctgctggattccgaaaaggccgggaagccagtctccttccctgaagcaagcccaggagaagactctccgccccacgccaatcccaaaggcatgcagatggctgtgcatgttggcttctttggacctgcactggaggatttctcagacacatgcaccagattctggctcgaagcagccactgagccataatgcgcaggggaggccagaagctctgtgcctggtctgtaacagtttccaggccagctggagaatgttcactggttcggggctgactttgagatctttgttccctgaggtgccaggcaggcaactttagcacatgatgaaaacagacttccacctcagtggcctgtgggcacgcacaagtgaggtctgtttttctagacaccaagggggagtaagctgagctgtctagcacggattggagactccctctccctggtgggcctggcaatgacagcatttctcacagaggcattctggtaaatgaagctgaaaggggtgttttacatctgtaaacggtttcaaacaggtagagagaaaaacaccacaattaacactgttactttttgccttgtctggcatgtttgttttaaatgaatacattaatggggtttttatccttttgaatgacttttcagacactagacataaatctcttccctccagtgtatgctctgcctttttaaccactgacatgtaaggaggactactgtctagcatcagcttatggggtcagctggctgtggggatagagtcctgaggaatgtggtcacagcaagaaggcggggagcagcagagccttgcctttgaatgaggcagcttgtgaggcaagcattctggagagaggtgctttgaaagtaaggtgcggcctttcacctcttccttgattactcacacatctttgcgttctcccctgccgtccttcaactgtatcttacttttcttaccagaaaggaatggagtctgtttagagacaacttggacaacctgtgagtgcatctcttctttcctttagtcttcacagctaactctggagagcttcaaaactagaaggatctactccgcatgggtgcatgcagaggctcctggatctgggaagcccgccccctcacaaatgctgagccgttcttgctctgaaactgcgtgagtcaaggcaaatgcaaaaagccaggttttggggatgtgtcttactgtgcttcaacttcccaaggaattgaaagtcaacctaactgtaacaacagggtgagaaatgaccaaactgcccgtgactttttctgaatggacttcataaccggaagacttaaccggtggcctcatcaccagagcatcgccaggatttctaatgcactcagtttccctacatagcagggattcttagctaggtgtccccatgaaccccgtaaagttctacacaaagtcttgcatacaggagcctttacaagatgattatacagggttgcagattgggtgactgaccagacttgttggggtcctgggatgagttgccccgggctgcaaattaagagtacagctaagtgcgggggtggcggtggagggaacgaaaattgaacctgtctgcctgtgctgtgtcgtgtggctttatcagcccgaggaagggcaggtgtattctaatttgcacaaaggtgctgggtagactagtggcagctctcatgtgctgcacataagtggaatcagtatgaatagaagaacttgctgtataaaggaatttcatggcaacaatgctggtaagggcaattagcctcgcttaagttgccttttttacacaccaaaactttttacatgaagggctggtttcacatgaatactatactgaaatctgtgctctcaagatctagcagtgaccagggctgcccggcgggggctctcctggcaagtcaggaaggtttctgttgctaatataacatagaaacacattagtgcactgggcctctctgaggtcagcatatttgtactcttggaatatttgtttttttcttcagtaacaacagaaaccccagttgggagtttaacaaataactgactaccactcactcatgcatttttatttccaattaaagcaaagcactgtgctgtgctcagataataatagtttgtaagtaaaagtttttagttttcagtgttcaggttatagaatataactgaccataaaaattacctgcaggtattttctttttatgaacttgtttttaaattaccaagtaattactggtgtcattttgttttatgacagacacacgtatctaacaaacaaacaaacagtgaccttctccatgggtcaaggacttccttacaatttctcctgagttaacttttgtgaaaataatacctaaggttttctggcttattgaggaaatttcctaacaaacaaacaaacaaacaaacagaagagaagatcattaaccactgtatactttgtgtatataataggtcagtgtaaagaaatatgatttgaggtggtgcatgcaagtaactagggtttattctatataatgaatatttatagatctgtaacatttgtttcaaaatgctgtttcatttttataaagtaccagtgtttagctgctttttatacattaaattagcaatttg

SEQ ID NO: 1250 - DNA, 6162 bp, Homo sapiens
  source 1..6162: mol_type = unassigned DNA
gtggaaggagccttcggatggagctgaggaactgcgtgtggagtcagcccagtctggatgcacaggaggatgctggcggcacagtgagtgaggcctggtgccagagctgtgcggaccccttgttggccatggagcagcaggcccagaggccctctccccagccctgcttgcctgcctcggagaggacagaggcctaggcccacgggggagggtgttggcagacagatgccctccaggccctggggcctccttaacggccccttaacgacacgcgtgccaagggtggaggatgccagccaaggggcgctacttcctcaacgagggcgaggagggccctgaccaagatgcgctctacgagaagtaccagctcaccagccagcatgggccgctgctgctcacgctcctgctggtggccgccactgcctgcgtggccctcatcatcattgccttcagccagggggacccctccagacaccaggccattctgggcatggcgttcctggtgctggcggtgtttgcggccctctctgtgctgatgtacgtcgagtgtctcctgcggcgctggctcagggccttggcgctgctcacctgggcctgcttggtggcgctgggctatgtgctggtgttcgacgcatggacaaaggcggcctgtgcgtgggagcaggtgcccttcttcctgttcattgtcttcgtggtgtacacactactgcccttcagcatgcggggcgctgtcgccgttggggccgtctccactgcctcccacctcctggtgctcggttctttgatgggaggcttcacgacacccagtgtccgggtggggctgcagctgctggccaacgcagtcatcttcctgtgtgggaacctgacaggcgccttccacaagcaccaaatgcaggatgcatcccgggacctcttcacctacactgtgaagtgcatccagatccgccggaagctgcgcatcgagaagcgccagcaggagaacctgctgctgtcagtgcttccggcccacatctccatgggcatgaagctggccatcatcgaacggctcaaggagcatggtgaccgtcgctgcatgcctgacaacaacttccacagcctctacgtcaagaggcaccagaatgtcagcatcctctatgcggacatcgtgggcttcacgcagctggccagcgactgttctcccaaggagctggtggtggtgctgaatgagctctttggcaagttcgaccagatcgccaaggccaacgagtgcatgcgaatcaagatcctcggcgactgctactactgtgtatcgggcctgcccgtgtcgctgcctacccacgcccggaactgcgtgaagatggggctggacatgtgccaggccatcaagcaggtgcgggaggccacgggcgtggacatcaacatgcgtgtgggcatacactcggggaatgtgctgtgcggggtcatcgggctgcgcaagtggcagtatgacgtgtggtcccacgacgtgtccctggccaaccggatggaggcagccggagtacccggccgggtgcacatcacggaggccacgctaaagcacctggacaaggcgtacgaggtggaggatgggcacgggcagcagcgggacccctacctcaaggagatgaacatccgcacctacctggtcatcgacccccggagccagcagccacccccgcccagccaacacctccccaggcccaagggggacgcggccctgaagatgcgggcgtcagtgcgcatgacccggtacctcgagtcctggggggcggcacggccctttgcacatctcaaccaccgtgagagcgtgagcagtggtgagacccacgtccccaacgggcggaggcctaagagcgttccccagcgccaccgccggaccccagacagaagcatgtcccccaaggggcggtcggaggatgactcgtacgatgacgagatgctgtcagccattgaggggctcagctccacgaggccctgctgctccaagtccgatgacttctacacctttgggtccatcttcctggagaagggctttgagcgcgagtaccgcctggcacccatcccccgggcccgccacgactttgcctgcgccagcctgatcttcgtctgcatcctgctcgtccatgtcctgctcatgcccaggacggcggcactgggtgtgtccttcgggctggtggcctgtgtactggggctggtgctgggcctgtgctttgccaccaagttctcgaggtgctgcccagctcgggggacgctctgcactatctctgagagggtggagacacagcccctgctgaggctgaccctggccgtcctgaccatcggcagcctgctcactgtggccatcatcaacctgcccctgatgcctttccaagttccagagctgcctgttggcaatgagacaggcctactggccgcgagcagcaagacaagagccctgtgtgagcccctcccgtactacacctgcagctgtgtcctgggcttcatcgcctgctcggtcttcctgaggatgagcctggagccaaaggttgtgctgctgacagtggccctggtggcctacctggtgctcttcaacctctccccatgctggcagtgggactgctgcggccaaggcctgggcaacctcaccaagcccaacggcaccaccagtggcacccctagctgttcctggaaggacctgaagaccatgaccaatttctacctggtcctgttctacatcaccctgcttacactctccagacagattgactattactgccgcttggactgcctatggaagaagaagttcaagaaggagcacgaggagtttgagaccatggagaacgtgaaccgccttcttctggagaacgtcctgccagcccacgtggctgcccactttatcggtgacaagttaaacgaggactggtaccatcagtcctatgactgcgtctgtgtcatgtttgcctccgtgccggacttcaaagtgttctacacagagtgcgatgtcaacaaagaagggctggagtgcctacgcctgctcaatgagatcattgccgacttcgacgagctcctactgaagcccaagttcagcggcgtggagaagatcaagaccatcggcagcacgtacatggcagctgcagggctcagcgtcgcctcagggcacgagaaccaggagctggagcggcagcatgcccacattggtgtcatggtggagttcagcatcgccctgatgagtaagctggacggcatcaacaggcactccttcaactccttccgcctccgcgtcggcataaaccatgggcctgtgattgctggagtgattggggcccgaaaacctcagtatgacatctggggaaacactgtcaatgtggccagccgaatggaaagcactggagaacttgggaaaatccaggttaccgaggagacctgcaccatcctccagggcctcgggtactcttgtgaatgccgtggcctgatcaacgtcaaaggcaaaggcgagctgaggacttactttgtctgtacggacactgccaagtttcaggggctggggctgaactgagggctcctgctggattccgaaaaggccgggaagccagtctccttccctgaagcaagcccaggagaagactctccgccccacgccaatcccaaaggcatgcagatggctgtgcatgttggcttctttggacctgcactggaggatttctcagacacatgcaccagattctggctcgaagcagccactgagccataatgcgcaggggaggccagaagctctgtgcctggtctgtaacagtttccaggccagctggagaatgttcactggttcggggctgactttgagatctttgttccctgaggtgccaggcaggcaactttagcacatgatgaaaacagacttccacctcagtggcctgtgggcacgcacaagtgaggtctgtttttctagacaccaagggggagtaagctgagctgtctagcacggattggagactccctctccctggtgggcctggcaatgacagcatttctcacagaggcattctggtaaatgaagctgaaaggggtgttttacatctgtaaacggtttcaaacaggtagagagaaaaacaccacaattaacactgttactttttgccttgtctggcatgtttgttttaaatgaatacattaatggggtttttatccttttgaatgacttttcagacactagacataaatctcttccctccagtgtatgctctgcctttttaaccactgacatgtaaggaggactactgtctagcatcagcttatggggtcagctggctgtggggatagagtcctgaggaatgtggtcacagcaagaaggcggggagcagcagagccttgcctttgaatgaggcagcttgtgaggcaagcattctggagagaggtgctttgaaagtaaggtgcggcctttcacctcttccttgattactcacacatctttgcgttctcccctgccgtccttcaactgtatcttacttttcttaccagaaaggaatggagtctgtttagagacaacttggacaacctgtgagtgcatctcttctttcctttagtcttcacagctaactctggagagcttcaaaactagaaggatctactccgcatgggtgcatgcagaggctcctggatctgggaagcccgccccctcacaaatgctgagccgttcttgctctgaaactgcgtgagtcaaggcaaatgcaaaaagccaggttttggggatgtgtcttactgtgcttcaacttcccaaggaattgaaagtcaacctaactgtaacaacagggtgagaaatgaccaaactgcccgtgactttttctgaatggacttcataaccggaagacttaaccggtggcctcatcaccagagcatcgccaggatttctaatgcactcagtttccctacatagcagggattcttagctaggtgtccccatgaaccccgtaaagttctacacaaagtcttgcatacaggagcctttacaagatgattatacagggttgcagattgggtgactgaccagacttgttggggtcctgggatgagttgccccgggctgcaaattaagagtacagctaagtgcgggggtggcggtggagggaacgaaaattgaacctgtctgcctgtgctgtgtcgtgtggctttatcagcccgaggaagggcaggtgtattctaatttgcacaaaggtgctgggtagactagtggcagctctcatgtgctgcacataagtggaatcagtatgaatagaagaacttgctgtataaaggaatttcatggcaacaatgctggtaagggcaattagcctcgcttaagttgccttttttacacaccaaaactttttacatgaagggctggtttcacatgaatactatactgaaatctgtgctctcaagatctagcagtgaccagggctgcccggcgggggctctcctggcaagtcaggaaggtttctgttgctaatataacatagaaacacattagtgcactgggcctctctgaggtcagcatatttgtactcttggaatatttgtttttttcttcagtaacaacagaaaccccagttgggagtttaacaaataactgactaccactcactcatgcatttttatttccaattaaagcaaagcactgtgctgtgctcagataataatagtttgtaagtaaaagtttttagttttcagtgttcaggttatagaatataactgaccataaaaattacctgcaggtattttctttttatgaacttgtttttaaattaccaagtaattactggtgtcattttgttttatgacagacacacgtatctaacaaacaaacaaacagtgaccttctccatgggtcaaggacttccttacaatttctcctgagttaacttttgtgaaaataatacctaaggttttctggcttattgaggaaatttcctaacaaacaaacaaacaaacaaacagaagagaagatcattaaccactgtatactttgtgtatataataggtcagtgtaaagaaatatgatttgaggtggtgcatgcaagtaactagggtttattctatataatgaatatttatagatctgtaacatttgtttcaaaatgctgtttcatttttataaagtaccagtgtttagctgctttttatacattaaattagcaatttgaaaaactcaaa

SEQ ID NO: 1251 - DNA, 2090 bp, Homo sapiens
  source 1..2090: mol_type = unassigned DNA
gagctgaggaactgcgtgtggagtcagcccagtctggatgcacaggaggatgctggcggcacagtgagtgaggcctggtgccagagctgtgcggaccccttgttggccatggagcagcaggcccagaggccctctccccagccctgcttgcctgcctcggagaggacagaggcctaggcccacgggggagggtgttggcagacagatgccctccaggccctggggcctccttaacggccccttaacgacacgcgtgccaagggtggaggatgccagccaaggggcgctacttcctcaacgagggcgaggagggccctgaccaagatgcgctctacgagaagtaccagctcaccagccagcatgggccgctgctgctcacgctcctgctggtggccgccactgcctgcgtggccctcatcatcattgccttcagccagggggacccctccagacaccaggccattctgggcatggcgttcctggtgctggcggtgtttgcggccctctctgtgctgatgtacgtcgagtgtctcctgcggcgctggctcagggccttggcgctgctcacctgggcctgcttggtggcgctgggctatgtgctggtgttcgacgcatggacaaaggcggcctgtgcgtgggagcaggtgcccttcttcctgttcattgtcttcgtggtgtacacactactgcccttcagcatgcggggcgctgtcgccgttggggccgtctccactgcctcccacctcctggtgctcggttctttgatgggaggcttcacgacacccagtgtccgggtggggctgcagctgctggccaacgcagtcatcttcctgtgtgggaacctgacaggcgccttccacaagcaccaaatgcaggatgcatcccgggacctcttcacctacactgtgaagtgcatccagatccgccggaagctgcgcatcgagaagcgccagcaggagaacctgctgctgtcagtgcttccggcccacatctccatgggcatgaagctggccatcatcgaacggctcaaggagcatggtgaccgtcgctgcatgcctgacaacaacttccacagcctctacgtcaagaggcaccagaatgtcagcatcctctatgcggacatcgtgggcttcacgcagctggccagcgactgttctcccaaggagctggtggtggtgctgaatgagctctttggcaagttcgaccagatcgccaaggccaacgagtgcatgcgaatcaagatcctcggcgactgctactactgtgtatcgggcctgcccgtgtcgctgcctacccacgcccggaactgcgtgaagatggggctggacatgtgccaggccatcaagcaggtgcgggaggccacgggcgtggacatcaacatgcgtgtgggcatacactcggggaatgtgctgtgcggggtcatcgggctgcgcaagtggcagtatgacgtgtggtcccacgacgtgtccctggccaaccggatggaggcagccggagtacccggccgggtgcacatcacggaggccacgctaaagcacctggacaaggccctgctgctccaagtccgatgacttctacacctttgggtccatcttcctggagaagggctttgagcgcgagtaccgcctggcacccatcccccgggcccgccacgactttgcctgcgccagcctgatcttcgtctgcatcctgctcgtccatgtcctgctcatgcccaggacggcggcactgggtgtgtccttcgggctggtggcctgtgtactggggctggtgctgggcctgtgctttgccaccaagttctcgaggtgctgcccagctcgggggacgctctgcactatctctgagagggtggagacacagcccctgctgaggctgaccctggccgtcctgaccatcggcagcctgctcactgtggccatcatcaacctgcccctgatgcctttccaagttccagagctgcctgttggcaatgagacaggcctactggccgcgagcagcaagacaagagccctgtgtgagcccctcccgcacctgcatactgttttttcccgtttaaatgagctcacttcataagaaataaaactacagtg

SEQ ID NO: 1252 - DNA, 2496 bp, Homo sapiens
  source 1..2496: mol_type = unassigned DNA
actctcattaggtagcgtggaaggagccttcggatggagctgaggaactgcgtgtggagtcagcccagtctggatgcacaggaggatgctggcggcacagtgagtgaggcctggtgccagagctgtgcggaccccttgttggccatggagcagcaggcccagaggccctctccccagccctgcttgcctgcctcggagaggacagaggcctaggccctggggcctccttaacggccccttaacgacacgcgtgccaagggtggaggatgccagccaaggggcgctacttcctcaacgagggcgaggagggccctgaccaagatgcgctctacgagaagtaccagctcaccagccagcatgggccgctgctgctcacgctcctgctggtggccgccactgcctgcgtggccctcatcatcattgccttcagccagggggacccctccagacaccaggccattctgggcatggcgttcctggtgctggcggtgtttgcggccctctctgtgctgatgtacgtcgagtgtctcctgcggcgctggctcagggccttggcgctgctcacctgggcctgcttggtggcgctgggctatgtgctggtgttcgacgcatggacaaaggcggcctgtgcgtgggagcaggtgcccttcttcctgttcattgtcttcgtggtgtacacactactgcccttcagcatgcggggcgctgtcgccgttggggccgtctccactgcctcccacctcctggtgctcggttctttgatgggaggcttcacgacacccagtgtccgggtggggctgcagctgctggccaacgcagtcatcttcctgtgtgggaacctgacaggcgccttccacaagcaccaaatgcaggatgcatcccgggacctcttcacctacactgtgaagtgcatccagatccgccggaagctgcgcatcgagaagcgccagcaggagaacctgctgctgtcagtgcttccggcccacatctccatgggcatgaagctggccatcatcgaacggctcaaggagcatggtgaccgtcgctgcatgcctgacaacaacttccacagcctctacgtcaagaggcaccagaatgtcagcatcctctatgcggacatcgtgggcttcacgcagctggccagcgactgttctcccaaggagctggtggtggtgctgaatgagctctttggcaagttcgaccagatcgccaaggccaacgagtgcatgcgaatcaagatcctcggcgactgctactactgtgtatcgggcctgcccgtgtcgctgcctacccacgcccggaactgcgtgaagatggggctggacatgtgccaggccatcaagcaggtgcgggaggccacgggcgtggacatcaacatgcgtgtgggcatacactcggggaatgtgctgtgcggggtcatcgggctgcgcaagtggcagtatgacgtgtggtcccacgacgtgtccctggccaaccggatggaggcagccggagtacccggccgggtgcacatcacggaggccacgctaaagcacctggacaaggcgtacgaggtggaggatgggcacgggcagcagcgggacccctacctcaaggagatgaacatccgcacctacctggtcatcgacccccggagccagcagccacccccgcccagccaacacctccccaggcccaagggggacgcggccctgaagatgcgggcgtcagtgcgcatgacccggtacctcgagtcctggggggcggcacggccctttgcacatctcaaccaccgtgagagcgtgagcagtggtgagacccacgtccccaacgggcggaggcctaagagcgttccccagcgccaccgccggaccccagacagaagcatgtcccccaaggggcggtcggaggatgactcgtacgatgacgagatgctgtcagccattgaggggctcagctccacgaggccctgctgctccaagtccgatgacttctacacctttgggtccatcttcctggagaagggctttgagcgcgagtaccgcctggcacccatcccccgggcccgccacgactttgcctgcgccagcctgatcttcgtctgcatcctgctcgtccatgtcctgctcatgcccaggacggcggcactgggtgtgtccttcgggctggtggcctgtgtactggggctggtgctgggcctgtgctttgccaccaagttctcgaggtgctgcccagctcgggggacgctctgcactatctctgagagggtggagacacagcccctgctgaggctgaccctggccgtcctgaccatcggcagcctgctcactgtggccatcatcaacctgcccctgatgcctttccaagttccagagctgcctgttggcaatgagacaggcctactggccgcgagcagcaagacaagagccctgtgtgagcccctcccgcacctgcatactgttttttcccgtttaaatgagctcacttcataagaaataaaactacagtgaaaacaac

SEQ ID NO: 1253 - DNA, 5938 bp, Homo sapiens
  source 1..5938: mol_type = unassigned DNA
actggctgcagccgcagtcttggtggaggaggtggtgaccaccaccgctcctccacctgcatccggctgcgggactgcggcggccgcgtttgccctgcagaccctgcaccccgggacgcggctcatctgtcattagcaccggcactaagctcccaccgctcagcgacttggtccgccgcaagctccgccgcaggctttgtccgctagcgctcggctgagtctgggcgggcgggaaacctgggctagggcgaggcggggcccctggacatgcctttctccacgtccgcctcctcgaccctattgtaagcggagaaacttagtgtgcgaggcaggcaggggacgtccccattttgatgtcccgtaccctccacccccttcggatcgaggtagtaaagaggctcctgtaggaaactgactgcctctatgattgcggcctcttgggggattttgcgtttagcccgaaagttggctttgccaaaagacgcacgggtaggaagggcgaaaaggaaaccctgtattccgtcgcgctgggctctccgagtccgtgcgcaaagcggcctacgagtcctggctccgcacctgcagaggacaagagccaatgcctaaaaaagaacagcggaggaaccggctggcgcggccagctggaacgctggatcgcagtgcgcccagggaaggccgggggcgcccgccggccctagccctcagtggtcctctcccacgccggcccgcgcgtgcctctgcctacaagacctggggcgtcctggccagatctggatggcaggtccctccgccacccccggcccggttccgggggcgtggcttggcgcgggggcgggtttaagtcaccgcgggtgtctgaccactctgacaggtctccaaatttctcccagtcgcctggcgcccgcggtgcgtttcagagctccagggtggcacgcggcggcgcttccctagatccagaggcgtctctgtcgacttccacgcggcctcgggcctcccttctcctccaaaccttcgcctcatccgccaagcttcggttctcagcctcagatatccgcaccggcggcttctcttcgttctcggagctcttggctttggagccctcaccactttttccttcccccgcctctcctgatcctcctagctccgagccaaatggactccaaagaacgaaataaaggggatgagaactgtgtgctgcgacccttcgaaagcacagctgaaagcgttgacctcgtcttatagctcaggctgggaccctggagcgagagtccccacaccccctccgggagggatgcttctggccagagccagcgctgcgctgtcagtccttgctcccgaactaggaaagagcctaggagggagcctcagcataccccttcctccaaattaactatttggtgaattgttagcgccgaggctaccacctctccaaccctgtcgcggggcgccccgccacctcaccgtgaccccctcctcctccttctttgcccccgcccccagctccgcccctgctccccatcccggcgcaatggagttctccgaagggcgatgattccagccacatctgctaacttcgcacccatcgctgccgccggtcaccgccggccaggccccctgcagccgcggagcagtgggcgtccaaagcccagtgcagcagccaggacccgcccgacgcgcagcagaagcacggcgcccaggcgcttaggcgtctcttggagagcaaaggctgcgccaaaacgctgagcctagaatcaaccaaggagcctgagcccaggaaggggctgcgtggctcacagcgctgcggctcctgaggacaaatagccactgccgctgcgtacccaagctgcgccggctggcgggagagcagcacgcaaggacgccgaggtccgccgcgatcttccaggtgccctttgcccctgggcacagtatgacccgacctacagggagccctagcgcagggctcctgcaacggggcagcctaggataaaaaggatccttgccaagctcctaccaggccgcctttgagtctttaggaacccctcctccggctgcctccccaaggttctgggcctccttccctgcggcccagagccatggagctctccgatgtgcgctgccttacaggcagcgaggaactctacaccatccacccgacgcccccggccggcgacggcaggagcgcctcccggccgcagcggctgctgtggcagacggcggtgcgacacatcacggagcagcgcttcattcacgggcaccggggaggcagcggcagcgggagtggaggctcgggcaaagcctcggaccctgcgggcggcggccccaaccaccacgcgccgcagctgtcaggcgactcggcgctgcccctctactcgctgggcccgggagagcgagcgcacagcacctgcggcaccaaagtcttcccggaacgcagcgggagcggcagtgccagcggcagcggaggcgggggcgacctgggcttcctgcaccttgactgtgcccctagcaactcggatttctttcttaatgggggctatagctaccgaggggtcattttccccaccctgcgcaactccttcaaatctcgggatttggaacgcctctaccagcgctatttcttgggccaaaggcgcaaatcggaagtggtgatgaacgtgctggacgtgctgaccaaactcactctcttggtcctacacttgagcctggcctcggcccccatggacccgctcaagggcatcctgctgggcttcttcaccggcattgaggtagtgatctgcgccctggtggtggtcaggaaggacaccacctcccacacgtacctgcagtacagcggcgtggtcacctgggtggccatgaccacccagatcctggcagcaggcctcggctacgggctcctgggcgacggcataggctacgtgctcttcacgctcttcgccacctacagtatgctgccgctgccgctcacctgggccatcctggccggcctgggcacctcgctgctgcaggtcatcctccaagtggtcataccccggctggcggtcatttccatcaaccaggttgtggcccaggcagtgctattcatgtgtatgaacacagctggaatcttcatcagttacctgtcagaccgggcccagcgccaagctttcctggagactcggaggtgtgtggaggccaggctgcgcctggagacagagaaccaaagacaggagcggctcgtgctttctgtgctcccccggtttgttgtcctggaaatgatcaacgacatgaccaatgtggaagatgagcacctgcagcaccagttccatcggatctacatccatcgctatgagaacgtcagtattctttttgcagatgttaaaggatttaccaacctctccacgaccttgtctgctcaggagctggtcaggatgctcaacgagctctttgccagatttgatcgactggcccatgagcatcactgccttcgtattaaaatcctgggggactgctactactgcgtgtctggacttcctgagccccgccaggaccatgcccactgctgtgttgaaatgggtctcagcatgatcaaaaccatcaggtatgtgcggtcaaggacaaaacacgatgttgacatgaggattggaatccactccggctcggtgctgtgcggtgttttgggactaaggaagtggcagtttgatgtctggtcttgggatgtggatattgcaaacaaactcgaatctggaggaatccctgggaggattcacatttccaaagccacgctggactgtctcaacggtgactataacgtggaagagggccatggtaaagagaggaatgaattcctgaggaagcataatatcgaaacttacttaattaagcagcctgaggacagtctgctgtccttgcctgaagatatcgtcaaggagtcagtgagctcctcagaccggagaaacagtggggccacattcactgaaggatcctggagccctgaactgccctttgataatatcgtggggaaacagaatactctggctgccctaacaagaaattcaataaatctgcttccaaaccatcttgcacaagctttgcatgtccagtctgggcctgaggaaattaacaagagaatagaacataccatcgacttgcggagtggcgataaattgagaagagagcatatcaagccattctcactgatgtttaaagactccagcctggagcacaagtattctcaaatgagggatgaagtgttcaagtcaaacttggtctgtgcatttatcgttcttctatttatcacggcaatacaaagtttgcttccttcttcaagagtgatgccaatgaccatccagttctccattctgattatgctgcactcggctctggtcctcatcaccacagcagaggattataaatgtttgcccctcatcctccggaaaacttgctgttggattaatgagacctatttggcccggaacgtcatcatctttgcatccattttgattaatttcctgggtgccatcttaaatatcctgtggtgtgattttgacaagtcgatacccttgaagaacctgactttcaattcctcagctgtgtttacagatatctgctcctacccagagtactttgtcttcacgggggtgttggccatggtgacctgtgcagttttcctccggctgaactccgtcctgaagctggcagtgctgctgatcatgattgccatctatgccctgctcactgagaccgtctacgcaggcctctttctgcgttatgacaacctcaaccacagtggagaagatttcctggggaccaaggaggtatcactgctactgatggccatgttcctcctggctgtgttctaccatggacagcagctggagtacacagcccgcctggacttcctttggcgagtacaggccaaagaggagatcaatgagatgaaggagctgagggaacacaatgagaacatgctccggaatatcttacccagccatgtggcccgccatttcctagagaaggaccgagacaatgaggagctgtattctcaatcctatgatgctgttggggtgatgtttgcctccatcccaggatttgcggacttttactctcagactgaaatgaataaccagggagtggaatgcctgcgcttgctcaatgagatcattgctgacttcgatgagttgcttggtgaagaccgatttcaagacattgaaaagattaagaccattggcagcacctacatggccgtgtcaggcctgtcacctgaaaaacagcaatgtgaagacaagtggggacatttgtgtgctctggctgacttctcactcgccctgacagaaagcatacaggagatcaacaagcattcattcaacaattttgaactccggattggcatcagccacggctcagtggtagctggcgttatcggcgctaagaaaccacagtatgacatttggggcaaaactgtgaacctggcaagccgaatggacagcacgggggttagtggccggatccaagtcccagaggagacctatctcatcctgaaggaccagggctttgcctttgattaccgaggggagatctatgtgaagggtatcagtgaacaggaaggaaaaatcaaaacgtactttcttctgggaagagtccaacccaacccattcatcttgcccccaagaagactgcctgggcagtactccctggccgcggttgtcctgggacttgtccagtccctcaataggcaaaggcagaagcagctactcaatgagaacaacaacacaggaatcatcaagggtcattacaaccggcggactttgttgtcacccagcggcacagagcctggagcccaggctgaaggcaccgacaaatctgatttgccataaaagcattttctttctgttttttttttttgtatttcttttatatataaaataaatatactaataaaaaggtttaattttttttagaacaa

SEQ ID NO: 1254 - DNA, 7720 bp, Homo sapiens
  source 1..7720: mol_type = unassigned DNA
gcggccgcggcgggagcggcggcgcactcggggggaagcaggccccactagacgggccgcgccgacgggctccgcgcactcgcagcccggggcgcccccacccccagcgcccgccgccgcgggcagggccggcccggagcgcggggggcggccggggagcgcgagccgggggcgcccgccgaagctcgctgctccgggtcggggtccgggcccggggccggccgcgcgccgcctttgacgcatcggagcgcggctcctgcaggatggagggctccgcgccgccagcggagttgtttgtgcgcaggcggctcgcggggctgggagcgctcaaggtctgaacttccctccggagccgcagctggaggaggcgagcgcgcgaggaggagaagccgcgcggcgcggaggccaccctcggggcgagaggcgcggaaggcgagcgagcaaagcggtcccggagccacggcggccacgcggcggggacccccgggcgttctaggtactggtgaccccggccggggcaggccccgggactcgacaacatggcttccccaccccaccagcagctgctgcatcaccacagcaccgaggtgagctgcgactccagcggggacagcaacagcgtgcgcgtcaagatcaaccccaagcagctgtcctccaacagccaccccaagcactgcaaatacagcatctcctctagctgcagcagctctggggactccgggggcgtcccccggcgagtgggcggcggaggccggctgcgcaggcagaagaagctgccccagctgttcgagagggcctccagccgctggtgggaccccaagttcgactcggtgaacctggaggaggcctgcctggagcgctgcttcccgcagacccagcgccggttccggtatgcgctcttctacatcggcttcgcctgccttctgtggagcatctattttgcggtccacatgagatccagactgatcgtcatggtcgcccccgcgctgtgcttcctcctggtgtgtgtgggcttctttctgtttaccttcaccaagctgtacgcccggcattacgcgtggacctcgctggctctcaccctgctggtgttcgccctgaccctggctgcgcagttccaggtcttgacgcctgtctcaggacgcggcgacagctccaaccttacggccacagcccggcccacagatacttgcttatctcaagtggggagcttctccatgtgcatcgaagtgctctttttgctctataccgtcatgcacttacctttgtacctgagtttgtgtctgggggtggcctactctgtccttttcgagacctttggctaccatttccgggatgaagcctgcttcccctcgcccggagccggggccctgcactgggagctgctgagcagggggctgctccacggctgcatccacgccatcggggtccacctgttcgtcatgtcccaggtgaggtccaggagcaccttcctcaaggtggggcaatccattatgcacgggaaggacctggaagtggaaaaagccctcaaagagaggatgattcattccgtgatgccaagaatcatagccgatgacttaatgaagcagggagatgaggagagtgagaattctgtcaagaggcatgccacctcgagccccaagaacaggaagaaaaagtcttccatccaaaaagctcctatagccttccgcccttttaagatgcagcagatcgaagaagtcagtattttatttgcagatatcgtgggcttcaccaagatgagtgccaacaagtctgcccacgccctggtgggtctcctgaacgatctgttcggtcgcttcgaccgcctgtgtgaggagaccaagtgtgagaaaatcagcaccctgggagactgttactactgcgtggcgggctgtcccgagccccgggccgaccatgcctactgctgcatcgagatgggcctgggcatgatcaaggccatcgagcagttctgccaggagaagaaggagatggtgaacatgagagtcggggtgcacacgggcaccgtcctttgcggcatcctgggcatgaggaggtttaaatttgacgtgtggtccaacgatgtgaacctggccaatctcatggagcagctgggagtggccggcaaagttcacatttctgaggccaccgcaaaatacttagatgaccggtacgaaatggaagatgggaaagttattgaacggctgggccagagcgtggttgctgaccagttgaaaggtttgaagacatacctgatatcgggtcagagagccaaggagtctcgctgcagctgtgcagaggccttgctttctggctttgaggtcattgacggctcacaggtgtcctcaggccctaggggacaggggacagcgtcatcagggaatgtcagtgacttggcgcagactgtcaaaacctttgataaccttaagacctgcccttcgtgcggaatcacatttgctcccaaatctgaagccggcgccgagggaggagcacctcaaaacggctgccaagacgagcataaaaacagcaccaaggcttctggaggacctaatcccaaaactcagaacgggctcctcagccctccccaagaggagaagctcaccaacagtcagacttctctgtgtgagatcttgcaggagaagggaaggtgggcaggggtgagcctggaccagtcggctctccttccgctgaggttcaagaacatccgggagaaaacggacgcccactttgtggacgttatcaaagaagacagcctgatgaaagattacttttttaagccgcccattaatcagttcagcctgaacttcctggatcaggagctggagcgatcctacaggaccagctatcaggaagaggtcataaagaactcccccgtgaagacgtttgctagtcccaccttcagctccctcctggatgtgtttctgtcgaccacagtgtttctgacgctgtccaccacctgcttcctgaagtacgaggcggccaccgtgcctcccccgcccgccgccctggcggtcttcagtgcagccctgctgctggaggtgctgtccctcgcggtgtccatcaggatggtgttcttcctggaggacgtcatggcctgcaccaagcgcctgctggagtggatcgccggctggctaccacgtcactgcatcggggccatcctggtgtcgcttcccgcactggccgtctactcccatgtcacctccgaatatgagaccaacatacacttcccagtgttcacaggctcggccgcgctgattgccgtcgtgcactactgtaacttctgccagctcagctcctggatgaggtcctccctcgccaccgtcgtgggggccgggccgctgctcctgctctacgtctccctgtgcccagacagttctgtattaacttcgccccttgacgcagtacagaatttcagttccgagaggaacccgtgcaatagttcggtgccgcgtgacctccggcggcccgccagcctcatcggccaggaggtggttctcgtcttctttctcctgctcttgttggtctggttcctgaatcgcgaatttgaagtcagctaccgcctccactaccacggagacgtggaagcggatcttcaccgcaccaagatccagagcatgcgggaccaggcagactggctgctgaggaacatcatcccctaccacgtggctgagcagctgaaggtgtcccagacctactccaagaaccatgacagcggaggggtgatcttcgccagcatcgtcaacttcagcgagttctacgaggagaactacgagggcggcaaggagtgctaccgggtcctcaacgagctcatcggggactttgacgagctcctaagcaagccggactacagcagcatcgagaagatcaagaccatcggagccacgtacatggcggcgtcagggctgaacaccgcgcaggcccaggacggcagccacccgcaggagcacctgcagatcctgttcgagttcgccaaggagatgatgcgcgtggtggacgacttcaacaacaacatgctgtggttcaacttcaagctccgcgtcggcttcaaccatgggcccctcacggccggggtcatcggcaccaccaagctgctgtacgacatctggggagacaccgtcaacatcgccagcaggatggacaccaccggcgtggagtgccgcatccaggtgagcgaagagagctaccgcgtcttgagcaagatgggctatgacttcgactacagagggaccgtgaatgtcaaggggaaaggccagatgaagacctacctgtacccaaagtgcacggatcacagggtcatcccacagcaccagctgtccatctccccagacatccgcgtccaggtggatggcagcatcggacggtctcccacagacgagattgccaacctggtgccttctgtccagtatgtggacaagacatctctgggttctgacagcagcacgcaggccaaggatgcccacctgtcccccaagagaccgtggaaggagcccgtcaaagccgaagaaaggggtcgatttggcaaagccatagagaaagacgactgtgacgaaacaggaatagaagaagccaacgaactcaccaagctcaacgtttcaaagagtgtgtgaggcggcgcccacccgctgcccgaggtgctctgtttgtcgaaacacagtaatatttgtatttggctgttgtgctttccaagcgccacagttgccctccccggacgtggtgttatgtggtcatttcagccctaacttctgtgtggatcacagttattcagggttcattttcatccattcttccctttcgctcccttccctggaaaccccgctgcctctgggtcatccgttcagcacgtggtggagaacaagtgccttcagggctggcctcggcctcgagtctcgggacagaggccgccagtggagatcatggctttgggtattatttgacttttagaacaaaagctgtggttaagatctcatttttattgctttttcccacgtcccacgagacactattttcggttctctggctaataccctgtttttgagtttattttgtttctgtctatgtcacagtgttcctctacgacccgacctctctatgtaagcacacatgcgcacacacacttgcattcatgaatctgatataaagtgccagtaatccgccaagagggggtgcgaagggggcatgtcacgacagctccgccaccccccattgcccacccgcactttcccgagcaccgcgccccgtgggctgtgggtgagccgcgctccctgcactgagcgggtttaggggctcgcccacatgcatgcaggccaagacagcaaatgccagccgggcacgacgcccgtgtgcccaggcctcgggggtctcagagccgcctctcacccccgaccctccacccaggggtctccccatcgggagtggaggtgttggtcctggaagctgactcatcggagagggaaataccaaataaacatccgaggttgcatttatttatttatttatttacccggaagcatgtgcgctcccgggaggggtgctgggtcctcagggtggggggtcatagccacaggggagggcagttcccaggaaggtaaccagatgtctcttttgtgttttggccacctggggccgcccccaacctccccaccccaagaggggtctgagtgggacctcaaagcatggccagtgcaattctgaggctaggggaataggagaagcccaccagctgcccctgccacccacgggggctcctccctgccggggtccagctcagaaccacgggggtctgtgccggcagcaccggtgccatcttggcttccacaaattccagaagtttcttggctgcctcccgctctcagatggcacagggcctatcagtggcaggatttaatctggggagcaaattccagctctgaaatggagttctcacaccgtatctagggacagaggcatctggatgcaaacgcggggtttgttaggggcggaatcccgagggtggtgtgggggagctccgtccgggcagttggctgctggtcctgtctgattatgttttgccatattgagtctgaagtttgtgtggaagtgagctcgcccgagttgtccggtcggagttgtagccagtctttcaggggaccccgggacgctgatgaggcccagggtgcactccttgtcagtcttgcccgttgtccctgtgcattttgctttccgctgtcaaatctcactgtctcgttttcacaccgcatcagtccccatcatcactactcctccccagagacatacagattgccctccccggcatgaagaagtcacaattctgacccgccacctctccaggggcggtgcctgggatggccacccatcaggacagccagagccagggtcccggcgtcctgagagtccagggcacctccccccattagctgtaaggtttcctgtcaggtgtgactgtcagtttgctggtcttccaataccgaagaaagggtggttgtgacaatacctcttgcttctaaagaatgtattataaaacaccgcagatttttttttttccttaaaaaacactacctgatgctttccttgttcgtggggattgtggtcacatgaagctctttctgcatcagtattaaggtgtatatttgaatgtcctcccctcccctttcccctccaggctgtgtagctttgaggggctgggcgtttgctcacgaccttgctgtctcgctcagaacatgctccgcaaagttctccgcacacacttcttccccatcaagcccatttccttccccaaccacaaaggtgtttgtgattcctcaccccgggaaaccaaggagctgcaaagtggagtctggttcagccccgtgcagactcacccagagcttaacgttgtctttcaaacaccctgagccttcctaaacagccagtgcagacgttctctctgggccacgaagcccctcgggtcctccccgtcccctgctccgatgcatacctcagtgcagaaccacagaatctctgcagcggaaacgccgtgcatctcttgtctgttggcagcgagcacatcgtgctggagacacgagtttctaagcagctggcacgagggctgctgacggcatgggtcgtgcttcagggtggcaatacctcttaggaacttagggcaggaagcaatacttcagcattgaatgtgtgtaaatagttgctttgagttgcaattgctattttcttctcagtcccagctcagatcgaattatatatccatatatatatatatatatatatatatatatatatatatatatatatggtaaacaagcacacacaattttatccaatgcaaacaaatgtagagcatcagttacaaaaccctcgaatagcttgagagccccacaggctctgccacacccgtgacttcatccacactgacgtcacccgcgggggctccccctgcacatttgcacacgatccggagagccgaaggccgcgtgcttcctgtcacatgggctgtaatcatttgtagtttccaaagacacgtctgcatttgaatttctagattttcgaggtaaggagttttttttaattggttgtttggaaaatcacatcatgcctagaatctgaaattgaattagcaagaaccgactgtttgcattttccatatatccttttatctgctctttttaaattgttaattctaataatttcaaaatgcattcactgaagaaatggacattaaaatattctaaaattt

SEQ ID NO: 1255 - DNA, 531 bp, Homo sapiens
  source 1..531: mol_type = unassigned DNA
atgaccatgtgtagcggagcgaggctggccctgctggtctatgggataatcatgcacagcagcgtctacagctcacctgccgccgccggactccggttccccgggatcaggccagaggaagaggcgtacggcgaggacggaaacccgctgccagacttcgatggctcggagccgccgggcgcagggagccccgcctccgcgccgcgcgccgccgccgcctggtaccgcccggccgggagaagagatgtcgcccacgggatccttaacgaggcctaccgcaaagtgctggaccagctgtccgccgggaagcacctgcagtcgctcgtggcccggggcgtgggtgggagcctcggcggcggcgcgggggacgacgcggagccgctctccaagcgccactcggacgggatcttcacggacagctacagccgctaccggaaacaaatggctgtcaagaaatacttggcggccgtcctagggaagaggtataaacaaagggttaaaaacaaaggacgccgaatagcttatttgtag

SEQ ID NO: 1256 - DNA, 3206 bp, Homo sapiens
  source 1..3206: mol_type = unassigned DNA
ggtaagggagggaaaatcttaccaaagcgaccggctcactcgactgctgattctttcgcttggcatcgcgtcaggggagttagctttccttcagccgggtctggctagttattgggcgccgggtagatgcatatataaatgaccatgtgtagcggagcgaggctggccctgctggtctatgggataatcatgcacagcagcgtctacagctcacctgccgccgccggactccggttccccgggatcaggccagaggaagaggcgtacggcgaggacggaaacccgctgccagacttcgatggctcggagccgccgggcgcagggagccccgcctccgcgccgcgcgccgccgccgcctggtaccgcccggccgggagaagagatgtcgcccacgggatccttaacgaggcctaccgcaaagtgctggaccagctgtccgccgggaagcacctgcagtcgctcgtggcccggggcgtgggtgggagcctcggcggcggcgcgggggacgacgcggagccgctctccaagcgccactcggacgggatcttcacggacagctacagccgctaccggaaacaaatggctgtcaagaaatacttggcggccgtcctagggaagaggtataaacaaagggttaaaaacaaaggacgccgaatagcttatttgtagcgatgggttaccagctaccctgtgtatacagccctgacgcaatgaaaagtcgttttccaaactgactcaacagtcatcgctcgtgtgttctatccaaacatgtatttatgtaatgaagtaaagccattaaatgaatattttgataataatattgtttttctttctacaaagcactagagaatgcacagatatactttgtggaccaattattgatatatattataaatatatataaagaatatatatatatatatatatatatatatatataaagtatagagagaagttcatacaaagcgtgcacaaggattgaaaattcgcccgagctgtttatgtttttataaaaataaatagaaaagtagacaatcattgttttgaatattactcctatttttgtaaactggaattaaaaggatagtatttttatccatgacaggcctgaagatattactacttaccatttgctactgtacataaacaatgatgccctgctccagggagattttgaggtaaagatatggagaattgctgaagggcattctttcccagtgagtctctggggcaggctgcttcaatcccagcctaactcaactgggctctgtccccctggttgggtggcaattccaatatttctgctttctttgattctccttttatgtgtagttgtctctcttcagactctcagcccagaagaaaattctcctgataaaacaacagctcgatccaaattgtgcttctccccagaattcacgcctctccctaggagaagagttgaggaactgtacagaaaagggcggcttcgttagaccgctctcttttctgtacttcctgagtggccagggaatctaatatccccaaattagggcaattggaacaaagtgaaggacatagaggtatattggaagaggcagagcctgaggtggtaggaggaggaccctggaaatggactggtttgagattgccccaggtctgggaagctgagggcaaatccagtcccaatggtcctgactttgggcgctgggtattggaaatggatgcaaagtacaatgtgtttttctccagtgctgtccatgcttctcatcttgtgaaatggccaggatcctctcctttgaaacctgctctgtaggagctacccttttcctttgtggttttatggagacctctccttcctaccctcctgcactgtttaagtactgtttaccatttttcattcacttctcttaaacttgtgaatgcttctcactttttttttttgtttgatgcaggcacttattgtaaattttagaaacccctctgtagccactagtaagtaattatgcactaaatatgaaccctttgtttcttgtttattgagtttgtaggtaaaatgtatttttctacattattgcttattgcttagtaaaatttatttcataaaaccaacctttgtcatattagaatgtgtagtgttcacatgttgctcagttttgctaactgataaatcatttaatcctcttcttcatatgtatgagtactatcttatatctgtggtcaagagtgaggtaagcaagctccaacagaccctgagaacctacgcttgtatcctttctttggctaaagaaagcatgtctgtttcctgtcaattctttgaacatacagagtaatctttataaacaaaagaaccttcacccagcaatcagatcgagcagcaacagacaaaccagccagccaatctcccaaatttcaggcacaagtttatttatttatttttttatgttttgaaaaaagaagatgaagaagaagaaaaaaaaaagaacaaggaaagattaaacgttagcttgtaaagtttaaaggacctttccttttcctttacggatttgatcagtatgaagtcataaatcaaagaaaacagaattggatttgcattcccaggcgggatggatgctgccaggagatcacattgcaaatagtgaaaacagaggcattcggtctatgcctgagtcctgtgtataggatcaatcttcctttaattccgcagtctcctcaggcaatgtgacacgggatgcagtttgcagctttagtgcctttcttcgccttttaaattgccacgaatcacagatggctatttagtggccctacaatgctgcaacacatcagcttgcattttagtcttaattatttgtttcttggataatgggcagagttttctgtatttgtatcagctgttagtggtgaaatagggctctagttaaccttttatttatgaagtctaatttagtgttcccgtggctagttgcaagcattttacagtgatcacccagtttaatcttttgtatactttttagaaatgccaagagccttactaaactgaagcagatttatgatatagtgataatttaggtagatgttagtcttgaagctcttattttgtgtgcaactgattataaaaacaccttaaccaagtattattacacacatgatatctataactaggactttgataactgttatataaagtgtgtaaaatttgtatgaataaatttttgtaaacaatgcaa

SEQ ID NO: 1257 - DNA, 1278 bp, Homo sapiens
  source 1..1278: mol_type = unassigned DNA
attctgtacttaaaggcaacaggcaggcagatgttgacaaagagggctctccaaaaaccatgttcggatagatttttgcgaactgcacagataaataggagcagaaggccggtcacctctgtaaccagcggtagcagcagcagaagccgcgcttcacctcatcgccccctctttctttcttctgcctctctctctgcgcccccttctctccgtgtcacgctccctcctggttctgcgcgtctacaaacttttgagcagaacacgagcctcggcaaacgagtcccgcagctcctcctgctgctcccgctggttcctgcggcttctgctcagacaccaacgccagacggcgatgcctctcgggtggtgactccagcgcaggaacttgaagaagcgctttgcccgccgtcctacctggcagctctcctggcagcgggaggagttgaaggaatgaccatgtgtagcggagcgaggctggccctgctggtctatgggataatcatgcacagcagcgtctacagctcacctgccgccgccggactccggttccccgggatcaggccagaggaagaggcgtacggcgaggacggaaacccgctgccagacttcgatggctcggagccgccgggcgcagggagccccgcctccgcgccgcgcgccgccgccgcctggtaccgcccggccgggagaagagatgtcgcccacgggatccttaacgaggcctaccgcaaagtgctggaccagctgtccgccgggaagcacctgcagtcgctcgtggcccggggcgtgggtgggagcctcggcggcggcgcgggggacgacgcggagccgctctccaagcgccactcggacgggatcttcacggacagctacagccgctaccggaaacaaatggctgtcaagaaatacttggcggccgtcctagggaagaggtataaacaaagggttaaaaacaaaggacgccgaatagcttatttgtagcgatgggttaccagctaccctgtgtatacagccctgacgcaatgaaaagtcgttttccaaactgactcaacagtcatcgctcgtgtgttctatccaaacatgtatttatgtaatgaagtaaagccattaaatgaatattttgataataatattgtttttctttctacaaagcactagagaatgcacagatatactttgtggaccaattattgatatatattataaatatatataaagaatatatatatatatatatatatatatatatataaagtatagagagaagttcatacaaagcgt

SEQ ID NO: 1258 - DNA, 3346 bp, Homo sapiens
  source 1..3346: mol_type = unassigned DNA
attctttcgcttggcatcgcgtcaggggagttagctttccttcagccgggtctggctagttattgggcgccgggtagatgcatatatatatatttttttctaactatagcaagcaagaagtggcagggcgcgcaccggctgtcgccaagtgctgttcaactcagggagccggggcttcgctccgtccctcccccggcttccagagctttttggggttggagggtgggaggccaggggcgttctcacagctgtgtgtcctctttcccatcctgcgcagaatgaccatgtgtagcggagcgaggctggccctgctggtctatgggataatcatgcacagcagcgtctacagctcacctgccgccgccggactccggttccccgggatcaggccagaggaagaggcgtacggcgaggacggaaacccgctgccagacttcgatggctcggagccgccgggcgcagggagccccgcctccgcgccgcgcgccgccgccgcctggtaccgcccggccgggagaagagatgtcgcccacgggatccttaacgaggcctaccgcaaagtgctggaccagctgtccgccgggaagcacctgcagtcgctcgtggcccggggcgtgggtgggagcctcggcggcggcgcgggggacgacgcggagccgctctccaagcgccactcggacgggatcttcacggacagctacagccgctaccggaaacaaatggctgtcaagaaatacttggcggccgtcctagggaagaggtataaacaaagggttaaaaacaaaggacgccgaatagcttatttgtagcgatgggttaccagctaccctgtgtatacagccctgacgcaatgaaaagtcgttttccaaactgactcaacagtcatcgctcgtgtgttctatccaaacatgtatttatgtaatgaagtaaagccattaaatgaatattttgataataatattgtttttctttctacaaagcactagagaatgcacagatatactttgtggaccaattattgatatatattataaatatatataaagaatatatatatatatatatatatatatatatataaagtatagagagaagttcatacaaagcgtgcacaaggattgaaaattcgcccgagctgtttatgtttttataaaaataaatagaaaagtagacaatcattgttttgaatattactcctatttttgtaaactggaattaaaaggatagtatttttatccatgacaggcctgaagatattactacttaccatttgctactgtacataaacaatgatgccctgctccagggagattttgaggtaaagatatggagaattgctgaagggcattctttcccagtgagtctctggggcaggctgcttcaatcccagcctaactcaactgggctctgtccccctggttgggtggcaattccaatatttctgctttctttgattctccttttatgtgtagttgtctctcttcagactctcagcccagaagaaaattctcctgataaaacaacagctcgatccaaattgtgcttctccccagaattcacgcctctccctaggagaagagttgaggaactgtacagaaaagggcggcttcgttagaccgctctcttttctgtacttcctgagtggccagggaatctaatatccccaaattagggcaattggaacaaagtgaaggacatagaggtatattggaagaggcagagcctgaggtggtaggaggaggaccctggaaatggactggtttgagattgccccaggtctgggaagctgagggcaaatccagtcccaatggtcctgactttgggcgctgggtattggaaatggatgcaaagtacaatgtgtttttctccagtgctgtccatgcttctcatcttgtgaaatggccaggatcctctcctttgaaacctgctctgtaggagctacccttttcctttgtggttttatggagacctctccttcctaccctcctgcactgtttaagtactgtttaccatttttcattcacttctcttaaacttgtgaatgcttctcactttttttttttgtttgatgcaggcacttattgtaaattttagaaacccctctgtagccactagtaagtaattatgcactaaatatgaaccctttgtttcttgtttattgagtttgtaggtaaaatgtatttttctacattattgcttattgcttagtaaaatttatttcataaaaccaacctttgtcatattagaatgtgtagtgttcacatgttgctcagttttgctaactgataaatcatttaatcctcttcttcatatgtatgagtactatcttatatctgtggtcaagagtgaggtaagcaagctccaacagaccctgagaacctacgcttgtatcctttctttggctaaagaaagcatgtctgtttcctgtcaattctttgaacatacagagtaatctttataaacaaaagaaccttcacccagcaatcagatcgagcagcaacagacaaaccagccagccaatctcccaaatttcaggcacaagtttatttatttatttttttatgttttgaaaaaagaagatgaagaagaagaaaaaaaaaagaacaaggaaagattaaacgttagcttgtaaagtttaaaggacctttccttttcctttacggatttgatcagtatgaagtcataaatcaaagaaaacagaattggatttgcattcccaggcgggatggatgctgccaggagatcacattgcaaatagtgaaaacagaggcattcggtctatgcctgagtcctgtgtataggatcaatcttcctttaattccgcagtctcctcaggcaatgtgacacgggatgcagtttgcagctttagtgcctttcttcgccttttaaattgccacgaatcacagatggctatttagtggccctacaatgctgcaacacatcagcttgcattttagtcttaattatttgtttcttggataatgggcagagttttctgtatttgtatcagctgttagtggtgaaatagggctctagttaaccttttatttatgaagtctaatttagtgttcccgtggctagttgcaagcattttacagtgatcacccagtttaatcttttgtatactttttagaaatgccaagagccttactaaactgaagcagatttatgatatagtgataatttaggtagatgttagtcttgaagctcttattttgtgtgcaactgattataaaaacaccttaaccaagtattattacacacatgatatctataactaggactttgataactgttatataaagtgtgtaaaatttgtatgaataaatttttgtaaacaatgcaa

SEQ ID NO: 1259 - DNA, 6487 bp, Homo sapiens
  source 1..6487: mol_type = unassigned DNA
gcgagcgtggtccccgcgtgcgcacacgcacacgccgccgcgcagggacacacggaccccggccgccagccggccacacaggcgcggagacccggctcggcgcgcgctcctcggcgcacacgctccccatccccgcgccgcgcgggccgcggacttgcaggctgcgcgtcctttgcggagtctgccccggccccacggacaggccccgcagtgagcagcccagagacacattggggctgacctgccgctgctgtcagtgggaggccagtggtgctggccaagaagtgtcatggctggtgtcgtgcacgtttccctggctgctctcctcctgctgcctatggcccctgccatgcattctgactgcatcttcaagaaggagcaagccatgtgcctggagaagatccagagggccaatgagctgatgggcttcaatgattcctctccaggctgtcctgggatgtgggacaacatcacgtgttggaagcccgcccatgtgggtgagatggtcctggtcagctgccctgagctcttccgaatcttcaacccagaccaagtctgggagaccgaaaccattggagagtctgattttggtgacagtaactccttagatctctcagacatgggagtggtgagccggaactgcacggaggatggctggtcggaacccttccctcattactttgatgcctgtgggtttgatgaatatgaatctgagactggggaccaggattattactacctgtcagtgaaggccctctacacggttggctacagcacatccctcgtcaccctcaccactgccatggtcatcctttgtcgcttccggaagctgcactgcacacgcaacttcatccacatgaacctgtttgtgtcgttcatgctgagggcgatctccgtcttcatcaaagactggattctgtatgcggagcaggacagcaaccactgcttcatctccactgtggaatgtaaggccgtcatggttttcttccactactgtgttgtgtccaactacttctggctgttcatcgagggcctgtacctcttcactctgctggtggagaccttcttccctgaaaggagatacttctactggtacaccatcattggctgggggaccccaactgtgtgtgtgacagtgtgggctacgctgagactctactttgatgacacaggctgctgggatatgaatgacagcacagctctgtggtgggtgatcaaaggccctgtggttggctctatcatggttaactttgtgctttttattggcattatcgtcatccttgtgcagaaacttcagtctccagacatgggaggcaatgagtccagcatctacttgcgactggcccggtccaccctgctgctcatcccactattcggaatccactacacagtatttgccttctccccagagaatgtcagcaaaagggaaagactcgtgtttgagctggggctgggctccttccagggctttgtggtggctgttctctactgttttctgaatggtgaggtacaagcggagatcaagcgaaaatggcgaagctggaaggtgaaccgttacttcgctgtggacttcaagcaccgacacccgtctctggccagcagtggggtgaatgggggcacccagctctccatcctgagcaagagcagctcccaaatccgcatgtctggcctccctgctgacaatctggccacctgagccatgctcccctcctcctcctctcctccatccacaggctgggaccgcaggcaggtgccagcccacgcatgtttgcgcctcttccctccccttgggcaggccctgggctggaagcttggctcctgaggggggagaaggaggcagggcacagactggaattgtcccctccttgttttggtactggtcccacccactgtggtcccctgggccctgaccccagacatgtaaatactcctcaaatttggaaaagttgtcccatcccttccccctttgccccagtgtccctgctcacttccagtcaggtctcagctccaccccactgtttcttggtcagcctcagtgatggcctgaccccagctgtgaggccttgtgagctaaggctgaagagaccttgcctgtgggagctggggtggtacctgccccaacagccccccatcatctgattttgggtgtgacccctcgagtgtgcatgccaccctggggctcttctcagtcctgggcccaagtccctgaagcctagcagagggccagctcgggtggccagaacaccccttggtgcaggcctcctggcactcgcctggcatcttggtgtccgggtgctcagctcctgggtcccagggcagtgggacagctcccaggctcttctcatcagagacttcagtttgggtggggagtctgcaggtcagggaaggttctggtgcttttcgtttgatccaaaaggagctgagagccagaaatgtggctgtgattgcgaaagagacggagtttgggagacccatggaagaaaaccttcgccatctccattgttttacccccagctcaagatggacagggttcttctggtcatctcccttccacctcttccaccctcatggatgccttccagaagctgtctccaaccatgcacaccacagagagcccttaagccctcccctccccatttcccctaagtcaaagccatgactaggatgtaccagccacctgcctctgatgtcggcgaatcctgaagcacctgcacccgaatctggggcccagggctgcccgacccccactcccatggatgatgaggagccccagacaccagctcctctggcctggactcaactattgaaatctctctgagacctctgcaaagatgtcccttttatgcccttgaccttgactcaccatgggctgctggggtgtcgggagaagccacacccaacatgcccattagcagaggctgctgctgatgtggcagctgctccctaccacccgccctggctccccagctgcaggttgcacaccctcagcctgagaatgtaaaatagggcagtgcccagctggggaggtagaggaaagtgctagagtacatggtccgtgtgtggcctagctcattccatgtcagcatttggtgttactcctgtccaaattctgtttgcagacttgtttcatgatgatgctctggaatgcttggggactttgggtggaggaggatgttacttcattttataaagaggaaggggcctgggagacttgggaaaatgtttctggagaggctttcagagtggctggaaaaggctcttgttgctgtaatttagagaggagctctgtgtccttggccagtcaagtaagttcctggatctttggcaaagccagaggaagaaaggagctacctgccctttcctgggcatgcttggtgactcagattgatcttggagtgtgcagtggcccttctaccctgcacctgacctcatgatcccctccacctgcactggtgtgcattactgaagcaagggtcctgtggacatcttgcattttgggcactgctagggggtctgggctgcttggaaggagccatggcctagggttcagggaactagactctatcccagttgggttcagactgctgtgactgtggacacgatgctccttgttctgggctccagttttcccatttgtgagatgaggcaacttccaatgcttctctaggccctgcacgtaagtgatttttccagttcaaagtcaagacaggtaaaagggcattcatcattgtgcctcatatcaggttttgatgaatatatgtgtgtgtgtgtgtgtgtgtgtgtgtgtgtgtgtagagggatggacaggatgctgtttattttccctttcttggaaatggaccttctgtcccttccatttggacaccacagtggaagctggtggcctggaaggaaggattaggtcatggacatttgaacaggtgccttgggcatgatgtatagatgcagtcatatataccttgctggggtggggtgccacctccagtggccagctccagatccaaggagcagccccctggggatggaccccattcattcatcatgactcccaacagttttcattgtggaagaagaaactttggcattatagagacatcatcacaaaacagtaaaaacaaaatcaaccctgaaccccatgcactgtgctgcttcctgagcctggccctgcatcctcatagaggtgccgggttcctattggttagttggttgtttttccgtctgagtgaatttttgccagtcttgtgagcagatgtacctgatgtattctcaatgttccaagaggttctggccttcagggtcacaggcagtagggggacagcataaggtctatgtaaaacccttccctctctgaccctctgttttcaaatctgtaaaatgggcaataagactagatgatttgtatatagcccaatgcatctctggaactctgtctaaacaccagccatctacttggaatgggccccaggactgtggtatttgcctgggccaggaaaggataagaaatcctgtcatgtgaagacagcttgagaggcttgagaaaagtggggctggggagaagcaggcttgtcagactccacccctgttgatgatcattcctgggaaggggtttctcgttctatgcaatcctaaaggacgaaactcacccatgggaggccgaattctccttgggatgaagaaatttctctttccctgtcatgagtgtccagccagggagcagggaggcagtgtcagggagggactctcatcctggaggaaatgggattccaagtcaaggatgctgaggctgtcagggagccagagaggggggtccaagtgcgggatgtgggtggctctgtggttcagtggctctgtggtagttcctagcactgcagacttcatgactccccacttaagtccaagtcacattgtctatcccagtgtgtagctctgtcaccctgcttgacacatccagtggcctacagcgactcttctctaaccccaccccctccaagctgggttctttgtggaagaaggacagggagctagagccaagccctaggcttgagagacacctgcatctataatccccgccaaggatgcccactcacctctctcatctgatcctcactctttgtggaagggaaagctcaaagggactctctctctctctctctttttttttttttttgagtagtacccttgccctcttcatggccacttcaaagtgaagccagcaaagtgataatactttatcatttagtattatcataaagtattaatactttgtcataaagtcctccttgagcccagggaccatggaagtcagctagaagagccctgagcaaggagcaaggacttgggcttctccacgctttgctcctggcttgtttgaccttgactcattccccatatgtctttgaggaggctcacaaaatactaaagctgggaggaaacttggagatctataggtcaaacctccccattgggctgatgagaaaatacacgcaggcctagcatggtgcctgccaccatggtgggatccagtatgttttataaatctgaatgagtaaatggctcaccaatttatgcatagccctgcacatgagcagaatgtgacactcaaagcatccatgcagtacgcatgtaaccttgcacaggagtggggctctggtgaccgaaggttgtccaggactcttgcaggagaagcaatggagtcagtgtggtgtggggagacctactttttaacctgggcttagccacctgctctgtgatccagggcttaccttctttgggcctcggcctcctaatctgggtaatggggaggacttcattggcattgttagtcccacaggccaaggataaggttgaaatgagacggcttgtgtgtgaaaagattttggaaattacacagatgtgggcttgttattgggatgaagactgctggaagggactccttgctgtttatctactgctttgagccctcctaagttaacctgtgcctcatttgtaaaaccaccagcatcaggagtaagggggaggccagagggctcagatggacacagaattctagctttacctgcatccgctgattcagttttctgttgggatcagagtgaggatacttccatatgggtgatagcagccatgcccctgggagtcaacttcaaggatctgggacattttggtgtgcccattccttcttttcctgaactcacagtcttggggtgtttctgcacttggctatgtgtgtcttgtctgatgtctgtcttctgtagctttgcctctatcagggctggagtggtgcagcccctggcatctcagacatggttcctgcctcacttgtgggagctggaccagcctgggtttcatctcccacagtaaagctaagtaagccccacagaccttactgctactgctgctgccattaatgctgtgctcactatcttgtccaggattttaaggatgtcagactgctgtagatgactcaataaatgttttgccatttttc

SEQ ID NO: 1260 - DNA, 2395 bp, Homo sapiens
  source 1..2395: mol_type = unassigned DNA
acacggaccccggccgccagccggccacacaggcgcggagacccggctcggcgcgcgctcctcggcgcacacgctccccatccccgcgccgcgcgggccgcggacttgcaggctgcgcgtcctttgcggagtctgccccggccccacggacaggccccgcagtgagcagcccagagacacattggggctgacctgccgctgctgtcagtgggaggccagtggtgctggccaagaagtgtcatggctggtgtcgtgcacgtttccctggctgctctcctcctgctgcctatggcccctgccatgcattctgactgcatcttcaagaaggagcaagccatgtgcctggagaagatccagagggccaatgagctgatgggcttcaatgattcctctccaggctgtcctgggatgtgggacaacatcacgtgttggaagcccgcccatgtgggtgagatggtcctggtcagctgccctgagctcttccgaatcttcaacccagaccaagtctgggagaccgaaaccattggagagtctgattttggtgacagtaactccttagatctctcagacatgggagtggtgagccggaactgcacggaggatggctggtcggaacccttccctcattactttgatgcctgtgggtttgatgaatatgaatctgagactggggaccaggattattactacctgtcagtgaaggccctctacacggttggctacagcacatccctcgtcaccctcaccactgccatggtcatcctttgtcgcttccggaagctgcactgcacacgcaacttcatccacatgaacctgtttgtgtcgttcatgctgagggcgatctccgtcttcatcaaagactggattctgtatgcggagcaggacagcaaccactgcttcatctccactgtggaatgtaaggccgtcatggttttcttccactactgtgttgtgtccaactacttctggctgttcatcgagggcctgtacctcttcactctgctggtggagaccttcttccctgaaaggagatacttctactggtacaccatcattggctgggggaccccaactgtgtgtgtgacagtgtgggctacgctgagactctactttgatgacacaggctgctgggatatgaatgacagcacagctctgtggtgggtgatcaaaggccctgtggttggctctatcatggttaactttgtgctttttattggcattatcgtcatccttgtgcagaaacttcagtctccagacatgggaggcaatgagtccagcatctacttaacaaatttaagcccgcgagtccccaagaaagcccgagaggaccccctgcctgtgccctcagaccagcattcactccctttcctcagctgcgtgcagaaatgctactgcaagccacagcgggctcagcagcactcttgcaagatgtcagaactgtccaccattactctgcgactggcccggtccaccctgctgctcatcccactattcggaatccactacacagtatttgccttctccccagagaatgtcagcaaaagggaaagactcgtgtttgagctggggctgggctccttccagggctttgtggtggctgttctctactgttttctgaatggtgaggtacaagcggagatcaagcgaaaatggcgaagctggaaggtgaaccgttacttcgctgtggacttcaagcaccgacacccgtctctggccagcagtggggtgaatgggggcacccagctctccatcctgagcaagagcagctcccaaatccgcatgtctggcctccctgctgacaatctggccacctgagccatgctcccctcctcctcctctcctccatccacaggctgggaccgcaggcaggtgccagcccacgcatgtttgcgcctcttccctccccttgggcaggccctgggctggaagcttggctcctgaggggggagaaggaggcagggcacagactggaattgtcccctccttgttttggtactggtcccacccactgtggtcccctgggccctgaccccagacatgtaaatactcctcaaatttggaaaagttgtcccatcccttccccctttgccccagtgtccctgctcacttccagtcaggtctcagctccaccccactgtttcttggtcagcctcagtgatggcctgaccccagctgtgaggccttgtgagctaaggctgaagagaccttgcctgtgggagctggggtggtacctgccccaacagccccccatcatctgattttgggtgtgacccctcgagtgtgcatgccaccctggggctcttctcagtcctgggcccaagtccctgaagcctagcagagggccagctcgggtggccagaacaccccttggtgcaggcctcctggcactcgcctg

SEQ ID NO: 1261 - DNA, 1587 bp, Homo sapiens
  source 1..1587: mol_type = unassigned DNA
cccagagacacattggggctgacctgccgctgctgtcagtgggaggccagtggtgctggccaagaagtgtcatggctggtgtcgtgcacgtttccctggctgctctcctcctgctgcctatggcccctgccatgcattctgactgcatcttcaagaaggagcaagccatgtgcctggagaagatccagagggccaatgagctgatgggcttcaatgattcctctccaggctgtcctgggatgtgggacaacatcacgtgttggaagcccgcccatgtgggtgagatggtcctggtcagctgccctgagctcttccgaatcttcaacccagaccaagtctgggagaccgaaaccattggagagtctgattttggtgacagtaactccttagatctctcagacatgggagtggtgagccggaactgcacggaggatggctggtcggaacccttccctcattactttgatgcctgtgggtttgatgaatatgaatctgagactggggaccaggattattactacctgtcagtgaaggccctctacacggttggctacagcacatccctcgtcaccctcaccactgccatggtcatcctttgtcgcttccggaagctgcactgcacacgcaacttcatccacatgaacctgtttgtgtcgttcatgctgagggcgatctccgtcttcatcaaagactggattctgtatgcggagcaggacagcaaccactgcttcatctccactgtggaatgtaaggccgtcatggttttcttccactactgtgttgtgtccaactacttctggctgttcatcgagggcctgtacctcttcactctgctggtggagaccttcttccctgaaaggagatacttctactggtacaccatcattggctgggggaccccaactgtgtgtgtgacagtgtgggctacgctgagactctactttgatgacacaggctgctgggatatgaatgacagcacagctctgtggtgggtgatcaaaggccctgtggttggctctatcatggttaactttgtgctttttattggcattatcgtcatccttgtgcagaaacttcagtctccagacatgggaggcaatgagtccagcatctacttcagctgcgtgcagaaatgctactgcaagccacagcgggctcagcagcactcttgcaagatgtcagaactgtccaccattactctgcgactggcccggtccaccctgctgctcatcccactattcggaatccactacacagtatttgccttctccccagagaatgtcagcaaaagggaaagactcgtgtttgagctggggctgggctccttccagggctttgtggtggctgttctctactgttttctgaatggtgaggtacaagcggagatcaagcgaaaatggcgaagctggaaggtgaaccgttacttcgctgtggacttcaagcaccgacacccgtctctggccagcagtggggtgaatgggggcacccagctctccatcctgagcaagagcagctcccaaatccgcatgtctggcctccctgctgacaatctggccacctgagccatgctcccctcctcctcctctc

SEQ ID NO: 1262 - DNA, 1761 bp, Homo sapiens
  source 1..1761: mol_type = unassigned DNA
gccagtggtgctggccaagaagtgtcatggctggtgtcgtgcacgtttccctggctgctctcctcctgctgcctatggcccctgccatgcattctgactgcatcttcaagaaggagcaagccatgtgcctggagaagatccagagggccaatgagctgatgggcttcaatgattcctctccaggctgtcctgggatgtgggacaacatcacgtgttggaagcccgcccatgtgggtgagatggtcctggtcagctgccctgagctcttccgaatcttcaacccagaccaagtctgggagaccgaaaccattggagagtctgattttggtgacagtaactccttagatctctcagacatgggagtggtgagccggaactgcacggaggatggctggtcggaacccttccctcattactttgatgcctgtgggtttgatgaatatgaatctgagactggggaccaggattattactacctgtcagtgaaggccctctacacggttggctacagcacatccctcgtcaccctcaccactgccatggtcatcctttgtcgcttccggaagctgcactgcacacgcaacttcatccacatgaacctgtttgtgtcgttcatgctgagggcgatctccgtcttcatcaaagactggattctgtatgcggagcaggacagcaaccactgcttcatctccactgtggaatgtaaggccgtcatggttttcttccactactgtgttgtgtccaactacttctggctgttcatcgagggcctgtacctcttcactctgctggtggagaccttcttccctgaaaggagatacttctactggtacaccatcattggctgggggaccccaactgtgtgtgtgacagtgtgggctacgctgagactctactttgatgacacaggctgctgggatatgaatgacagcacagctctgtggtgggtgatcaaaggccctgtggttggctctatcatggttaactttgtgctttttattggcattatcgtcatccttgtgcagaaacttcagtctccagacatgggaggcaatgagtccagcatctacttaacaaatttaagcccgcgagtccccaagaaagcccgagaggaccccctgcctgtgccctcagaccagcattcactccctttcctcagctgcgtgcagaaatgctactgcaagccacagcgggctcagcagcactcttgcaagatgtcagaactgtccaccattactctgcgactggcccggtccaccctgctgctcatcccactattcggaatccactacacagtatttgccttctccccagagaatgtcagcaaaagggaaagactcgtgtttgagctggggctgggctccttccagggctttgtggtggctgttctctactgttttctgaatggtgaggtacaagcggagatcaagcgaaaatggcgaagctggaaggtgaaccgttacttcgctgtggacttcaagcaccgacacccgtctctggccagcagtggggtgaatgggggcacccagctctccatcctgagcaagagcagctcccaaatccgcatgtctggcctccctgctgacaatctggccacctgagccatgctcccctcctcctcctctcctccatccacaggctgggaccgcaggcaggtgccagcccacgcatgtttgcgcctcttccctccccttgggcaggccctgggctggaagcttggctcctgaggggggagaaggaggcagggcacagactggaatt

SEQ ID NO: 1263 - DNA, 466 bp, Homo sapiens
  source 1..466: mol_type = unassigned DNA
atccaggttttctgggcactcgtgtgtcttgcctgtgccaggtgctgtgggcacacgcacgtcagagctgggctcatgctcacttaggagaggctgaagcttaaccagcgtctgcacaaagggaaaggcgctcagtgcagagctactcctctccacaccacaccccctgccggcccagagacacattggggctgacctgccgctgctgtcagtgggaggccagtggtgctggccaagaagtgtcatggctggtgtcgtgcacgtttccctggctgctctcctcctgctgcctatggcccctgccatgcattctgactgcatcttcaagaaggagcaagccatgtgcctggagaagatccagagggccaatgagctgatgggcttcaatgattcctctccaggctgtcctgggatgtgggacaacatcacgtgttggaagcccgcccatgtgggtgagatggtcctg

SEQ ID NO: 1264 - DNA, 441 bp, Homo sapiens
  source 1..441: mol_type = unassigned DNA
ggctacgctgagactctactttgatgacacaggctgctgggatatgaatgacagcacagctctgtggtgggtgatcaaaggccctgtggttggctctatcatggttaactttgtgctttttattggcattatcgtcatccttgtgcagaaacttcagtctccagacatgggaggcaatgagtccagcatctacttaacaaatttaagcccgcgagtccccaagaaagcccgagaggaccccctgcctgtgccctcagaccagcattcactccctttcctgcgactggcccggtccaccctgctgctcatcccactattcggaatccactacacagtatttgccttctccccagagaatgtcagcaaaagggaaagactcgtgtttgagctggggctgggctccttccagggctttgtggtggctgttctctactgttttct

SEQ ID NO: 1265 - DNA, 1889 bp, Homo sapiens
  source 1..1889: mol_type = unassigned DNA
cagccggccacacaggcgcggagacccggctcggcgcgcgctcctcggcgcacacgctccccatccccgcgccgcgcgggccgcggacttgcaggctgcgcgtcctttgcggagtctgccccggccccacggacaggccccgcagtgagcagcccagagacacattggggctgacctgccgctgctgtcagtgggaggccagtggtgctggccaagaagtgtcatggctggtgtcgtgcacgtttccctggctgctctcctcctgctgcctatggcccctgccatgcattctgactgcatcttcaagaaggagcaagccatgtgcctggagaagatccagagggccaatgagctgatgggcttcaatgattcctctccaggctgtcctgggatgtgggacaacatcacgtgttggaagcccgcccatgtgggtgagatggtcctggtcagctgccctgagctcttccgaatcttcaacccagaccaagacatgggagtggtgagccggaactgcacggaggatggctggtcggaacccttccctcattactttgatgcctgtgggtttgatgaatatgaatctgagactggggaccaggattattactacctgtcagtgaaggccctctacacggttggctacagcacatccctcgtcaccctcaccactgccatggtcatcctttgtcgcttccggaagctgcactgcacacgcaacttcatccacatgaacctgtttgtgtcgttcatgctgagggcgatctccgtcttcatcaaagactggattctgtatgcggagcaggacagcaaccactgcttcatctccactgtggaatgtaaggccgtcatggttttcttccactactgtgttgtgtccaactacttctggctgttcatcgagggcctgtacctcttcactctgctggtggagaccttcttccctgaaaggagatacttctactggtacaccatcattggctgggggaccccaactgtgtgtgtgacagtgtgggctacgctgagactctactttgatgacacaggctgctgggatatgaatgacagcacagctctgtggtgggtgatcaaaggccctgtggttggctctatcatggttaactttgtgctttttattggcattatcgtcatccttgtgcagaaacttcagtctccagacatgggaggcaatgagtccagcatctacttgcgactggcccggtccaccctgctgctcatcccactattcggaatccactacacagtatttgccttctccccagagaatgtcagcaaaagggaaagactcgtgtttgagctggggctgggctccttccagggctttgtggtggctgttctctactgttttctgaatggtgaggtacaagcggagatcaagcgaaaatggcgaagctggaaggtgaaccgttacttcgctgtggacttcaagcaccgacacccgtctctggccagcagtggggtgaatgggggcacccagctctccatcctgagcaagagcagctcccaaatccgcatgtctggcctccctgctgacaatctggccacctgagccatgctcccctcctcctcctctcctccatccacaggctgggaccgcaggcaggtgccagcccacgcatgtttgcgcctcttccctccccttgggcaggccctgggctggaagcttggctcctgaggggggagaaggaggcagggcacagactggaattgtcccctccttgttttggtactggtcccacccactgtggtcccctgggccctgaccccagacatgtaaatactcctcaaatttggaaaagttgtcccatcccttccccctttgccccagtgtccctgctcacttccagtcaggtctcagctccaccccactg

SEQ ID NO: 1266 - DNA, 736 bp, Homo sapiens
  source 1..736: mol_type = unassigned DNA
gctaagcccccactgccgggggaggcgggtgatgggccggcccagggcctgagaggggaagggcagggtgcacaggagacacggcaggacgggaccatgggctgctgctcctcgagtgacccccgcagagaagacgatctgagagccagagagaagctgaagaaaaccaagatcatctttgtggtgggtgggcctggctcagggaagggcacccagtgtgagaagatcgtgcagaagtatggctacacccacctctccaccggggacctcctgcggtccgaggtcagctcaggctcggccaggggcaagaagctgtcggaaatcatggagaaggggcagctggttccactggagacagtgttggacatgctccgggatgccatggtggccaaagtcaatacttccaaaggcttcctgattgatggctacccgcgggaggtgcagcaaggagaagagtttgagcgacggattggacagcccacactgctgctgtatgtggacgcaggccctgagaccatgacccagcggctcttgaaacgtggagagaccagcgggcgtgtggacgacaatgaggagaccatcaaaaagcggctggagacctattacaaggccacagaacctgtcatcgccttctatgagaaacgtggcattgtgcgcaaggtcaacgctgagggctccgtggacagtgtcttctcccaggtctgcacccacctggacgccctaaagtagcaacgct

SEQ ID NO: 1267 - DNA, 757 bp, Homo sapiens
  source 1..757: mol_type = unassigned DNA
gggagtttcgaggggagcagctctgcagttgtgtggccgctgtttatgtccctcggtgccatcctcactgtcccagcccctccagcgggaacccaggtggatgggagggggctactgcccttctgtgacagagcactgacacggctcccgggacctcggcaggatggaagagaagctgaagaaaaccaagatcatctttgtggtgggtgggcctggctcagggaagggcacccagtgtgagaagatcgtgcagaagtatggctacacccacctctccaccggggacctcctgcggtccgaggtcagctcaggctcggccaggggcaagaagctgtcggaaatcatggagaaggggcagctggttccactggagacagtgttggacatgctccgggatgccatggtggccaaagtcaatacttccaaaggcttcctgattgatggctacccgcgggaggtgcagcaaggagaagagtttgagcgacggattggacagcccacactgctgctgtatgtggacgcaggccctgagaccatgacccagcggctcttgaaacgtggagagaccagcgggcgtgtggacgacaatgaggagaccatcaaaaagcggctggagacctattacaaggccacagaacctgtcatcgccttctatgagaaacgtggcattgtgcgcaaggtcaacgctgagggctccgtggacagtgtcttctcccaggtctgcacccacctggacgccctaaagtagcaacgctgg

SEQ ID NO: 1268 - DNA, 2266 bp, Homo sapiens
  source 1..2266: mol_type = unassigned DNA
gggaacgccggctcccggcatgccgcgcgctgacagccttataaatagtcgcctttgccggccgccgcgaggacgggcagggcacgcactggccccggcgcccacccgcacccctccccagagcactgacacggctcccgggacctcggcaggatggaagagaagctgaagaaaaccaagatcatctttgtggtgggtgggcctggctcagggaagggcacccagtgtgagaagatcgtgcagaagtatggctacacccacctctccaccggggacctcctgcggtccgaggtcagctcaggctcggccaggggcaagaagctgtcggaaatcatggagaaggggcagctggttccactggagacagtgttggacatgctccgggatgccatggtggccaaagtcaatacttccaaaggcttcctgattgatggctacccgcgggaggtgcagcaaggagaagagtttgagcgacggattggacagcccacactgctgctgtatgtggacgcaggccctgagaccatgacccagcggctcttgaaacgtggagagaccagcgggcgtgtggacgacaatgaggagaccatcaaaaagcggctggagacctattacaaggccacagaacctgtcatcgccttctatgagaaacgtggcattgtgcgcaaggtcaacgctgagggctccgtggacagtgtcttctcccaggtctgcacccacctggacgccctaaagtagcaacgctggagccgcttccccagctcagagccccgccccaccccgtcctgattcgaggtcctcctggcctgagcgcagcgcctccaccctgccctgctgagcacagacggaggaagccgcttatcctgttttcatggacagctgagcactaaaggaatttctaaggacatttggttttactgctttttctctgcttccagttggagttgattcatgtgcttgtgcctacctggccgcaagtccccagcccctcaaccctccgttcctcctcagcctccctttgccagccacccctcctctagctctggtgggaggcccggggcccttcctcgcacagggcatgcctggcctgaggacccggcgctgagtggcggggcccctgctccgaggggctcatgttcaggcagaaccggtcccagcctgggctcctctgcatcttgctctgtggccttggccctgacccccatcgctctgagcatatgttccatgcctggcccttgccggggcctggactgcacaggcagcaaggtcatggtctgagtggggcttcctgggcagttggggcggcccacgccagctggcccagtgggtagtgaattggcttccttgacgcgagaggctctgagggtctgaaaagggcatctcaatggcatgggtgggtggggagtcagtcatgtcactgaaattgaatgggggaggcccaatgaggtggctcatgcctgtaatcccagcactttgggaagctgaggcaggaggatcccctgaggtcaggagttcgagagcagcctggccaacatggcaaaaccccttatttactaaaaatacaaaaattagccgggcatggtggcatgtgcctgtattcccagctactcatgaggctgaggcaggagaatggcgtgaacccgggaggtggagcttgcaatgagccaagattgcgccactgcactccagcctgggtgacagagcaagactccgtctcaaaaaaaaaaaaaaaaaaaaagaaattgaattgggggagtcatggtcaggggtgagacctgaaggacctccccctgtgtggccctggacacagcccaccctctgtgagccgtttccaattctaaaacagactcaatgtccccctcacccccacctcaaggtcaggatgagaacacactgagtgaggagtggacgctgtccattgccacggccatgagggctggagaccagaacagcatggcccgaagcgtgcggggccccggatgacttggggacaccccagaatcccctggggagaacccttcctgcgcgctttcattttttgacctcatcactgagaaaggctcaatttggtgctcacgtgtccttaacacctgatctggcccaagctgggctccctttaagccaagagagcctcttgtggaccccgcctgcccgaatgaaatccgaacagttggggctgttcatggcaagtggggctggtttttcatttccattggttatttaaagtttcctttaaaataaacgattttaagttataaaaggtgaa

SEQ ID NO: 1269 - DNA, 1021 bp, Homo sapiens
  source 1..1021: mol_type = unassigned DNA
gtgaagagtccgtcgtgctcaggggcgggcggaacgggctgacggacgcggctatgggccagtgtgagcggcgagtgggacgtgcgtggcgtgcgtgcgttgacctgggaagcactggacctgtgaggcgtgcgaactggtggcagtgagagacttcggcggacatggctcccagcgtgccagcggcagaacccgagtatcctaaaggcatccgggccgtgctgctggggcctcccggggccggtaaagggacccaggcacccagattggctgaaaacttctgtgtctgccatttagctactggggacatgctgagggccatggtggcttctggctcagagctaggaaaaaagctgaaggcaactatggatgctgggaaactggtgagtgatgaaatggtagtggagctcattgagaagaatttggagacccccttgtgcaaaaatggttttcttctggatggcttccctcggactgtgaggcaggcagaaatgctcgatgacctcatggagaagaggaaagagaagcttgattctgtgattgaattcagcatcccagactctctgctgatccgaagaatcacaggaaggctgattcaccccaagagtggccgttcctaccacgaggagttcaaccctccaaaagagcccatgaaagatgacatcaccggggaacccttgatccgtcgatcagatgataatgaaaaggccttgaaaatccgcctgcaagcctaccacactcaaaccaccccactcatagagtactacaggaaacgggggatccactccgccatcgatgcatcccagacccccgatgtcgtgttcgcaagcatcctagcagccttctccaaagccacatgtaaagacttggttatgtttatctaatgttgggtccaagaaggaatttctttccatccctgtgaggcaatgggtgggaatgataggacaggcaaagagaagcttcctcaggctagcaaaaatatcatttgatgtattgattaaaaaagcacttgcttgatgta

SEQ ID NO: 1270 - DNA, 3586 bp, Homo sapiens
  source 1..3586: mol_type = unassigned DNA
gtgaggcgtgcgaactggtggcagtgagagacttcggcggacatggctcccagcgtgccagcggcagaacccgagtatcctaaaggcatccgggccgtgctgctggggcctcccggggccggtaaagggacccaggcacccagattggctgaaaacttctgtgtctgccatttagctactggggacatgctgagggccatggtggcttctggctcagagctaggaaaaaagctgaaggcaactatggatgctgggaaactggtgagtgatgaaatggtagtggagctcattgagaagaatttggagacccccttgtgcaaaaatggttttcttctggatggcttccctcggactgtgaggcaggcagaaatgctcgatgacctcatggagaagaggaaagagaagcttgattctgtgattgaattcagcatcccagactctctgctgatccgaagaatcacaggaaggctgattcaccccaagagtggccgttcctaccacgaggagttcaaccctccaaaagagcccatgaaagatgacatcaccggggaacccttgatccgtcgatcagatgataatgaaaaggccttgaaaatccgcctgcaagcctaccacactcaaaccaccccactcatagagtactacaggaaacgggggatccactccgccatcgatgcatcccagacccccgatgtcgtgttcgcaagcatcctagcagccttctccaaagccacatcctagtatcagaaggccaggcgagactgcaacactgctcatcaccccgcggcgtgatccctgctcttaggtgctgggcagaggggaagggtggtcagggtgaggatggtgagggagggctggtgaggggctcagaggaatacttggaacaacagcagtgttattgtagtgtggcagtttcttttatacataggtgagagtttttaaagtgtaagggaaaaattaattttttaaaaaacaccatgcttggagggtgggggtagaaatagacacaatattatttctaaggaatcgggttttcatttactctggactggtgaaaatattttttaaagccagtgctctaagacctcagcttttatctcagaaccccatgggttccagaccaagagtacaggaaatcaaattgttgtcctgtctgtctatagcttggaacagggagctttgattactgactccggttccacacactgtaagatcaaaaaaccatctccacatttgaaagagatgtaaggtgtattcatagggatggtggctcaacaaatcaagcaaactggaatcaaggggagggggaagggaatgaaatggaaagggaggctgattcccttcccctgacttaccactaatttactaggctacctactttcatgagtaacctctcacagctacccagcacatgccacaatcctatgctcttgccttcttttatctgcactgtgtgaagggactcttttaaataaatgagcaagtgtcctaagctatgtcatccaaagattgtcctttccattctcaaatcctgtgactgggatcactcaacagcactgtgatgtattattttcaatgaggtgcctttcttaactgaccaaatgctgccttgtttggcccctaaatcaataaaatatgttaaaatttgtatcccctgttgtggcattttttttagataatctaagctagaaaaatgacattgaattctggacctggctggaaggaaaagaagccctttcttgtcgctggcagctgtgtggtagggaggtccaagtatgtgcatatgagataagcctgcaacctcttgaccttcagctcctatgcaggcttctcttgagcccagagacaaggcagcttggtctagtggagatagcactgtgcttggagttcaggggacctaggacaaatcccagccagttagttattcactgtgctcctgtttcctcagctgaaaaaggaagttggttatgccaccttcttggccttaatggcattaaatgaaatttataggaagaaggtttttgctcagtacctggcatgcaacagacattggataaatgttagttggatccagatatacacagaaagatatctgcttcctgccaggctggataactgttgaatggacacttgtccatagtctagaaagccagtgcttctaatccttaagccagatctttgactaccttttcagttgcttctttaacactctttgttgcttctctgtgtgtcctagtttaaattcatttcctctccagcaaaagtgagcttaaataatttctccaaactaaagctctcatgtttttggaagggctgcctttgcaagtgaggtttctgagaaatgactgttgttcccaaaacaagagggagctgggctggaagcaccactattcttctttaggcatcttgttacagagagaggcagggtcttcactgacatattaaatcctgttccctgaaccagcccctccctcttctgctccacttcctcacctgtgcagagtcattttcaggtgttagccttactgatttgcactgatctgtttgttccctgagctttttaaataccctgtgaaaattttctttcctcccttggtcatcatgcatctaattgtggggaaatgtttgtcaaaccaacctgcaaagcagcatggtgtagttgagaagaataaacagagaagactgggtgagctattgtttgtttgcttctttgggcctgggtttcctcatctaatctgcaaaccaagaatgcagactagtcctaccactcccggaagactgacgttgtgccaggtattatgcaaaggcttcatgtaaccctcgacttcacgtaaccctcacacagcaccctgtggagtcagaactgtccttcacttttataggtgaggaaaccagactcagagaggtgaagtggcattcctgaggtcatgcataagaggcagtcaggactgaaacacagtctctaacacttatccgtccccttgatcttgttgctgaagtgatttaattacttgcgtagctctgcacacaggaagggctgctctgaataagagctcttttccatggacactcagcgctgccggaactgattttgaagaagtcactgccggctctgagggcctagggtatgtgtcttaggatctcctgtgtgcacaaagtgtcactgacagaacacagcaggatggagagcagcctcctcagaagcctcacaagtctttcctcagatgaagacagagcaacgagtcagaagacagatttcaacagcgacttcaccatgcgaccttggacaagttatctcacctcatcagtagaataggaatgatccctacccctcaaaggtgctgatgacactagtgaccaagatactcatgtgggttggactgcccaggacacagcagatgcttagtaaacacagatggaattcagagggaaaatgtaggcattgaagaaagttgtcttactgaccatccggaaccaggctaaggatcccctagaaatcatagacctctgaaattatatgcagaattctttatgtgttttcataattaataatagtctaacatattaaattcttagctgtgtgaga

SEQ ID NO: 1271 - DNA, 647 bp, Homo sapiens
  source 1..647: mol_type = unassigned DNA
ggcgtgcgaactggtggcagtgagagacttcggcggacatggctcccagcgtgccagcggcagaacccgagtatcctaaaggcatccgggccgtgctgctggggcctcccggggccggtaaagggacccaggcacccagattggctgaaaacttctgtgtctgccatttagctactggggacatgctgagggccatggtggcttctggctcagagctaggaaaaaagctgaaggcaactatggatgctgggaaactggtgagtgatgaaatggtagtggagctcattgagaagaatttggagacccccttgtgcaaaaatggttttcttctggatggcttccctcggactgtgaggcaggcagaaatgctcgatgacctcatggagaagaggaaagagaagcttgattctgtgattgaattcagcatcccagactctctgctgatccgaagaatcacaggaaggctgattcaccccaagagtggccgttcctaccacgaggagttcaaccctccaaaagagcccatgaaagatgacatcaccggggaacccttgatccgtcgatcagtgataggacaggcaaagagaagcttcctcaggctagcaaaaatatcatttgatgtattgattaaaaaagcacttgcttga

SEQ ID NO: 1272 - DNA, 1536 bp, Homo sapiens
  source 1..1536: mol_type = unassigned DNA
acacactcttttacgttatttataaaagagtctcactcaatggaagctggatttcctctcctgtaaaatgagaaattggcgtgttagccaaggctttcattgaccaagggaaactcatcccagatgatgtcatgactcggctggcccttcatgagctgaaaaatctcacccagtatagctggctgttggatggttttccaaggacacttccacaggcagaagccctagatagagcttatcagatcgacacagtgattaacctgaatgtgccctttgaggtcattaaacaacgccttactgctcgctggattcatcccgccagtggccgagtctataacattgaattcaaccctcccaaaactgtgggcattgatgacctgactggggagcctctcattcagcgtgaggatgataaaccagagacggttatcaagagactaaaggcttatgaagaccaaacaaagccagtcctggaatattaccagaaaaaaggggtgctggaaacattctccggaacagaaaccaacaagatttggccctatgtatatgctttcctacaaactaaagttccacaaagaagccagaaagcttcagttactccatgaggagaaatgtgtgtaactattaatagtaagatgggcaaacctcctagtccttgcatttagaagctgcttttcctaagacttctagtatgtatgaattctttgaaaattatattacttttatttctactgattttattttggatactaaggatgtgccaaatgattcggatactaagatgcatcgtttgaaatcatctagtgtgttgtatgcagttatcctcaaaaacatcagcgatgtctgaacctttaaaacatctgttagagcaaaattaaaagagcatttggtagtaatctaactttttgttcagttaataagtggttgataaagtttccatatttttctggaaaagttaaaaaaagttacatgtcatttggagaaaatacgtaatcagaaatttgtgcatagattgatgccaaaaaagacatttccagcattgtggaacatggtgagacactatataaaattccagaaagaaagcaactggatttacagatttattgtgagacacaaattcactgctgcctttacactaagaaatgtatatgttaaccatatatgctgtatttattttgtcgttaagcatactttcagtttactcagaattttcaatttgctataaagatgtatcaattagcatatagaaaaatattactttaagatgacttgtttcctttgaaaatacctgtgtactgagggttatgatttgtgtcaaaaattgacataagtgcttttacaagcaccaaagttgaatgaattttcaacaaaatgtaattaaagtctatgttttcagttatgactcaggttaagaaatgtgttttaggatctacttgctggtttttctttttgatccaaatgtgtgatctgccctgataaataacaagttatagtaccatctcccccgccaataaaaaagagaagaaaaaagagaaa

SEQ ID NO: 1273 - DNA, 2736 bp, Homo sapiens
  source 1..2736: mol_type = unassigned DNA
gtcgggggcggggggtgcgccggggtagccgagaggcggacgcaacagcggggtcccgcgctgtctgggcggccccaggggctgtcggctcacttccgggaacgccggggaaccgcagtagccgcctgctagtggcgctgctagccggccggcgcaggctgccgagcgggtgagcgcgcaggccaggccaaagccctggtacccgcgcggtgcgggcctcagtctgcggccatgggggcgtccgcgcggctgctgcgagcggtgatcatgggggccccgggctcgggcaagggcaccgtgtcgtcgcgcatcactacacacttcgagctgaagcacctctccagcggggacctgctccgggacaacatgctgcggggcacagaaattggcgtgttagccaaggctttcattgaccaagggaaactcatcccagatgatgtcatgactcggctggcccttcatgagctgaaaaatctcacccagtatagctggctgttggatggttttccaaggacacttccacaggcagaagccctagatagagcttatcagatcgacacagtgattaacctgaatgtgccctttgaggtcattaaacaacgccttactgctcgctggattcatcccgccagtggccgagtctataacattgaattcaaccctcccaaaactgtgggcattgatgacctgactggggagcctctcattcagcgtgaggatgataaaccagagacggttatcaagagactaaaggcttatgaagaccaaacaaagccagtcctggaatattaccagaaaaaaggggtgctggaaacattctccggaacagaaaccaacaagatttggccctatgtatatgctttcctacaaactaaagttccacaaagaagccagaaagcttcagttactccatgaggagaaatgtgtgtaactattaatagtaagatgggcaaacctcctagtccttgcatttagaagctgcttttcctaagacttctagtatgtatgaattctttgaaaattatattacttttatttctactgattttattttggatactaaggatgtgccaaatgattcggatactaagatgcatcgtttgaaatcatctagtgtgttgtatgcagttatcctcaaaaacatcagcgatgtctgaacctttaaaacatctgttagagcaaaattaaaagagcatttggtagtaatctaactttttgttcagttaataagtggttgataaagtttccatatttttctggaaaagttaaaaaaagttacatgtcatttggagaaaatacgtaatcagaaatttgtgcatagattgatgccaaaaaagacatttccagcattgtggaacatggtgagacactatataaaattccagaaagaaagcaactggatttacagatttattgtgagacacaaattcactgctgcctttacactaagaaatgtatatgttaaccatatatgctgtatttattttgtcgttaagcatactttcagtttactcagaattttcaatttgctataaagatgtatcaattagcatatagaaaaatattactttaagatgacttgtttcctttgaaaatacctgtgtactgagggttatgatttgtgtcaaaaattgacataagtgcttttacaagcaccaaagttgaatgaattttcaacaaaatgtaattaaagtctatgttttcagttatgactcaggttaagaaatgtgttttaggatctacttgctggtttttctttttgatccaaatgtgtgatctgccctgataaataacaagttatagtaccatctcccccgccaataaaaaagagaagaaaaaagagaaacccgtggcactatgtaaataaagtaagcatactttgttgttagtaaatagatgaggcatgcctgggaaatgctcccttggcataaatagcaatcaatcataattagtaaacaggtgtaccaataaaaagaatttacatgataggttaacaaggaccaggaaagtgagtttcctgaaggagttctttgttcctgatcaaagaaattgatacctgttagcattcactgccaccatattttaaggagaaagaactctattggtgtcgtctgagcagccatttaaaaattggaatctaaaggatggttgctgatgtactgtgtggtctggtagaagtggggaaatatgagagatggaggaaaaacttgattatgtcttccatggcatatttactcttactttacttcgtgccaaatcaaatgaaacaagccgtcttacaagtcgttattgcctttaaaaatctgttccgtttttttcccaggtacttaaaatacaagtgccagtaagtggttcttatgtgttttggggggaaaattttatttcccttttcttctgatatttaaaaaattcatcgatctttcaagatgaaccaaggttttttaaaagaaatataggaaacacttcattctttataaaactttctataatgccttatttgaatgttaatcttatgtgctttctaaaaaatgttgtgaaataccaaacttatggattatcactaggttatcaagcatatattagtctttatcagaataaaatgaaatttcataactgtggctattactttgttcttggtccttcacagggcctgctccatcccaccttcctttctgctgcctgatgtctcaatggcttctgaatgactgttctaataaatgatcttaaaacagtcca

SEQ ID NO: 1274 - DNA, 1171 bp, Homo sapiens
  source 1..1171: mol_type = unassigned DNA
acttccgggaacgccggggaaccgcagtagccgcctgctagtggcgctgctagccggccggcgcaggctgccgagcgggtgagcgcgcaggccaggccaaagccctggtacccgcgcggtgcgggcctcagtctgcggccatgggggcgtccgcgcggctgctgcgagcggtgatcatgggggccccgggctcgggcaagggcaccgtgtcgtcgcgcatcactacacacttcgagctgaagcacctctccagcggggacctgctccgggacaacatgctgcggggcacaggttttccaaggacacttccacaggcagaagccctagatagagcttatcagatcgacacagtgattaacctgaatgtgccctttgaggtcattaaacaacgccttactgctcgctggattcatcccgccagtggccgagtctataacattgaattcaaccctcccaaaactgtgggcattgatgacctgactggggagcctctcattcagcgtgaggatgataaaccagagacggttatcaagagactaaaggcttatgaagaccaaacaaagccagtcctggaatattaccagaaaaaaggggtgctggaaacattctccggaacagaaaccaacaagatttggccctatgtatatgctttcctacaaactaaagttccacaaagaagccagaaagcttcagttactccatgaggagaaatgtgtgtaactattaatagtaagatgggcaaacctcctagtccttgcatttagaagctgcttttcctaagacttctagtatgtatgaattctttgaaaattatattacttttatttctactgattttattttggatactaaggatgtgccaaatgattcggatactaagatgcatcgtttgaaatcatctagtgtgttgtatgcagttatcctcaaaaacatcagcgatgtctgaacctttaaaacatctgttagagcaaaattaaaagagcatttggtagtaatctaactttttgttcagttaataagtggttgataaagtttccatatttttctggaaaagttaaaaaaagttacatgtcatttggagaaaatacgtaatcagaaatttgtgcatagattgatgccaaaaaagacatttccagcattgtggaacatggtgagacactatataaaattc

SEQ ID NO: 1275 - DNA, 2353 bp, Homo sapiens
  source 1..2353: mol_type = unassigned DNA
tattttatgcaattgcacagccacctcatcatttagcaacctccatcctgatcagtcagcagccatcagccatggaggcaagaccctccatcagcaaaaagattaagactctctgaaggctcagatgatcattaacattttttagcaataaaactattttaaattaaggtaggtacattgttattttagacataatgctattgcacttaatagactacaatgtaatgtaaatatataacttttatatgcaccgagaaaccaaaaaatttgtgtgactcacatattcactttattgtggtagtctggaaccaaacccacaatatctccagggtaggcctgtatgtgtctttttgactataaccatgttcgtgaatgtgaagtagtatctccttgtggttttcatttgacttccctaatgattaaggacgttgatcatgtgttcatgggcttattggccatttgtatatcgttgaagaaatgtgtattcagatcctatgcccgtttaacatttttttaaaattgagttgtaagagttctttagatattctagatacaaattccttaccagctacatgatttgcaaaatttttcttccatcccatgctatgcattgtcttttcacttcttttcttttcgtttcttttttaagagatggggtttcaccatgttggccaggctggtctcgaactcctgacctcaggtgatctgcccacctcagcctcccaaagtgctggggttacaggtatgaaccactgttcccggccataacctttgtttttatcagaaaagttgatgatgcacattttcagatgagtatgccattcagacttcccctttaggcaactcgttccgaggtgcctggaatgggataaaacaaatgcacttactgatttttttccccgctttgctgtagaaattggcgtgttagccaaggctttcattgaccaagggaaactcatcccagatgatgtcatgactcggctggcccttcatgagctgaaaaatctcacccagtatagctggctgttggatggttttccaaggacacttccacaggcagaagccctagatagagcttatcagatcgacacagtgattaacctgaatgtgccctttgaggtcattaaacaacgccttactgctcgctggattcatcccgccagtggccgagtctataacattgaattcaaccctcccaaaactgtgggcattgatgacctgactggggagcctctcattcagcgtgaggatgataaaccagagacggttatcaagagactaaaggcttatgaagaccaaacaaagccagtcctggaatattaccagaaaaaaggggtgctggaaacattctccggaacagaaaccaacaagatttggccctatgtatatgctttcctacaaactaaagttccacaaagaagccagaaagcttcagttactccatgaggagaaatgtgtgtaactattaatagtaagatgggcaaacctcctagtccttgcatttagaagctgcttttcctaagacttctagtatgtatgaattctttgaaaattatattacttttatttctactgattttattttggatactaaggatgtgccaaatgattcggatactaagatgcatcgtttgaaatcatctagtgtgttgtatgcagttatcctcaaaaacatcagcgatgtctgaacctttaaaacatctgttagagcaaaattaaaagagcatttggtagtaatctaactttttgttcagttaataagtggttgataaagtttccatatttttctggaaaagttaaaaaaagttacatgtcatttggagaaaatacgtaatcagaaatttgtgcatagattgatgccaaaaaagacatttccagcattgtggaacatggtgagacactatataaaattccagaaagaaagcaactggatttacagatttattgtgagacacaaattcactgctgcctttacactaagaaatgtatatgttaaccatatatgctgtatttattttgtcgttaagcatactttcagtttactcagaattttcaatttgctataaagatgtatcaattagcatatagaaaaatattactttaagatgacttgtttcctttgaaaatacctgtgtactgagggttatgatttgtgtcaaaaattgacataagtgcttttacaagcaccaaagttgaatgaattttcaacaaaatgtaattaaagtctatgttttcagttatgactcaggttaagaaatgtgttttaggatctacttgctggtttttctttttgatccaaatgtgtgatctgccctgataaataacaagttatagtaccatctcccccgccaat

SEQ ID NO: 1276 - DNA, 3929 bp, Homo sapiens
  source 1..3929: mol_type = unassigned DNA
agtcttccagcagggttctgaaagcagcctgctcccatcgcgcccctcggatgtggacacccagggtgggctgcagaccgcggccgggccgcactctctgggggcgagggccaggtcaggtggctgcactgtcgcccagcagcgagtaaagactcgaaactgagggagccagagccctagtcactctgctggtcgagggtcggaacccctgggggaaagaggaaatgtggacgaaggcagcccttcctggagacagcttggaagagagggatgaagatgcaaaaagcaaaacccaacctatcaagtgccacctccccggtgacaggcccccagccttgctctgcgctttcgctgaatgaactcctgagcacgtttttcccgttgcctaggaagggttgggccgcaggtttcgccagtgctcgacaacccacctggagatagcgggtcggggagggagctgcgaggggggcggactcctgttgctcagtcttcagaccgcagcacagcatcatctgcaccgggacccgggaatggggggacacttggagactgagagagaggaggctcgaggaatgaaccttggtctgttctaagccacaacccctgtctcaggtcgtttggcttcctttccttctctttgtatttgaatttaaaaacattcctgaatctcaagtgcttttgcttgaagtaggggggaggaggagaaaagaatagaagcaagccaggcttcctaagcgagctctgaaaggagaaatccattcactgcaaacctcgttccccatttctgaaaacggatagactgatatcgtaaactaaaggtcatgagggtttttccccccggtttgggggatttgttctgttaaaaggaattttaaagcaccacttgagaaaataattttgcctcagtttccctaaactatctttaaaatgggttgccataattacaggtcttcttttctctcacctctataagccaccgttttcaggtcatctgaagtcaagatttccagccttttgaatggactgatgtgttctaagcccgaagatccagtagaatacttggaaagttgtttacaaaaagtaaaggaactgggtggctgtgacaaggtgaaatgggatacatttgtaagccaggaaaagaagaccttacctccactaaatggaggacagtcacggagatcctttctaagaaatgtaatgcctgaaaactcaaactttccatatcggcggtatgaccggctccctccaatccatcaattctccatagaaagtgacacggatctctctgagactgcagagttgattgaggagtatgaggtttttgatcctaccagacctcgaccaaaaatcattcttgttataggtggtccaggaagtggaaagggtactcagagtttgaaaattgcagaacgatatggattccaatacatttctgtgggagaattattaagaaagaagatccacagtaccagcagcaataggaaatggagtcttattgccaagataattacaactggagaattggccccacaggaaacaacaattacagagataaagcaaaaattgatgcaaatacctgatgaagagggcattgttattgatggatttccaagagatgttgcccaggctctatcttttgaggaccaaatctgtacccccgatttggtggtattcctggcttgtgctaatcagagactcaaagaaagattactgaagcgtgcagaacagcagggccgaccagacgacaatgtaaaagctacccaaaggagactaatgaacttcaagcagaatgctgctccattggttaaatacttccaggaaaaggggctcatcatgacatttgatgccgaccgcgatgaggatgaggtgttctatgacatcagcatggcagttgacaacaagttatttccaaacaaagaggctgcagcaggttcaagtgaccttgatccttcgatgatattggacactggagagatcattgatacaggatctgattatgaagatcagggtgatgaccagttaaatgtatttggagaggacactatgggaggtttcatggaagatttgagaaagtgtaaaattattttcataattggtggtcctggctctggcaaaggcacacagtgtgaaaagctggtggaaaaatatggatttacacatctctcaactggcgagctcctgcgtgaggaactggcatcagaatctgaaagaagcaaattgatcagagacattatggaacgtggagacctggtgccctcaggcatcgttttggagctcctgaaggaggccatggtggccagcctcggggacaccaggggcttcctgattgacggctatcctcgggaggtgaagcaaggggaagagttcggacgcaggattggagacccacagttggtgatctgtatggactgctcggcagacaccatgaccaaccgccttctccaaaggagccggagcagcctgcctgtggacgacaccaccaagaccatcgccaagcgcctagaagcctactaccgagcgtccatccccgtgatcgcctactacgagacaaaaacacagctacacaagataaatgcagagggaacaccagaggacgtttttcttcaactctgcacagctattgactctattttctgaaggcaaaaatgcatgtttgttagaatggaaacagaaaaacattaaaaagttcattccttaacacaatgtttcaagttaaaccttttgtgtcaccgcccccaccaaccaccacctcctaaatcctgacagcactgtttgcttcccagctagacctgtgtgagaggtgtctggaaatcatgcatggtgtatttgggactatatcaacctattctccacacttcagacaactgtctgcactcacggcacacacactttgtatcatgcaggccacactcagagctagtcagtacatgaacagtggtgcggtgccagtctgtgtccgttgtgatcacaggccttgctagaccctgatcatctggttctcctctcattaagcatccctaacccccagtcacaccttcctcttacatactgttccccaatggaggcccctggcataggggacagccctgggcatcttcctttggtgtctggctgttttgtcaactctcatccactggtggctcagagccataaggtgggttgattacacaatgccttgtacatgatatagaggcatcaagcaagtaaaatttgacagaaattttaaaatatgaagatgtatagctttcccaagatgatggtaaaacccaggttagtcatcagtaaccttctctattattattattttttagaaacttggaatactgtcgtcatggctaagagaacaaatctgataaattgtgtaacctagtctcttctctacatggtgatgcatttcagcaattataaattaatataaatgaccaaaagtaacttaaaagcatgagatatttgctatttcattcattgggcacatatcaaattataattttgattttaaatggtcacccatgtatttatttgttgccaagcaagtaaaaaaataccctaacaaacctgatgtgggtgggaggggcatgtcagtaagtggtgtgttcaatgtgtttgtttcatatgggccctttccaggagtttgcaaaccttgtcatacccatatgcaaaactgtgtttccttgcattaaaccagtgaagtttgggttctcttttgtgctatcaatcagttgtaaaatcagagctgcttatatattctactggaataactgcatcttccactcagtcactacaaaaaagcatagtttcagtttgcatgaatttttttttttttcttcaatggctgtgcagataaggatccatttctgggatagaattgtattttttaagtcatttttttttcttgaaatggatatgtacaaataaaataaatggaagac

SEQ ID NO: 1277 - DNA, 3248 bp, Homo sapiens
  source 1..3248: mol_type = unassigned DNA
gcggcacagctgctcggcgcctgcagctccggctcgggggctggaaccgaagcgggggcggcgggagcgcggagaccacagcccccggggagaggcggagggggtccctggcctgggcggagaggctgagctgagtgcgcgtgagaaagagggctgcaccgctgctcggcgcggactctgccagccccagcttcagccccggctcaggtcgccgcagcccgggagcctccccgcttgcgccccaaggcacgcgcggcacagccatgaacaccaacgatgccaaggagtatctggcccggagggaaatccctcagctttttgagagccttttgaatggactgatgtgttctaagcccgaagatccagtagaatacttggaaagttgtttacaaaaagtaaaggaactgggtggctgtgacaaggtgaaatgggatacatttgtaagccaggaaaagaagaccttacctccactaaatggaggacagtcacggagatcctttctaagaaatgtaatgcctgaaaactcaaactttccatatcggcggtatgaccggctccctccaatccatcaattctccatagaaagtgacacggatctctctgagactgcagagttgattgaggagtatgaggtttttgatcctaccagacctcgaccaaaaatcattcttgttataggtggtccaggaagtggaaagggtactcagagtttgaaaattgcagaacgatatggattccaatacatttctgtgggagaattattaagaaagaagatccacagtaccagcagcaataggaaatggagtcttattgccaagataattacaactggagaattggccccacaggaaacaacaattacagagataaagcaaaaattgatgcaaatacctgatgaagagggcattgttattgatggatttccaagagatgttgcccaggctctatcttttgaggaccaaatctgtacccccgatttggtggtattcctggcttgtgctaatcagagactcaaagaaagattactgaagcgtgcagaacagcagggccgaccagacgacaatgtaaaagctacccaaaggagactaatgaacttcaagcagaatgctgctccattggttaaatacttccaggaaaaggggctcatcatgacatttgatgccgaccgcgatgaggatgaggtgttctatgacatcagcatggcagttgacaacaagttatttccaaacaaagaggctgcagcaggttcaagtgaccttgatccttcgatgatattggacactggagagatcattgatacaggatctgattatgaagatcagggtgatgaccagttaaatgtatttggagaggacactatgggaggtttcatggaagatttgagaaagtgtaaaattattttcataattggtggtcctggctctggcaaaggcacacagtgtgaaaagctggtggaaaaatatggatttacacatctctcaactggcgagctcctgcgtgaggaactggcatcagaatctgaaagaagcaaattgatcagagacattatggaacgtggagacctggtgccctcaggcatcgttttggagctcctgaaggaggccatggtggccagcctcggggacaccaggggcttcctgattgacggctatcctcgggaggtgaagcaaggggaagagttcggacgcaggattggagacccacagttggtgatctgtatggactgctcggcagacaccatgaccaaccgccttctccaaaggagccggagcagcctgcctgtggacgacaccaccaagaccatcgccaagcgcctagaagcctactaccgagcgtccatccccgtgatcgcctactacgagacaaaaacacagctacacaagataaatgcagagggaacaccagaggacgtttttcttcaactctgcacagctattgactctattttctgaaggcaaaaatgcatgtttgttagaatggaaacagaaaaacattaaaaagttcattccttaacacaatgtttcaagttaaaccttttgtgtcaccgcccccaccaaccaccacctcctaaatcctgacagcactgtttgcttcccagctagacctgtgtgagaggtgtctggaaatcatgcatggtgtatttgggactatatcaacctattctccacacttcagacaactgtctgcactcacggcacacacactttgtatcatgcaggccacactcagagctagtcagtacatgaacagtggtgcggtgccagtctgtgtccgttgtgatcacaggccttgctagaccctgatcatctggttctcctctcattaagcatccctaacccccagtcacaccttcctcttacatactgttccccaatggaggcccctggcataggggacagccctgggcatcttcctttggtgtctggctgttttgtcaactctcatccactggtggctcagagccataaggtgggttgattacacaatgccttgtacatgatatagaggcatcaagcaagtaaaatttgacagaaattttaaaatatgaagatgtatagctttcccaagatgatggtaaaacccaggttagtcatcagtaaccttctctattattattattttttagaaacttggaatactgtcgtcatggctaagagaacaaatctgataaattgtgtaacctagtctcttctctacatggtgatgcatttcagcaattataaattaatataaatgaccaaaagtaacttaaaagcatgagatatttgctatttcattcattgggcacatatcaaattataattttgattttaaatggtcacccatgtatttatttgttgccaagcaagtaaaaaaataccctaacaaacctgatgtgggtgggaggggcatgtcagtaagtggtgtgttcaatgtgtttgtttcatatgggccctttccaggagtttgcaaaccttgtcatacccatatgcaaaactgtgtttccttgcattaaaccagtgaagtttgggttctcttttgtgctatcaatcagttgtaaaatcagagctgcttatatattctactggaataactgcatcttccactcagtcactacaaaaaagcatagtttcagtttgcatgaatttttttttttttcttcaatggctgtgcagataaggatccatttctgggatagaattgtattttttaagtcatttttttttcttgaaatggatatgtacaaataaaataaatggaagacagga

SEQ ID NO: 1278 - DNA, 653 bp, Homo sapiens
  source 1..653: mol_type = unassigned DNA
tgttgctcagtcttcagaccgcagcacagcatcatctgcaccgggacccgggaatggggggacacttggagactgagagagaggaggctcgaggaatgaaccttgagccttttgaatggactgatgtgttctaagcccgaagatccagtagaatacttggaaagttgtttacaaaaagtaaaggaactgggtggctgtgacaaggtgaaatgggatacatttgtaagccaggaaaagaagaccttacctccactaaatggaggacagtcacggagatcctttctaagaaatgtaatgcctgaaaactcaaactttccatatcggcggtatgaccggctccctccaatccatcaattctccatagaaagtgacacggatctctctgagactgcagagttgattgaggagtatgaggtttttgatcctaccagacctcgaccaaaaatcattcttgttataggtggtccaggaagtggaaagggtactcagagtttgaaaattgcagaacgatatggattccaatacatttctgtgggagaattattaagaaagaagatccacagtaccagcagcaataggaaatggagtcttattgccaagataattacaactggagaattggccccacaggaaacaacaattacagagataaa

SEQ ID NO: 1279 - DNA, 1993 bp, Homo sapiens
  source 1..1993: mol_type = unassigned DNA
tttccgcttccgctcttccctggtccagtccaccctggcggggtcgcagggttgggatggcggctggaggcgatcatggttcgcccgacagctaccgctcacctcttgcctcccgctatgccagcccggagatgtgcttcgtgtttagcgacaggtataaattccggacatggcggcagctgtggctgtggctggcggaggccgagcagacattgggtttgcctatcacagatgaacaaatccaggagatgaaatcaaacctggagaacatcgacttcaagatggcagctgaggaagagaaacgtttacgacatgatgtgatggctcacgtgcacacatttggccactgctgtccaaaagctgcaggcattattcaccttggtgctacttcttgctatgttggagacaatactgacttgattattcttagaaatgcacttgacctgcttttgccaaagcttgccagagtgatctctcggcttgccgactttgctaaggaacgagccagtctacccacattaggtttcacacatttccagcctgcacagctgaccacagttgggaaacgttgctgtctttggattcaggatctttgcatggatctccagaacttgaagcgtgtccgagatgacctgcgcttccggggagtaaagggtaccactggcactcaggccagtttcctgcagctctttgagggagatgaccataaggtagagcagcttgacaagatggtgacagaaaaggcaggatttaagagagctttcatcatcacagggcagacatatacacgaaaagtggatattgaagtactgtctgtgctggctagcttgggggcatcagtgcacaagatttgcaccgacatacgcctcctggcaaacctcaaggagatggaggaaccctttgaaaaacagcagattggctcaagtgcgatgccatataagcggaatcccatgcgttcagaacgttgctgcagtcttgcccgccacctgatgacccttgtcatggacccgctacagacagcatctgtccagtggtttgaacgcacactggatgatagtgccaaccgacggatctgtttggccgaggcatttcttaccgcagatactatattgaatacgctgcagaacatttctgaaggattggtcgtgtaccccaaagtaattgaacggcgcattcggcaagagctgcctttcatggccacagagaacatcatcatggccatggtcaaagctggaggtagccgccaggattgccatgagaaaatcagagtgctttctcagcaggcagcttctgtggttaagcaggaagggggtgacaatgacctcatagagcgtatccaggttgatgcctacttcagtcccattcactcccagttggatcatttactggatccttcttctttcactggtcgtgcctcccagcaggtgcagagattcttagaagaggaggtgtatcccctgttaaaaccatatgaaagcgtgatgaaggtgaaagcagaattatgtctgtagagttggaagagaattaaacgaaaatcattgttaattgctgaggcatgaaaattgtgttactataatgccttattttacctcgagaattgttaccttaaattagtacagcactttcttcttcccatggtgctttcctgtttctcagtctcacatttctcaacaaggcaaaaacaaagagcgttgaagttgactctgctcttgcatagtaaatgtagttcatacttgatctctgttctttcaaggcatattttccagctgcctcaagtttagtccttttcacgtgttcatttgcttgtaaagtagcaagaaatttctggtcctgtcttctaaaagtgaatttgatctaggtctagcaaaataacctggactcagtgattgagtcaatggtcagataccttttatttcggttatttttggctagtataagtgatgaagtttggaactacagtaaatacttaaaaaaaaaaaaaaaaagaaccaaa

SEQ ID NO: 1280 - DNA, 1779 bp, Homo sapiens
  source 1..1779: mol_type = unassigned DNA
ccaccctggcggggtcgcagggttgggatggcggctggaggcgatcatggttcgcccgacagctaccgctcacctcttgcctcccgctatgccagcccggagatgtgcttcgtgtttagcgacaggtataaattccggacatggcggcagctgtggctgtggctggcggaggccgagcagacattgggtttgcctatcacagatgaacaaatccaggagatgaaatcaaacctggagaacatcgacttcaagatggcagctgaggaagagaaacgtttacgacatgatgtgatggctcacgtgcacacatttggccactgctgtccaaaagctgcaggcattattcaccttggtgctacttcttgctatgttggagacaatactgacttgattattcttagaaatgcacttgacctgcttttgccaaagcttgccagagtgatctctcggcttgccgactttgctaaggaacgagccagtctacccacattaggtttcacacatttccagcctgcacagctgaccacagttgggaaacgttgctgtctttggattcaggatctttgcatggatctccagaacttgaagcgtgtccgagatgacctgcgcttccggggagtaaagggtaccactggcactcaggccagtttcctgcagctctttgagggagatgaccataaggtagagcagcttgacaagatggtgacagaaaaggcaggatttaagagagctttcatcatcacagggcagacatatacacgaaaagtggatattgaagtactgtctgtgctggctagcttgggggcatcagtgcacaagatttgcaccgacatacgcctcctggcaaacctcaaggagatggaggaaccctttgaaaaacagcagattggctcaagtgcgatgccatataagcggaatcccatgcgttcagaacgttgctgcagtcttgcccgccacctgatgacccttgtcatggacccgctacagacagcatctgtccagtggtttgaacgcacactggatgatagtgccaaccgacggatctgtttggccgaggcatttcttaccgcagatactatattgaatacgctgcagaacatttctgaaggattggtcgtgtaccccaaagtaattgaacggcgcattcggcaagagctgcctttcatggccacagagaacatcatcatggccatggtcaaagctggaggtagccgccaggtgcagagattcttagaagaggaggtgtatcccctgttaaaaccatatgaaagcgtgatgaaggtgaaagcagaattatgtctgtagagttggaagagaattaaacgaaaatcattgttaattgctgaggcatgaaaattgtgttactataatgccttattttacctcgagaattgttaccttaaattagtacagcactttcttcttcccatggtgctttcctgtttctcagtctcacatttctcaacaaggcaaaaacaaagagcgttgaagttgactctgctcttgcatagtaaatgtagttcatacttgatctctgttctttcaaggcatattttccagctgcctcaagtttagtccttttcacgtgttcatttgcttgtaaagtagcaagaaatttctggtcctgtcttctaaaagtgaatttgatctaggtctagcaaaataacctggactcagtgattgagtcaatggtcagataccttttatttcggttatttttggctagtataagtgatgaagtttggaactacagtaaatacttaaaaaaaaaaaaaaaaa

SEQ ID NO: 1281 - DNA, 1620 bp, Homo sapiens
  source 1..1620: mol_type = unassigned DNA
cagtccaccctggcggggtcgcagggttgggatggcggctggaggcgatcatggttcgcccgacagctaccgctcacctcttgcctcccgctatgccagcccggagatgtgcttcgtgtttagcgacaggtataaattccggacatggcggcagctgtggctgtggctggcggaggccgagcagacattgggtttgcctatcacagatgaacaaatccaggagatgaaatcaaacctggagaacatcgacttcaagatggcagctgaggaagagaaacgtttacgacatgatgtgatggctcacgtgcacacatttggccactgctgtccaaaagctgcaggcattattcaccttggtgctacttcttgctatgttggagacaatactagtctcattctgtcaaggggcgtgatcaaggcttattgcaacctccgcctcccaggctcagacagctctcctgtctcagtctcccaacttgccagagtgatctctcggcttgccgactttgctaaggaacgagccagtctacccacattaggtttcacacatttccagcctgcacagctgaccacagttgggaaacgttgctgtctttggattcaggatctttgcatggatctccagaacttgaagcgtgtccgagatgacctgcgcttccggggagtaaagggtaccactggcactcaggccagtttcctgcagctctttgagggagatgaccataaggtagagcagcttgacaagatggtgacagaaaaggcaggatttaagagagctttcatcatcacagggcagacatatacacgaaaagtggatattgaagtactgtctgtgctggctagcttgggggcatcagtgcacaagatttgcaccgacatacgcctcctggcaaacctcaaggagatggaggaaccctttgaaaaacagcagattggctcaagtgcgatgccatataagcggaatcccatgcgttcagaacgttgctgcagtcttgcccgccacctgatgacccttgtcatggacccgctacagacagcatctgtccagtggtttgaacgcacactggatgatagtgccaaccgacggatctgtttggccgaggcatttcttaccgcagatactatattgaatacgctgcagaacatttctgaaggattggtcgtgtaccccaaagtaattgaacggcgcattcggcaagagctgcctttcatggccacagagaacatcatcatggccatggtcaaagctggaggtagccgccaggattgccatgagaaaatcagagtgctttctcagcaggcagcttctgtggttaagcaggaagggggtgacaatgacctcatagagcgtatccaggttgatgcctacttcagtcccattcactcccagttggatcatttactggatccttcttctttcactggtcgtgcctcccagcaggtgcagagattcttagaagaggaggtgtatcccctgttaaaaccatatgaaagcgtgatgaaggtgaaagcagaattatgtctgtagagttggaagagaattaaacgaaaatcattgttaattgctgaggcatgaaaattgtgttactataatgccttattttacctcgagaattgtta

SEQ ID NO: 1282 - DNA, 1325 bp, Homo sapiens
  source 1..1325: mol_type = unassigned DNA
agtccaccctggcggggtcgcagggttgggatggcggctggaggcgatcatggttcgcccgacagctaccgctcacctcttgcctcccgctatgccagcccggagatgtgcttcgtgtttagcgacaggtataaattccggacatggcggcagctgtggctgtggctggcggaggccgagcagacattgggtttgcctatcacagatgaacaaatccaggagatgaaatcaaacctggagaacatcgacttcaagatggcagctgaggaagagaaacgtttacgacatgatgtgatggctcacgtgcacacatttggccagcctgcacagctgaccacagttgggaaacgttgctgtctttggattcaggatctttgcatggatctccagaacttgaagcgtgtccgagatgacctgcgcttccggggagtaaagggtaccactggcactcaggccagtttcctgcagctctttgagggagatgaccataaggtagagcagcttgacaagatggtgacagaaaaggcaggatttaagagagctttcatcatcacagggcagacatatacacgaaaagtggatattgaagtactgtctgtgctggctagcttgggggcatcagtgcacaagatttgcaccgacatacgcctcctggcaaacctcaaggagatggaggaaccctttgaaaaacagcagattggctcaagtgcgatgccatataagcggaatcccatgcgttcagaacgttgctgcagtcttgcccgccacctgatgacccttgtcatggacccgctacagacagcatctgtccagtggtttgaacgcacactggatgatagtgccaaccgacggatctgtttggccgaggcatttcttaccgcagatactatattgaatacgctgcagaacatttctgaaggattggtcgtgtaccccaaagtaattgaacggcgcattcggcaagagctgcctttcatggccacagagaacatcatcatggccatggtcaaagctggaggtagccgccaggattgccatgagaaaatcagagtgctttctcagcaggcagcttctgtggttaagcaggaagggggtgacaatgacctcatagagcgtatccaggttgatgcctacttcagtcccattcactcccagttggatcatttactggatccttcttctttcactggtcgtgcctcccagcaggtgcagagattcttagaagaggaggtgtatcccctgttaaaaccatatgaaagcgtgatgaaggtgaaagcagaattatgtctgtagagttggaagagaattaaacgaaaatcattgtt

SEQ ID NO: 1283 - DNA, 911 bp, Homo sapiens
  source 1..911: mol_type = unassigned DNA
ttccctggtccagtccaccctggcggggtcgcagggttgggatggcggctggaggcgatcatggttcgcccgacagctaccgctcacctcttgcctcccgctatgccagcccggagatgtgcttcgtgtttagcgacaggtataaattccggacatggcggcagctgtggctgtggctggcggaggccgagcagacattgggtttgcctatcacagatgaacaaatccaggagatgaaatcaaacctggagaacatcgacttcaagatggcagctgaggaagagaaacgtttacgacatgatgtgatggctcacgtgcacacatttggccactgctgtccaaaagctgcaggcattattcaccttggtgctacttcttgctatgttggagacaatactgtaggcgcctgtgttgtttatacttaaaactcagtctctagaatctatttgtcaattttatttgatgttgtccagttgaggaagtgacactatagatcttttttttttttttgaggcagagtctccctctgtctcccagactggagtgcagtggcacggctcactgcaagctccgcctcctgggttcacaccattctcctgcctcagcctcccgagtagctgggattacaggtgtgagccactgcccctggcctccaaatgctttctttagtcttaaatgaaacataattaaaggcatctttgtgtaactggcgagtcagatagtgggagaagaacagtcttcttacttggaaaatagaaaccttgttgacttgcacattttccagtcattttttcttaattgagaatttttttaatattggagagacagtcttgctgtgttacacagactgatgttgaactcctggcctaagcagtccacctgcttcagcctcccaaaatcctgagaataca

SEQ ID NO: 1284 - DNA, 2780 bp, Homo sapiens
  source 1..2780: mol_type = unassigned DNA
acgggagtggcgcgccaggccgcggaaggggcgtggcctcggtccggggtggcggccgttgccgccaccagggcctcttcctgcgggcggtgctgccgaggccggcctgcgcggggcagtcatggtacccccttgagcgggctgtggcggagagcggggcggggactggctggagggtggcggcccggcggggcgggggcggggccggcctctggctccttcttcctctgcatgtggctggcggccgcagagcagttcagttcgctcactcctcgccggccgcctctccttcgggctctcctcgcgtcactggagccatggcgttcgccgagacctacccggcggcatcctccctgcccaacggcgattgcggccgccccagggcgcggcccggaggaaaccgggtgacggtggtgctcggtgcgcagtggggcgacgaaggcaaagggaaggtggtggacctgctggcgcaggacgccgacatcgtgtgccgctgccagggaggaaataatgctggccatacagttgttgtggattctgtggaatatgattttcatctcttacccagtggaataattaatccaaatgtcactgcattcattggaaatggtgtggtaattcatctacctggattgtttgaagaagcagagaaaaatgttcaaaaaggaaaaggactagaaggctgggaaaaaaggcttattatatctgacagagctcatattgtatttgattttcatcaagcagctgatggtatccaggaacaacagagacaagaacaagcaggaaaaaatttgggtacaacaaaaaagggcattggcccagtttattcgtccaaagctgctcggagtggactcaggatgtgcgaccttgtttctgactttgatggcttctctgagaggtttaaagttctagctaaccaatacaaatctatataccccactttggaaatagacattgaaggtgaattacaaaaactcaagggttatatggaaaagattaaaccaatggtgagagatggagtttattttctatatgaggccctacatggaccaccaaagaaaatcttggtagaaggtgcaaatgcagcactattagatattgattttgggacttacccttttgtaacctcttcaaattgtactgttggaggtgtttgtactggtttgggtatgccacctcaaaatgttggagaagtgtatggagttgtgaaagcttatacaactagagttggtattggtgcctttcctacagagcaagacaatgaaattggagaattattacaaacaaggggtagagagtttggtgtaactactggaaggaaaagaagatgtggctggttggacctcgttttgctcaaatatgctcatatgatcaatggatttactgcgttggcacttaccaagttggatattttggacatgtttacggaaatcaaagttggagttgcttacaagttagatggtgaaatcatacctcatatcccagcaaaccaagaagtcttaaataaagttgaagttcaatataagactctcccaggatggaacacagacatatcaaatgcaagggcgtttaaagaactacctgttaatgcacaaaactatgttcgatttattgaagatgagcttcaaattccagttaagtggattggtgttggtaaatccagagaatctatgattcaactcttttaatgattgccagtaatgcaagaaacactccttgagagggaggggaaaagactttcttaaatatttcatttatgacctgcaaattcaagaataaagacactgaagtaagtttgaagccctacagttgtttccagtcttttcagatggatgcctactgtggagattaactttggcatattccagtgtcagctttctttagctggaattgccaaatcatttgttgctcctgctgctctcatggtgccacgttttttttttcaatgtttagtaatagtataatccatgttgtttgatatcaaaagtagaattacttttaatgtagtttttcttcattattgtcattgcgtgttcttaagttttacccctattagatggtaagaacaattaatgcagttttgcacaaatatttttacattctgatcattcagttctgtcattgtaatctttgttgttagaaacaaatgatgaaaacataggggttctgtaaacttttgtaatgctatgaattctgtttaaattttgggctgtctattttctgctgaaaccatgcaaaattgagctttggtggggctgggagggggttatgtattcatgggacctttaatttgtacagaacacagaacttatttctgtcagttatttaatacattgaaaatttagtgaaatgttcaaagagaatagatgtttcccaaaacaacaatctttatgttaaaaatagtcattaaaagatctgttgtaatatatggtggatatttttctttaatttcaaacattacctctgaaatgtgtatcttttcttttttatcttaccattaattttaaatctagtggattggttttcaacatcgtgcctgccgatatgcctacagaatcatctgtaagtgtcaaaatgaacccacgttgttagccataattttgattatgcctttatttctcctttcttgaaaaaaaaaaggtgttattttgacaattaggcataacattgttttgtagattatcttttaatgaactattttaaatgttaaattaggtgccacttaaatttattttattacaccatgaatagctgattaaaagaaccaaatatttctagta

SEQ ID NO: 1285 - DNA, 2399 bp, Homo sapiens
  source 1..2399: mol_type = unassigned DNA
atggcgttcgccgagacctacccggcggcatcctccctgcccaacggcgattgcgacgaaggcaaagggaaggtggtggacctgctggcgcaggacgccgacatcgtgtgccgctgccagggaggaaataatgctggccatacagttgttgtggattctgtggaatatgattttcatctcttacccagtggaataattaatccaaatgtcactgcattcattggaaatggtgtggtaattcatctacctggattgtttgaagaagcagagaaaaatgttcaaaaaggaaaaggactagaaggctgggaaaaaaggcttattatatctgacagagctcatattgtatttgattttcatcaagcagctgatggtatccaggaacaacagagacaagaacaagcaggaaaaaatttgggtacaacaaaaaagggcattggcccagtttattcgtccaaagctgctcggagtggactcaggatgtgcgaccttgtttctgactttgatggcttctctgagaggtttaaagttctagctaaccaatacaaatctatataccccactttggaaatagacattgaaggtgaattacaaaaactcaagggttatatggaaaagattaaaccaatggtgagagatggagtttattttctatatgaggccctacatggaccaccaaagaaaatcttggtagaaggtgcaaatgcagcactattagatattgattttgggacttacccttttgtaacctcttcaaattgtactgttggaggtgtttgtactggtttgggtatgccacctcaaaatgttggagaagtgtatggagttgtgaaagcttatacaactagagttggtattggtgcctttcctacagagcaagacaatgaaattggagaattattacaaacaaggggtagagagtttggtgtaactactggaaggaaaagaagatgtggctggttggacctcgttttgctcaaatatgctcatatgatcaatggatttactgcgttggcacttaccaagttggatattttggacatgtttacggaaatcaaagttggagttgcttacaagttagatggtgaaatcatacctcatatcccagcaaaccaagaagtcttaaataaagttgaagttcaatataagactctcccaggatggaacacagacatatcaaatgcaagggcgtttaaagaactacctgttaatgcacaaaactatgttcgatttattgaagatgagcttcaaattccagttaagtggattggtgttggtaaatccagagaatctatgattcaactcttttaatgattgccagtaatgcaagaaacactccttgagagggaggggaaaagactttcttaaatatttcatttatgacctgcaaattcaagaataaagacactgaagtaagtttgaagccctacagttgtttccagtcttttcagatggatgcctactgtggagattaactttggcatattccagtgtcagctttctttagctggaattgccaaatcatttgttgctcctgctgctctcatggtgccacgttttttttttcaatgtttagtaatagtataatccatgttgtttgatatcaaaagtagaattacttttaatgtagtttttcttcattattgtcattgcgtgttcttaagttttacccctattagatggtaagaacaattaatgcagttttgcacaaatatttttacattctgatcattcagttctgtcattgtaatctttgttgttagaaacaaatgatgaaaacataggggttctgtaaacttttgtaatgctatgaattctgtttaaattttgggctgtctattttctgctgaaaccatgcaaaattgagctttggtggggctgggagggggttatgtattcatgggacctttaatttgtacagaacacagaacttatttctgtcagttatttaatacattgaaaatttagtgaaatgttcaaagagaatagatgtttcccaaaacaacaatctttatgttaaaaatagtcattaaaagatctgttgtaatatatggtggatatttttctttaatttcaaacattacctctgaaatgtgtatcttttcttttttatcttaccattaattttaaatctagtggattggttttcaacatcgtgcctgccgatatgcctacagaatcatctgtaagtgtcaaaatgaacccacgttgttagccataattttgattatgcctttatttctcctttcttgaaaaaaaaaaggtgttattttgacaattaggcataacattgttttgtagattatcttttaatgaactattttaaatgttaaattaggtgccacttaaatttattttattacaccatgaatagctgattaaaagaaccaaatatttctagt

SEQ ID NO: 1286 - DNA, 2383 bp, Homo sapiens
  source 1..2383: mol_type = unassigned DNA
cacgccccgcgctccacggcgccctcgccccgcgcgcctctcgtgcccgcctcctgccagtctccgggccgcggccgtctgcagagcgagcgctcagacggagcccccgggcaacttgagtggcgccgatcggcggcggagcctctggcagagccccccgacccggcagcgcggaggggactcgcgtccgtccgcgtcgcgtcaccccaaaccctaagcagcgccgccccatcggcgcggagctccggctggaggcaagagccgcgcgccgggagacacgcaccgtgagcggcagcgccgccggcctccctcctcgccgccccggagggcgaagccgcggctccccagccctttgctgcgccgcgacagcgccggaacacgccccgcctcgctgccgccttcgctgtgccgccggcggagggggccgcgagccccgcgccccggccggaggatgtgcgcccccgcgggccgcccagcctgagccatgcgccccaacggcggcggcgcgccggccggcatggagccccgcgcggccgcgctctgactcgctgtgcgccccgcggccggcgggcggcgggaggcggcggaccgagagccggagaccggcgccgcgggacggaagcgagcgggcgcgggcgccgcgcagatggcctgggcgagccaggtctgaggccccgctccccgaaacgtgaccatgtggattcaacagcttttaggactcagctccatgtccatccgctggccgggccgccccctcggaagccatgcctggatactgatagccatgtttcagctcgccgtggacctgcccgcctgtgaggccctgggcccggggccggagttctggctcctgccgcggtcgccgccccggccgccccggctgtggagttttaggagtggacagccagcgcgggtcccggccccggtgtggagcccccggccgccccgagtggagcggatccacgggcagatgcagatgcctcgagccagacgggcccacaggccccgggaccaggcggccgccctcgtgcccaaggcaggactggccaagcccccagctgctgccaaatccagcccttccctcgcctcttcgtcctcgtcctcgtcctccgcggtggccggtggggccccggagcagcaggccctcctgaggaggggcaagaggcacctgcagggggacggtctcagcagcttcgactccagaggcagccggcccaccacagagactgagttcatcgcctgggggcccacgggggacgaggaggccctggagtccaacacatttccgggcgtttacggccccaccacggtctccatcctacaaacacggaagacaactgtggccgccaccaccaccaccaccaccacggccacccccatgacgctgcagactaaggggttcaccgagtccttggatccccggagaaggatcccaggtggggttagcacaacggagccttccaccagtcccagcaacaacggggaagtcacccagcccccaaggattctgggggaggcctcaggtctggctgtccatcagatcatcaccatcaccgtctccctcatcatggtcatagctgctctcatcacaactcttgtcttaaaaaattgctgtgcccaaagcgggaacactcgtcggaacagccaccagcggaagaccaaccagcaggaggagagctgccagaacctcacggacttcccctcggcccgggtgcccagcagcctggacatattcacggcctataacgagaccctgcagtgttctcacgagtgcgtcagggcatctgtgcccgtgtacaccgatgagacgctgcactcgacgacgggggagtacaaatccacatttaatggaaaccgaccctcctcttctgatcggcatcttattcctgtggccttcgtgtctgagaaatggtttgaaatctcctgctgactggccgaagtcttttttacctcctgggggcagggcagacgccgtgtgtctgtttcacggcggttgtccggaatgccagtggctcctgggcagatgtgcaccccagattcagcctttgtgatagattccaacacgttctggcctcagaccacctttgtggtggggccagactgctctgggcaaagtgaagctggcctttatgctccaaggaagggggcctcgagagcaggcctgcattggctctcggactaattcgcgatcatctttcatacagcaggtacacttcagcaaacctcgttaatgttgatctctttccctttgccaaggccgcttcgttctgaacggagcctgcaaagtcataaaagctcttgaatccgaagcaagtgagaaataaatcatgcactattattattttcaaaaacacattgatcactaataaaaaataagaagtgt

SEQ ID NO: 1287 - DNA, 2922 bp, Homo sapiens
  source 1..2922: mol_type = unassigned DNA
tcgccgccccggagggcgaagccgcggctccccagccctttgctgcgccgcgacagcgccggaacacgccccgcctcgctgccgccttcgctgtgccgccggcggagggggccgcgagccccgcgccccggccggaggatgtgcgcccccgcgggccgcccagcctgagccatgcgccccaacggcggcggcgcgccggccggcatggagccccgcgcggccgcgctctgactcgctgtgcgccccgcggccggcgggcggcgggaggcggcggaccgagagccggagaccggcgccgcgggacggaagcgagcgggcgcgggcgccgcgcagatggcctgggcgagccaggtctgaggccccgctccccgaaacgtgaccatgtggattcaacagcttttaggactcagctccatgtccatccgctggccgggccgccccctcggaagccatgcctggatactgatagccatgtttcagctcgccgtggacctgcccgcctgtgaggccctgggcccggggccggagttctggctcctgccgcggtcgccgccccggccgccccggctgtggagttttaggagtggacagccagcgcgggtcccggccccggtgtggagcccccggccgccccgagtggagcggatccacgggcagatgcagatgcctcgagccagacgggcccacaggccccgggaccaggcggccgccctcgtgcccaaggcaggactggccaagcccccagctgctgccaaatccagcccttccctcgcctcttcgtcctcgtcctcgtcctccgcggtggccggtggggccccggagcagcaggccctcctgaggaggggcaagaggcacctgcagggggacggtctcagcagcttcgactccagaggcagccggcccaccacagagactgagttcatcgcctgggggcccacgggggacgaggaggccctggagtccaacacatttccgggcgtttacggccccaccacggtctccatcctacaaacacggaagacaactgtggccgccaccaccaccaccaccaccacggccacccccatgacgctgcagactaaggggttcaccgagtccttggatccccggagaaggatcccaggtggggttagcacaacggagccttccaccagtcccagcaacaacggggaagtcacccagcccccaaggattctgggggaggcctcaggtctggctgtccatcagatcatcaccatcaccgtctccctcatcatggtcatagctgctctcatcacaactcttgtcttaaaaaattgctgtgcccaaagcgggaacactcgtcggaacagccaccagcggaagaccaaccagcaggaggagagctgccagaacctcacggacttcccctcggcccgggtgcccagcagcctggacatattcacggcctataacgagaccctgcagtgttctcacgagtgcgtcagggcatctgtgcccgtgtacaccgatgagacgctgcactcgacgacgggggagtacaaatccacatttaatggaaaccgaccctcctcttctgatcggcatcttattcctgtggccttcgtgtctgagaaatggtttgaaatctcctgctgactggccgaagtcttttttacctcctgggggcagggcagacgccgtgtgtctgtttcacggattccgttggtgaacctgtaaaaacaaaacaaacaaaacaaaacaaaaaagacaaaacctaaaactgagctatctaagggggagggtccccgcacctaccacttctgtttgccggtgggaaactcacagagcaggacgctctaggccaaatctatttttgtaaaaatgctcatgcctatgggtgactgccttctcccagagttttctttggagaacagaaagaagaaaggaaagaaaggaaccagaggcagagagacgaggatacccagcgaaagggacgggaggaagcatccgaaacctaggattcgtcctacgattctgaacctgtgccaataataccattatgtgccatgtactgacccgaaaggctcggccgcagagccggggcccagcgaatcacgcagagaaatcttacagaaaacaggggtgggaatctcttccgatagagtcgctatttctggttaatatacatatataaatatataaatacaaacacacacacacactttttttgtactgtagcaatttttgaagatcttaaatgttcctttttaaaaaaaagaattgtgttataggttacaaaatctgatttatttaacatgcttagtatgagcagaataaaccagtgttttctactttggcaactcacgtcacacacatattacacacatgtgcgcattacacacacacaatacacatacatgcatatagacgcatctattggaaatgcagttccacaggtgagcatgttctttctggtgacctggtattccatcaccattcaccccaggggacagcctcgaccgagacaaggaggcccttaaatgacagcctgcatttgctagacggttggtgagtggcatcaaatgtgtgacttactatcttgggccagaactaagaatgccaaggttttatatatgtgtgtgtatatatatatatatatatatatatatatatatatatatgtttgtgtgtgtatatatatatatatatatatatgtttgtgtgtgtatatatatgtttgtgtatatatatacacatatgcatacatatgatttttttttttcatttaagtgttggaagatgctacctaacagccacgttcacatttacgtagctggttgcttacaaacgggcctgagcccctggttgggtgggtggtggattcttggacgtgtgtgtcatacaagcatagactggattaaagaagttttccagttccaaaaattaaaggaatatatcctt

SEQ ID NO: 1288 - DNA, 1959 bp, Homo sapiens
  source 1..1959: mol_type = unassigned DNA
atcacttggctcttctctgatatgaactgggcagcatctaaatgtatctttcttgattttgttgtctctttgcatagagcatatcttgtgaaaacagaaatatccatgtaatggttttttcttgtagtgaccgctcgaaattgcttgagcaacatagagataatgggcaggggtccctgtgtgaagcacctagaggctggaaagctgatggcaaagctggaggggtgaggcagggagaggataaacacagtggaaatgcaggaggaaagctgtgctctgtggtggcctaattacaaggacctgccctacagccagaatcagccagcaaatgcttttgtaaaggaactaaaagaaagggaaaagaggaagtaaacaaaaggtcccttttcagagagggaaccagtgggagatttaagagcaaggaacaacccatttcgtcgttatggtaagtggagattattccttgggcctgaatgacttgaatgtttccccgcctgagctaacagtccatgtgggtgattcagctctgatgggatgtgttttccagagcacagaagacaaatgtatattcaagatagactggactctgtcaccaggagagcacgccaaggacgaatatgtgctatactattactccaatctcagtgtgcctattgggcgcttccagaaccgcgtacacttgatgggggacatcttatgcaatgatggctctctcctgctccaagatgtgcaagaggctgaccagggaacctatatctgtgaaatccgcctcaaaggggagagccaggtgttcaagaaggcggtggtactgcatgtgcttccagaggagcccaaagagctcatggtccatgtgggtggattgattcagatgggatgtgttttccagagcacagaagtgaaacacgtgaccaaggtagaatggatattttcaggacggcgcgcaaaggaggagattgtatttcgttactaccacaaactcaggatgtctgtggagtactcccagagctggggccacttccagaatcgtgtgaacctggtgggggacattttccgcaatgacggttccatcatgcttcaaggagtgagggagtcagatggaggaaactacacctgcagtatccacctagggaacctggtgttcaagaaaaccattgtgctgcatgtcagcccggaagagcctcgaacactggtgaccccggcagccctgaggcctctggtcttgggtggtaatcagttggtgatcattgtgggaattgtctgtgccacaatcctgctgctccctgttctgatattgatcgtgaagaagacctgtggaaataagagttcagtgaattctacagtcttggtgaagaacacgaagaagactaatccagagataaaagaaaaaccctgccattttgaaagatgtgaaggggagaaacacatttactccccaataattgtacgggaggtgatcgaggaagaagaaccaagtgaaaaatcagaggccacctacatgaccatgcacccagtttggccttctctgaggtcagatcggaacaactcacttgaaaaaaagtcaggtgggggaatgccaaaaacacagcaagccttttgagaagaatggagagtcccttcatctcagcagcggtggagactctctcctgtgtgtgtcctgggccactctaccagtgatttcagactcccgctctcccagctgtcctcctgtctcattgtttggtcaatacactgaagatggagaatttggagcctggcagagagactggacagctctggaggaacaggcctgctgaggggaggggagcatggacttggcctctggagtgggacactggccctgggaaccaggctgagctgagtggcctcaaaccccccgttggatcagaccctcctgtgggcagggttcttagtggatgagttactgggaagaatcagagataaaaaccaacccaaatcatt

SEQ ID NO: 1289 - DNA, 1944 bp, Homo sapiens
  source 1..1944: mol_type = unassigned DNA
ctgtttgcatctctgcaaccacttcagaaggcacgtgtttggtttgctctgagcctaacctagagtgctcgcagcagtctttcagttgagcttggggactgcagctgtggggagatttcagtgcattgcctcccctgggtgctcttcatcttggatttgaaagttgagagcagcatgttttgcccactgaaactcatcctgctgccagtgttactggattattccttgggcctgaatgacttgaatgtttccccgcctgagctaacagtccatgtgggtgattcagctctgatgggatgtgttttccagagcacagaagacaaatgtatattcaagatagactggactctgtcaccaggagagcacgccaaggacgaatatgtgctatactattactccaatctcagtgtgcctattgggcgcttccagaaccgcgtacacttgatgggggacatcttatgcaatgatggctctctcctgctccaagatgtgcaagaggctgaccagggaacctatatctgtgaaatccgcctcaaaggggagagccaggtgttcaagaaggcggtggtactgcatgtgcttccagaggagcccaaagagctcatggtccatgtgggtggattgattcagatgggatgtgttttccagagcacagaagtgaaacacgtgaccaaggtagaatggatattttcaggacggcgcgcaaaggaggagattgtatttcgttactaccacaaactcaggatgtctgtggagtactcccagagctggggccacttccagaatcgtgtgaacctggtgggggacattttccgcaatgacggttccatcatgcttcaaggagtgagggagtcagatggaggaaactacacctgcagtatccacctagggaacctggtgttcaagaaaaccattgtgctgcatgtcagcccggaagagcctcgaacactggtgaccccggcagccctgaggcctctggtcttgggtggtaatcagttggtgatcattgtgggaattgtctgtgccacaatcctgctgctccctgttctgatattgatcgtgaagaagacctgtggaaataagagttcagtgaattctacagtcttggtgaagaacacgaagaagactaatccagagataaaagaaaaaccctgccattttgaaagatgtgaaggggagaaacacatttactccccaataattgtacgggaggtgatcgaggaagaagaaccaagtgaaaaatcagaggccacctacatgaccatgcacccagtttggccttctctgaggtcagatcggaacaactcacttgaaaaaaagtcaggtgggggaatgccaaaaacacagcaagccttttgagaagaatggagagtcccttcatctcagcagcggtggagactctctcctgtgtgtgtcctgggccactctaccagtgatttcagactcccgctctcccagctgtcctcctgtctcattgtttggtcaatacactgaagatggagaatttggagcctggcagagagactggacagctctggaggaacaggcctgctgaggggaggggagcatggacttggcctctggagtgggacactggccctgggaaccaggctgagctgagtggcctcaaaccccccgttggatcagaccctcctgtgggcagggttcttagtggatgagttactgggaagaatcagagataaaaaccaacccaaatcattcctctggcacattatttctaaataagtgttgtttgtggaaatcgtcctatttttatgcctcggttgagggggcaagtaaagtcctggtgaggaatttacagttagaaacttttggaaaaactgaagttcctggaggaaagccaaaccgtgctaacacactagaggctggttttggtcctgggaaaggtttggggtgaatgggttggaagtagggtatgaatac

SEQ ID NO: 1290 - DNA, 574 bp, Homo sapiens
  source 1..574: mol_type = unassigned DNA
gtagacctaaaaacatctgagagcctagaagtgcacagcagtgtgcagatagattgagaggacttggctctgcaggtggacaacactctatttgaaagttgagagcagcatgttttgcccactgaaactcatcctgctgccagtgttactggattattccttgggcctgaatgacttgaatgtttccccgcctgagctaacagtccatgtgggtgattcagctctgatgggatgtgttttccagagcacagaagacaaatgtatattcaagatagactggactctgtcaccaggagagcacgccaaggacgaatatgtgctatactattactccaatctcagtgtgcctattgggcgcttccagaaccgcgtacacttgatgggggacatcttatgcaatgatggctctctcctgctccaagatgtgcaagaggctgaccagggaacctatatctgtgaaatccgcctcaaaggggagagccaggtgttcaagaaggcggtggtactgcatgtgcttccagaggagcccaaagagctcatggtccatgtgggtggattgattcagatgggatgt

SEQ ID NO: 1291 - DNA, 951 bp, Homo sapiens
  source 1..951: mol_type = unassigned DNA
ctgtttgcatctctgcaaccacttcagaaggcacgtgtttggtttgctctgagcctaacctagagtgctcgcagcagtctttcagttgagcttggggactgcagctgtggggagatttcagtgcattgcctcccctgggtgctcttcatcttggatttgaaagttgagagcagcatgttttgcccactgaaactcatcctgctgccagtgttactggattattccttgggcctgaatgacttgaatgtttccccgcctgagctaacagtccatgtgggtgattcagctctgatgggatgtgttttccagagcacagaagacaaatgtatattcaagatagactggactctgtcaccaggagagcacgccaaggacgaatatgtgctatactattactccaatctcagtgtgcctattgggcgcttccagaaccgcgtacacttgatgggggacatcttatgcaatgatggctctctcctgctccaagatgtgcaagaggctgaccagggaacctatatctgtgaaatccgcctcaaaggggagagccaggtgttcaagaaggcggtggtactgcatgtgcttccagaggagcccaaagagctcatggtccatgtgggtggattgattcagatgggatgtgttttccagagcacagaagtgaaacacgtgaccaaggtagaatggatattttcaggacggcgcgcaaaggaggagattgtatttcgttactaccacaaactcaggatgtctgtggagtactcccagagctggggccacttccagaatcgtgtgaacctggtgggggacattttccgcaatgacggttccatcatgcttcaaggagtgagggagtcagatggaggaaactacacctgcagtatccacctagggaacctggtgttcaagaaaaccattgtgctgcatgtcagcccggaagagcctcgaaagtgg

SEQ ID NO: 1292 - DNA, 2177 bp, Homo sapiens
  source 1..2177: mol_type = unassigned DNA
ctccgcgagagggcctaggattggagggcccaggcagagcccgcgaggaggtgacgcggctgcggaggtgacgcgggaggtcgcgcgccccttccggcgcggggagggcgctgaagatcggggccgctcggccgcaggccgcctccagcgccgcgggatgtagcgcgggggaccgcggcccccagcagagcccgcctgcccggcttgtctaccatcagagggagatctctgccccctggggctgagagaccccaacctttccccaagctgaagctgcagggtattgaggtaccagccagatgtcttcccacaaaggatctgtggtggcacaggggaatggggctcctgccagtaacagggaagctgacacggtggaactggctgaactgggacccctgctagaagagaagggcaaacgggtaatcgccaacccacccaaagctgaagaagagcaaacatgcccagtgccccaggaagaagaggaggaggtgcgggtactgacacttcccctgcaagcccaccacgccatggagaagatggaagagtttgtgtacaaggtctgggagggacgttggagggtcatcccatatgatgtgctccctgactggctaaaggacaacgactatctgctacatggtcatagacctcccatgccctcctttcgggcttgcttcaagagcatcttccgcattcatacagaaactggcaacatctggacccatctgcttggtttcgtgctgtttctctttttgggaatcttgaccatgctcagaccaaatatgtacttcatggcccctctacaggagaaggtggtttttgggatgttctttttgggtgcagtgctctgcctcagcttctcctggctctttcacaccgtctattgtcattcagagaaagtctctcggactttttccaaactggactattcagggattgctcttctaattatggggagctttgtcccctggctctattattccttctactgctccccacagccacggctcatctacctctccatcgtctgtgtcctgggcatttctgccatcattgtggcgcagtgggaccggtttgccactcctaagcaccggcagacaagagcaggcgtgttcctgggacttggcttgagtggcgtcgtgcccaccatgcactttactatcgctgagggctttgtcaaggccaccacagtgggccagatgggctggttcttcctcatggctgtgatgtacatcactggagctggcctttatgctgctcgaattcctgagcgcttctttcctggaaaatttgacatatggttccagtctcatcagattttccatgtcctggtggtggcagcagcctttgtccacttctatggagtctccaaccttcaggaattccgttacggcctagaaggcggctgtactgatgacacccttctctgagccttcccacctgcggggtggaggaggaacttcccaagtgcttttaaaaataacttctttgctgaagtgagaggaagagtctgagttgtctgtttctagaagaaacctcttagagaattcagtaccaaccaagcttcagcccactttcacacccactgggcaataaactttccatttccattctcctagctggggatggggcatggtcaaacttagccatcccctcctcagcaaggcatctaccggcccctcacagagacagtactttgaaactcatgttgagattttaccctctcctccaaccattttgggaaaattatggactgggactcttcagaaattctgtcttttcttctggaagaaaatgtccctcccttacccccatccttaactttgtatcctggcttataacaggccatccatttttgtagcacacttttcaaaaacaattatataccctggtcccatctttctagggcctggatctgcttatagagcaggaagaataaagccaccaacttttacctagcccggctaatcatggaagtgtgtccaggcttcaagtaacttgagttttaattttttttttttcttggcagagtaatgtaaaatttaaatggggaaagatatttaatatttaatactaagctttaaaaagaaacctgctatcattgctatgtatcttgatgcaaagactatgatgttaataaaagaaagtacagaagacacttggcattcaaagatttcaca

SEQ ID NO: 1293 - DNA, 715 bp, Homo sapiens
  source 1..715: mol_type = unassigned DNA
ggggagggcgctgaagatcggggccgctcggccgcaggccgcctccagcgccgcgggatgtagcgcgggggaccgcggcccccagcagagcccgcctgcccggcttgtctaccatcagagggagatctctgccccctggggctgagagaccccaacctttccccaagctgaagctgcagggtattgaggtaccagccagatgtcttcccacaaaggatctgtggtggcacaggggaatggggctcctgccagtaacagggaagctgacacggtggaactggctgaactgggacccctgctagaagagaagggcaaacgggtaatcgccaacccacccaaagctgaagaagagcaaacatgcccagtgccccaggaagaagaggaggaggtgcgggtactgacacttcccctgcaagcccaccacgccatggagaagatggaagagtttgtgtacaaggtctgggagggacgttggagggtcatcccatatgatgtgctccctgactggctaaaggacaacgactatctgctacatggtcatagacctcccatgccctcctttcgggcttgcttcaagagcatcttccgcattcatacagaaactggcaacatctggacccatctgcttgccacggctcatctacctctccatcgtctgtgtcctgggcatttctgccatcattgtggcgcagtgggaccggtttgccactcctaa

SEQ ID NO: 1294 - DNA, 1058 bp, Homo sapiens
  source 1..1058: mol_type = unassigned DNA
atcacgcacttcaggctgcgataacgaggtggagtgtagaatccgacgaacgtcctctaccccggggcgggtggaggttacctggctgcggcggggagtttagaagaccaaactggacaatggactttgctcactatgatgacatgatctccattgacctccatttgtctaccatcagagggagatctctgccccctggggctgagagaccccaacctttccccaagctgaagctgcagggtattgaggtaccagccagatgtcttcccacaaaggatctgtggtggcacaggggaatggggctcctgccagtaacagggaagctgacacggtggaactggctgaactgggacccctgctagaagagaagggcaaacgggtaatcgccaacccacccaaagctgaagaagagcaaacatgcccagtgccccaggaagaagaggaggaggtgcgggtactgacacttcccctgcaagcccaccacgccatggagaagatggaagagtttgtgtacaaggtctgggagggacgttggagggtcatcccatatgatgtgctccctgactggctaaaggacaacgactatctgctacatggtcatagacctcccatgccctcctttcgggcttgcttcaagagcatcttccgcattcatacagaaactggcaacatctggacccatctgcttggtttcgtgctgtttctctttttgggaatcttgaccatgctcagaccaaatatgtacttcatggcccctctacaggagaaggtggtttttgggatgttctttttgggtgcagtgctctgcctcagcttctcctggctctttcacaccgtctattgtcattcagagaaagtctctcggactttttccaaactggactattcagggattgctcttctaattatggggagctttgtcccctggctctattattccttctactgctccccacagccacggctcatctacctctccatcgtctgtgtcctgggcatttctgccatcattgtggcgcagtgggaccggtttgccactcctaagcaccggcagacaa

SEQ ID NO: 1295 - DNA, 879 bp, Homo sapiens
  source 1..879: mol_type = unassigned DNA
agggcgctgaagatcggggccgctcggccgcaggccgcctccagcgccgcgggatgtagcgcgggggaccgcggcccccagcagagcccgcctgcccggcttttagaagaccaaactggacaatggactttgctcactatgatgacatgatctccattgacctccatttgtctaccatcagagggagatctctgccccctggggctgagagaccccaacctttccccaagctgaagctgcagggtattgaggtaccagccagatgtcttcccacaaaggatctgtggtggcacaggggaatggggctcctgccagtaacagggaagctgacacggtggaactggctgaactgggacccctgctagaagagaagggcaaacgggtaatcgccaacccacccaaagctgaagaagagcaaacatgcccagtgccccaggaagaagaggaggaggtgcgggtactgacacttcccctgcaagcccaccacgccatggagaagatggaagagtttgtgtacaaggtctgggagggacgttggagggtcatcccatatgatgtgctccctgactggctaaaggacaacgactatctgctacatggtcatagacctcccatgccctcctttcgggcttgcttcaagagcatcttccgcattcatacagaaactggcaacatctggacccatctgcttggtttcgtgctgtttctctttttgggaatcttgaccatgctcagaccaaatatgtacttcatggcccctctacaggagaaggtggtttttgggatgttctttttgggtgcagtgctctgcctcagcttctcctggctctttcacaccgtctattgtcattcagagaaagtctctcggactttttccaa

SEQ ID NO: 1296 - DNA, 2125 bp, Homo sapiens
  source 1..2125: mol_type = unassigned DNA
atcacgcacttcaggctgcgataacgaggtggagtgtagaatccgacgaacgtcctctaccccggggcgggtggaggttacctggctgcggcggggagtttagaagaccaaactggacaatggactttgctcactatgatgacatgatctccattgacctccatttgtctaccatcagagggagatctctgccccctggggctgagagaccccaacctttccccaagctgaagctgcagggtattgaggtaccagccagatgtcttcccacaaaggatctgtggtggcacaggggaatggggctcctgccagtaacagggaagctgacacggtggaactggctgaactgggacccctgctagaagagaagggcaaacgggtaatcgccaacccacccaaagctgaagaagagcaaacatgcccagtgccccaggaagaagaggaggaggtgcgggtactgacacttcccctgcaagcccaccacgccatggagaagatggaagagtttgtgtacaaggtctgggagggacgttggagggtcatcccatatgatgtgctccctgactggctaaaggacaacgactatctgctacatggtcatagacctcccatgccctcctttcgggcttgcttcaagagcatcttccgcattcatacagaaactggcaacatctggacccatctgcttggtttcgtgctgtttctctttttgggaatcttgaccatgctcagaccaaatatgtacttcatggcccctctacaggagaaggtggtttttgggatgttctttttgggtgcagtgctctgcctcagcttctcctggctctttcacaccgtctattgtcattcagagaaagtctctcggactttttccaaactggactattcagggattgctcttctaattatggggagctttgtcccctggctctattattccttctactgctccccacagccacggctcatctacctctccatcgtctgtgtcctgggcatttctgccatcattgtggcgcagtgggaccggtttgccactcctaagcaccggcagacaagagcaggcgtgttcctgggacttggcttgagtggcgtcgtgcccaccatgcactttactatcgctgagggctttgtcaaggccaccacagtgggccagatgggctggttcttcctcatggctgtgatgtacatcactggagctggcctttatgctgctcgaattcctgagcgcttctttcctggaaaatttgacatatggttccagtctcatcagattttccatgtcctggtggtggcagcagcctttgtccacttctatggagtctccaaccttcaggaattccgttacggcctagaaggcggctgtactgatgacacccttctctgagccttcccacctgcggggtggaggaggaacttcccaagtgcttttaaaaataacttctttgctgaagtgagaggaagagtctgagttgtctgtttctagaagaaacctcttagagaattcagtaccaaccaagcttcagcccactttcacacccactgggcaataaactttccatttccattctcctagctggggatggggcatggtcaaacttagccatcccctcctcagcaaggcatctaccggcccctcacagagacagtactttgaaactcatgttgagattttaccctctcctccaaccattttgggaaaattatggactgggactcttcagaaattctgtcttttcttctggaagaaaatgtccctcccttacccccatccttaactttgtatcctggcttataacaggccatccatttttgtagcacacttttcaaaaacaattatataccctggtcccatctttctagggcctggatctgcttatagagcaggaagaataaagccaccaacttttacctagcccggctaatcatggaagtgtgtccaggcttcaagtaacttgagttttaattttttttttttcttggcagagtaatgtaaaatttaaatggggaaagatatttaatatttaatactaagctttaaaaagaaacctgctatcattgctatgtatcttgatgcaaagactatgatgttaataaaagaaagtacagaagacacttggcattc

SEQ ID NO: 1297 - DNA, 4018 bp, Homo sapiens
  source 1..4018: mol_type = unassigned DNA
gcggcggcggcggtcgctgtcgcggcggcgagagcgcgattccagaagcggcatcgcggcggcggcagcggcggcggctacaccgggcttggccccctccctcctccgttcccccctcctcccccctcccctcagcggtggctcccaagaagtccgagacacgcggatcaactcactatcctgaaggtccattctcccaagaagaggggacagaaagacagatctatttgtaagaaaggcttgggtatcccatgaacgagccaacagaaaaccgattggggtgcagcaggactccagagccagatataaggctcagaaaagggcaccaactggatggtacacgaagaggtgataatgacagccaccaaggagatttggagcccattttagaggcatctgttctatcttcccatcataaaaaaagctctgaggaacatgaatacagtgatgaagctcctcaggaagatgagggctttatgggcatgtcccctctcttacaagcccatcatgctatggaaaaaatggaagaatttgtttgtaaggtatgggaaggtcggtggcgagtgatccctcatgatgtactaccagactggctcaaggataatgacttcctcttgcatggacaccggcctcctatgccttctttccgggcctgttttaagagcattttcagaatacacacagaaacaggcaacatttggacacatctcttaggttgtgtattcttcctgtgcctggggatcttttatatgtttcgcccaaatatctcctttgtggcccctctgcaagagaaggtggtctttggattatttttcttaggagccattctctgcctttctttttcatggctcttccacacagtctactgccactcagagggggtctctcggctcttctctaaactggattactctggtattgctcttctgattatgggaagttttgttccttggctttattattctttctactgtaatccacaaccttgcttcatctacttgattgtcatctgtgtgctgggcattgcagccattatagtctcccagtgggacatgtttgccacccctcagtatcggggagtaagagcaggagtgtttttgggcctaggcctgagtggaatcattcctaccttgcactatgtcatctcggaggggttccttaaggccgccaccatagggcagataggctggttgatgctgatggccagcctctacatcacaggagctgccctgtatgctgcccggatccccgaacgctttttccctggcaaatgtgacatctggtttcactctcatcagctgtttcatatctttgtggttgctggagcttttgttcacttccatggtgtctcaaacctccaggagtttcgtttcatgatcggcgggggctgcagtgaagaggatgcactgtgatacctaccagtctccagggactatgaccctaaaccagggcctgcggcacttgcgggcctccctgctggctactgatgccagtaccagaggagccccaaaactttgacagcctcgtgggctttgtgacggcccagtggctctgcgtggtacatgactgagaagagaaaaacaaaaataaatcatacctcaaaggatggagtgcatcaattgggagaaaaggagacatagcccaaaccctggcttattcttgggatctactgattgcgggctctgcaagacccttggcaaactggcttctgatccatatcatatttatttgtagaagatggcgaaacagtttagctggtggttctttcttctccctttctctctctctatgacaataatacaaaccaatttaagtgaacatttatatccgataaggggtgggagtgtgattttaaatgctcttttgggagaacaaagaaattaatgtaaataagatttctaactgtttaaataagactttatataaatgtttaaaacataggggtaagggagggagggagaatttttgtatagaatgaaacatgcaagtaccacacactgtttgaattttgcacaaaaagtgactgtaggatcaggtgatagccccggaatgtacagtgtcttggtgcaccaagatgccttctaaaggctgacataccttggaccctaatggggcagagagtatagccctagcccagtggtgacatgaccactccctttgggaggcctgaggtagaggggagtggtatgtgttttctcagtggaagcagcacatgagtgggtgacaggatgttagataaaggctctagttagggtgtcattgtcatttgagagactgacacactcctagcagctggtaaaggggtgctggaggccatggaggagctctagaaacattagcatgggctgatctgattacttcctggcatcccgctcacttttatgggaagtcttattagagggatgggacagttttccatatccttgctgtggagctctggaacactctctaaatttccctctattaaaaatcactgccctaactacacttcctccttgagggaatagaaatggacctttctctgacatagttcttggcatgggagccagccacaaatgagattctgacgtgtccaggtttctcctgagctcatctacatagattggtagacccttcctttggattaggaaagatgagttttacctctggtacactgtcttggtaagcctggatgtgacagacacctcggctctccttgaataagaaagccagcagaactcttaaagccagttgtagtacggagttgtcagcactcactgaacctcactttacagggataagagtggtgtggcattttaaatacaatggtatgttattgccagggagtgaggtacaagacgatggctcatgtcacaggcctacctgatacggtgtcagagaaagtggtggggaaaggatctggttcatggaattctgatcttggcccataggtgaaccaccaaaatagtgctcgagtcttaggttactgtcatcaaagacttgggatgactccattatatcctggggttgtgggtattagaactaaatatggaggtcctgagcatggggactggcgtcctcagtaggtgtttgggaatatgggaagggtctcctatttattcaatagagttttctcagttattttcctcccttgcccttgcaatctccagcaaaaggtgggatctaggaagaaagaatccagtgtagaagttgagaagaacttgaacgttttggttctggataaggtcactgtcctaggtgctaggtggaccgagcaaaagactcagtggatgaactggtgcagtgcctgacagaataaagaacagtattaatccctttgagaaagcatagtccagcaggacagtggccatttggacagaagcccacttagtttcttgggagcaacagcacgtatcagaagccagacttgctcttcggtcatgcactttgggatacagcgtataggtgcagccctgtcacaacaccaacagaagtagcagcctctgggtgcagtcacccacaccccaaagctggaaggatctggttcaacatagcacaaacccttaggaaaaatgaaattaacatcactgatgtgtaatccagtaaaatctccctttttcgggtgtgtatgtgggcatgtgcccatttctatgtgtgtgtctacgtgcagctcactaccaacagcctcatgtgcacttgacctgacagtgctcgctgagaactctcaccaggttggcgcctgaatgccttactctcagcagtcagaggcttgcttgctctgtgcagatttttaattttcttttttggccctaggctggttgggacctctacagcttcattctttcaccattaaatagtggcctttttcagtattttccctcttcccctttataaattatgctaaagccacaaagcacatttttggggatcatagaaggttggggttccagaaaggcatctgtgtgatggttccattgatgtgggatttccctacttgctgtattctcagtttctaataaaaagaaccaaatgaaatatg

SEQ ID NO: 1298 - DNA, 4562 bp, Homo sapiens
  source 1..4562: mol_type = unassigned DNA
gccatctcctcctcacttccattctgactgcagtctgtggttctgattccataccagaggggctcaggatgctgttgctgggagctgttctactgctattagctctgcccggtcatgaccaggaaaccacgactcaagggcccggagtcctgcttcccctgcccaagggggcctgcacaggttggatggcgggcatcccagggcatccgggccataatggggccccaggccgtgatggcagagatggcacccctggtgagaagggtgagaaaggagatccaggtcttattggtcctaagggagacatcggtgaaaccggagtacccggggctgaaggtccccgaggctttccgggaatccaaggcaggaaaggagaacctggagaaggtgcctatgtataccgctcagcattcagtgtgggattggagacttacgttactatccccaacatgcccattcgctttaccaagatcttctacaatcagcaaaaccactatgatggctccactggtaaattccactgcaacattcctgggctgtactactttgcctaccacatcacagtctatatgaaggatgtgaaggtcagcctcttcaagaaggacaaggctatgctcttcacctatgatcagtaccaggaaaataatgtggaccaggcctccggctctgtgctcctgcatctggaggtgggcgaccaagtctggctccaggtgtatggggaaggagagcgtaatggactctatgctgataatgacaatgactccaccttcacaggctttcttctctaccatgacaccaactgatcaccactaactcagagcctcctccaggccaaacagccccaaagtcaattaaaggctttcagtacggttaggaagttgattattatttagttggaggcctttagatattattcattcatttactcattcatttattcattcattcatcgagtaactttaaaaaaatcatatgctatgttcccagtcctggggagcttcacaaacatgaccagataactgactagaaagaagtagttgacagtgctattttgtgcccactgtctctcctgatgctcatatcaatcctataaggcacagggaacaagcattctcctgtttttacagattgtatcctgaggctgagagagttaagtgaatgtctaaggtcacacagtattaagtgacagtgctagaaatcaaacccagagctgtggactttgttcactagactgtgcccttttatagaggtacatgttctctttggagtgttggtaggtgtctgtttcccacctcacctgagagccattgaatttgccttcctcatgaattaaaacctcccccaagcagagcttcctcagagaaagtggttctatgatgacgtcctgtcttggaaggactactactcaatggcccctgcactactctacttcctcttacctatgtcccttctcatgcctttccctccaacggggaaagccaactccatctctaagtgccgaactcatccctgttcctcaaggccacctggccaggagcttctctgatgtgatatccactttttttttttttgagatggagtctcactctgtcacccaggctggagtacagtgacacgacctcggctcactgcagcctccttctcctgggtccaagcaattattgtgcctcagcctcccgagtagctgagacttcaggtgcattccaccacacatggctaatttttgtatttttagtagaaatggggtttcgtcatgttggccaggctggtctcgaactcctggcctaggtgatccacccgcctcgacctcccaaagtgctgggattacaggcatgagccaccatgcccagtcgatatctcactttttattttgccatggatgagagtcctgggtgtgaggaacacctcccaccaggctagaggcaactgcccaggaaggactgtgcttccgtcacctctaaatcccttgcagatccttgataaatgcctcatgaagaccaatctcttgaatcccatatctacccagaattaactccattccagtctctgcatgtaatcagttttatccacagaaacattttcattttaggaaatccctggttttaagtatcaatccttgttcagctggacaatatgaatcttttccactgaagttagggatgactgtgattttcagaacacgtccagaatttttcatcaagaaggtagcttgagcctgaaatgcaaaacccatggaggaattctgaagccattgtctccttgagtaccaacagggtcagggaagactgggcctcctgaatttattattgttctttaagaattacaggttgaggtagttgatggtggtaaacattctctcaggagacaataactccagtgatgttcttcaaagattttagcaaaaacagagtaaatagcattctctatcaatatataaatttaaaaaactatctttttgcttacagttttaaattctgaacaattctctcttatatgtgtattgctaatcattaaggtattattttttccacatataaagctttgtctttttgttgttgttgttgtttttaagatggagtttccctctgttgccaggctagagtgcagtggcatgatctcggcttactgcaacctttgcctcccaggttcaagcgattcttctgcctcagcctcccgagtagctgggaccacaggtgcctaccaccatgccaggctaatttttgtatttttagtaaagacagggtttcaccatattggccaggctggtctcgaactcctgaccttgtgatctgcccgcctccatttttgttgttattttttgagaaagatagatatgaggtttagagagggatgaagaggtgagagtaagccttgtgttagtcagaactctgtgttgtgaatgtcattcacaacagaaaacccaaaatattatgcaaactactgtaagcaagaaaaataaaggaaaaatggaaacatttattcctttgcataatagaaattaccagagttgttctgtctttagataaggtttgaaccaaagctcaaaacaatcaagacccttttctgtatgtccttctgttctgccttccgcagtgtaggctttaccctcaggtgctacacagtatagttctagggtttccctcccgatatcaaaaagactgtggcctgcccagctctcgtatccccaagccacaccatctggctaaatggacatcatgttttctggtgatgcccaaagaggagagaggaagctctctttcccagatgccccagcaagtgtaaccttgcatctcattgctctggctgagttgtgtgcctgtttctgaccaatcactgagtcaggaggatgaaatattcatattgacttaattgcagcttaagttaggggtatgtagaggtattttccctaaagcaaaattgggacactgttatcagaaataggagagtggatgatagatgcaaaataatacctgtccacaacaaactcttaatgctgtgtttgagctttcatgagtttcccagagagacatagctggaaaattcctattgattttctctaaaatttcaacaagtagctaaagtctggctatgctcacagtctcacatctggttggggtgggctccttacagaacacgctttcacagttaccctaaactctctggggcagggttattcctttgtggaaccagaggcacagagagagtcaactgaggccaaaagaggcctgagagaaactgaggtcaagatttcaggattaatggtcctgtgatgctttgaagtacaattgtggatttgtccaattctctttagttctgtcagcttttgcttcatatattttagcgctctattattagatatatacatgtttagtattatgtcttattggtgcatttactctcttatcattatgtaatgtccttctttatctgtgataattttctgtgttctgaagtctactttgtctaaaaataacatacgcactcaacttccttttctttcttccttcctttctttcttccttcctttctttctctctctctctctttccttccttccttcctccttttctttctctctctctctctctctctttttttgacagactctcgttctgtggccctggctggagttcagtggtgtgatcttggctcactgctacctctaccatgagcaattctcctgcctcagcctcccaagtagctggaactacaggctcatgccactgcgcccagctaatttttgtatttttcgtagagacggggtttcaccacattcgtcaggttggtttcaaactcctgactttgtgatccacccgcctcggcctcccaaagtgctgggattacaggcatgagccatcacacctggtcaactttcttttgattagtgtttttgtggtatatctttttccatcatgttactttaaatatatctatattattgtatttaaaatgtgtttcttacagactgcatgtagttgggtataatttttatccagtctaaaaatatctgtcttttaattggtgtttagacaatttatatttaataaaattgttgaatttaa

SEQ ID NO: 1299 - DNA, 4635 bp, Homo sapiens
  source 1..4635: mol_type = unassigned DNA
aggctgttgaggctgggccatctcctcctcacttccattctgactgcagtctgtggttctgattccataccagagggtaagagcaattctgtgaagttccaggctgggctgacagtgcacatgtggattccagggctcaggatgctgttgctgggagctgttctactgctattagctctgcccggtcatgaccaggaaaccacgactcaagggcccggagtcctgcttcccctgcccaagggggcctgcacaggttggatggcgggcatcccagggcatccgggccataatggggccccaggccgtgatggcagagatggcacccctggtgagaagggtgagaaaggagatccaggtcttattggtcctaagggagacatcggtgaaaccggagtacccggggctgaaggtccccgaggctttccgggaatccaaggcaggaaaggagaacctggagaaggtgcctatgtataccgctcagcattcagtgtgggattggagacttacgttactatccccaacatgcccattcgctttaccaagatcttctacaatcagcaaaaccactatgatggctccactggtaaattccactgcaacattcctgggctgtactactttgcctaccacatcacagtctatatgaaggatgtgaaggtcagcctcttcaagaaggacaaggctatgctcttcacctatgatcagtaccaggaaaataatgtggaccaggcctccggctctgtgctcctgcatctggaggtgggcgaccaagtctggctccaggtgtatggggaaggagagcgtaatggactctatgctgataatgacaatgactccaccttcacaggctttcttctctaccatgacaccaactgatcaccactaactcagagcctcctccaggccaaacagccccaaagtcaattaaaggctttcagtacggttaggaagttgattattatttagttggaggcctttagatattattcattcatttactcattcatttattcattcattcatcgagtaactttaaaaaaatcatatgctatgttcccagtcctggggagcttcacaaacatgaccagataactgactagaaagaagtagttgacagtgctattttgtgcccactgtctctcctgatgctcatatcaatcctataaggcacagggaacaagcattctcctgtttttacagattgtatcctgaggctgagagagttaagtgaatgtctaaggtcacacagtattaagtgacagtgctagaaatcaaacccagagctgtggactttgttcactagactgtgcccttttatagaggtacatgttctctttggagtgttggtaggtgtctgtttcccacctcacctgagagccattgaatttgccttcctcatgaattaaaacctcccccaagcagagcttcctcagagaaagtggttctatgatgacgtcctgtcttggaaggactactactcaatggcccctgcactactctacttcctcttacctatgtcccttctcatgcctttccctccaacggggaaagccaactccatctctaagtgccgaactcatccctgttcctcaaggccacctggccaggagcttctctgatgtgatatccactttttttttttttgagatggagtctcactctgtcacccaggctggagtacagtgacacgacctcggctcactgcagcctccttctcctgggtccaagcaattattgtgcctcagcctcccgagtagctgagacttcaggtgcattccaccacacatggctaatttttgtatttttagtagaaatggggtttcgtcatgttggccaggctggtctcgaactcctggcctaggtgatccacccgcctcgacctcccaaagtgctgggattacaggcatgagccaccatgcccagtcgatatctcactttttattttgccatggatgagagtcctgggtgtgaggaacacctcccaccaggctagaggcaactgcccaggaaggactgtgcttccgtcacctctaaatcccttgcagatccttgataaatgcctcatgaagaccaatctcttgaatcccatatctacccagaattaactccattccagtctctgcatgtaatcagttttatccacagaaacattttcattttaggaaatccctggttttaagtatcaatccttgttcagctggacaatatgaatcttttccactgaagttagggatgactgtgattttcagaacacgtccagaatttttcatcaagaaggtagcttgagcctgaaatgcaaaacccatggaggaattctgaagccattgtctccttgagtaccaacagggtcagggaagactgggcctcctgaatttattattgttctttaagaattacaggttgaggtagttgatggtggtaaacattctctcaggagacaataactccagtgatgttcttcaaagattttagcaaaaacagagtaaatagcattctctatcaatatataaatttaaaaaactatctttttgcttacagttttaaattctgaacaattctctcttatatgtgtattgctaatcattaaggtattattttttccacatataaagctttgtctttttgttgttgttgttgtttttaagatggagtttccctctgttgccaggctagagtgcagtggcatgatctcggcttactgcaacctttgcctcccaggttcaagcgattcttctgcctcagcctcccgagtagctgggaccacaggtgcctaccaccatgccaggctaatttttgtatttttagtaaagacagggtttcaccatattggccaggctggtctcgaactcctgaccttgtgatctgcccgcctccatttttgttgttattttttgagaaagatagatatgaggtttagagagggatgaagaggtgagagtaagccttgtgttagtcagaactctgtgttgtgaatgtcattcacaacagaaaacccaaaatattatgcaaactactgtaagcaagaaaaataaaggaaaaatggaaacatttattcctttgcataatagaaattaccagagttgttctgtctttagataaggtttgaaccaaagctcaaaacaatcaagacccttttctgtatgtccttctgttctgccttccgcagtgtaggctttaccctcaggtgctacacagtatagttctagggtttccctcccgatatcaaaaagactgtggcctgcccagctctcgtatccccaagccacaccatctggctaaatggacatcatgttttctggtgatgcccaaagaggagagaggaagctctctttcccagatgccccagcaagtgtaaccttgcatctcattgctctggctgagttgtgtgcctgtttctgaccaatcactgagtcaggaggatgaaatattcatattgacttaattgcagcttaagttaggggtatgtagaggtattttccctaaagcaaaattgggacactgttatcagaaataggagagtggatgatagatgcaaaataatacctgtccacaacaaactcttaatgctgtgtttgagctttcatgagtttcccagagagacatagctggaaaattcctattgattttctctaaaatttcaacaagtagctaaagtctggctatgctcacagtctcacatctggttggggtgggctccttacagaacacgctttcacagttaccctaaactctctggggcagggttattcctttgtggaaccagaggcacagagagagtcaactgaggccaaaagaggcctgagagaaactgaggtcaagatttcaggattaatggtcctgtgatgctttgaagtacaattgtggatttgtccaattctctttagttctgtcagcttttgcttcatatattttagcgctctattattagatatatacatgtttagtattatgtcttattggtgcatttactctcttatcattatgtaatgtccttctttatctgtgataattttctgtgttctgaagtctactttgtctaaaaataacatacgcactcaacttccttttctttcttccttcctttctttcttccttcctttctttctctctctctctctttccttccttccttcctccttttctttctctctctctctctctctctttttttgacagactctcgttctgtggccctggctggagttcagtggtgtgatcttggctcactgctacctctaccatgagcaattctcctgcctcagcctcccaagtagctggaactacaggctcatgccactgcgcccagctaatttttgtatttttcgtagagacggggtttcaccacattcgtcaggttggtttcaaactcctgactttgtgatccacccgcctcggcctcccaaagtgctgggattacaggcatgagccatcacacctggtcaactttcttttgattagtgtttttgtggtatatctttttccatcatgttactttaaatatatctatattattgtatttaaaatgtgtttcttacagactgcatgtagttgggtataatttttatccagtctaaaaatatctgtcttttaattggtgtttagacaatttatatttaataaaattgttgaatttaa

SEQ ID NO: 1300 - DNA, 4599 bp, Homo sapiens
  source 1..4599: mol_type = unassigned DNA
acttccattctgactgcagtctgtggttctgattccataccagaggagacgggatttcaccatgttgtccaggctggtctgaaactcctgacatcagggctcaggatgctgttgctgggagctgttctactgctattagctctgcccggtcatgaccaggaaaccacgactcaagggcccggagtcctgcttcccctgcccaagggggcctgcacaggttggatggcgggcatcccagggcatccgggccataatggggccccaggccgtgatggcagagatggcacccctggtgagaagggtgagaaaggagatccaggtcttattggtcctaagggagacatcggtgaaaccggagtacccggggctgaaggtccccgaggctttccgggaatccaaggcaggaaaggagaacctggagaaggtgcctatgtataccgctcagcattcagtgtgggattggagacttacgttactatccccaacatgcccattcgctttaccaagatcttctacaatcagcaaaaccactatgatggctccactggtaaattccactgcaacattcctgggctgtactactttgcctaccacatcacagtctatatgaaggatgtgaaggtcagcctcttcaagaaggacaaggctatgctcttcacctatgatcagtaccaggaaaataatgtggaccaggcctccggctctgtgctcctgcatctggaggtgggcgaccaagtctggctccaggtgtatggggaaggagagcgtaatggactctatgctgataatgacaatgactccaccttcacaggctttcttctctaccatgacaccaactgatcaccactaactcagagcctcctccaggccaaacagccccaaagtcaattaaaggctttcagtacggttaggaagttgattattatttagttggaggcctttagatattattcattcatttactcattcatttattcattcattcatcgagtaactttaaaaaaatcatatgctatgttcccagtcctggggagcttcacaaacatgaccagataactgactagaaagaagtagttgacagtgctattttgtgcccactgtctctcctgatgctcatatcaatcctataaggcacagggaacaagcattctcctgtttttacagattgtatcctgaggctgagagagttaagtgaatgtctaaggtcacacagtattaagtgacagtgctagaaatcaaacccagagctgtggactttgttcactagactgtgcccttttatagaggtacatgttctctttggagtgttggtaggtgtctgtttcccacctcacctgagagccattgaatttgccttcctcatgaattaaaacctcccccaagcagagcttcctcagagaaagtggttctatgatgacgtcctgtcttggaaggactactactcaatggcccctgcactactctacttcctcttacctatgtcccttctcatgcctttccctccaacggggaaagccaactccatctctaagtgccgaactcatccctgttcctcaaggccacctggccaggagcttctctgatgtgatatccactttttttttttttgagatggagtctcactctgtcacccaggctggagtacagtgacacgacctcggctcactgcagcctccttctcctgggtccaagcaattattgtgcctcagcctcccgagtagctgagacttcaggtgcattccaccacacatggctaatttttgtatttttagtagaaatggggtttcgtcatgttggccaggctggtctcgaactcctggcctaggtgatccacccgcctcgacctcccaaagtgctgggattacaggcatgagccaccatgcccagtcgatatctcactttttattttgccatggatgagagtcctgggtgtgaggaacacctcccaccaggctagaggcaactgcccaggaaggactgtgcttccgtcacctctaaatcccttgcagatccttgataaatgcctcatgaagaccaatctcttgaatcccatatctacccagaattaactccattccagtctctgcatgtaatcagttttatccacagaaacattttcattttaggaaatccctggttttaagtatcaatccttgttcagctggacaatatgaatcttttccactgaagttagggatgactgtgattttcagaacacgtccagaatttttcatcaagaaggtagcttgagcctgaaatgcaaaacccatggaggaattctgaagccattgtctccttgagtaccaacagggtcagggaagactgggcctcctgaatttattattgttctttaagaattacaggttgaggtagttgatggtggtaaacattctctcaggagacaataactccagtgatgttcttcaaagattttagcaaaaacagagtaaatagcattctctatcaatatataaatttaaaaaactatctttttgcttacagttttaaattctgaacaattctctcttatatgtgtattgctaatcattaaggtattattttttccacatataaagctttgtctttttgttgttgttgttgtttttaagatggagtttccctctgttgccaggctagagtgcagtggcatgatctcggcttactgcaacctttgcctcccaggttcaagcgattcttctgcctcagcctcccgagtagctgggaccacaggtgcctaccaccatgccaggctaatttttgtatttttagtaaagacagggtttcaccatattggccaggctggtctcgaactcctgaccttgtgatctgcccgcctccatttttgttgttattttttgagaaagatagatatgaggtttagagagggatgaagaggtgagagtaagccttgtgttagtcagaactctgtgttgtgaatgtcattcacaacagaaaacccaaaatattatgcaaactactgtaagcaagaaaaataaaggaaaaatggaaacatttattcctttgcataatagaaattaccagagttgttctgtctttagataaggtttgaaccaaagctcaaaacaatcaagacccttttctgtatgtccttctgttctgccttccgcagtgtaggctttaccctcaggtgctacacagtatagttctagggtttccctcccgatatcaaaaagactgtggcctgcccagctctcgtatccccaagccacaccatctggctaaatggacatcatgttttctggtgatgcccaaagaggagagaggaagctctctttcccagatgccccagcaagtgtaaccttgcatctcattgctctggctgagttgtgtgcctgtttctgaccaatcactgagtcaggaggatgaaatattcatattgacttaattgcagcttaagttaggggtatgtagaggtattttccctaaagcaaaattgggacactgttatcagaaataggagagtggatgatagatgcaaaataatacctgtccacaacaaactcttaatgctgtgtttgagctttcatgagtttcccagagagacatagctggaaaattcctattgattttctctaaaatttcaacaagtagctaaagtctggctatgctcacagtctcacatctggttggggtgggctccttacagaacacgctttcacagttaccctaaactctctggggcagggttattcctttgtggaaccagaggcacagagagagtcaactgaggccaaaagaggcctgagagaaactgaggtcaagatttcaggattaatggtcctgtgatgctttgaagtacaattgtggatttgtccaattctctttagttctgtcagcttttgcttcatatattttagcgctctattattagatatatacatgtttagtattatgtcttattggtgcatttactctcttatcattatgtaatgtccttctttatctgtgataattttctgtgttctgaagtctactttgtctaaaaataacatacgcactcaacttccttttctttcttccttcctttctttcttccttcctttctttctctctctctctctttccttccttccttcctccttttctttctctctctctctctctctctttttttgacagactctcgttctgtggccctggctggagttcagtggtgtgatcttggctcactgctacctctaccatgagcaattctcctgcctcagcctcccaagtagctggaactacaggctcatgccactgcgcccagctaatttttgtatttttcgtagagacggggtttcaccacattcgtcaggttggtttcaaactcctgactttgtgatccacccgcctcggcctcccaaagtgctgggattacaggcatgagccatcacacctggtcaactttcttttgattagtgtttttgtggtatatctttttccatcatgttactttaaatatatctatattattgtatttaaaatgtgtttcttacagactgcatgtagttgggtataatttttatccagtctaaaaatatctgtcttttaattggtgtttagacaatttatatttaataaaattgttgaatttaa

SEQ ID NO: 1301 - DNA, 2557 bp, Homo sapiens
  source 1..2557: mol_type = unassigned DNA
gtagcgcttgtgtcgacatcggcgcgcgccgagcccggaagaggcgcgggctaggaaaggagttggttcgcgcaggtgcggcgcctgggtccccatggcgctgtggcgcggctccgcgtacgcgggcttcctggcgctggccgtgggctgcgtcttcctgctggagccagagctgccaggctcggcgctgcgctctctctggagctcgctgtgtctggggcccgcgcctgcgcccccgggacccgtctcccccgagggccggttggcggcagcctgggacgcgcttatcgtgcggccagtccggcgctggcgccgcgtggcagtgggagtcaatgcatgtgttgatgtggtgctctcaggggtgaagctcttgcaggcacttggccttagtcctgggaatgggaaagatcacagcattctgcattcaaggaatgatctggaagaagccttcattcacttcatggggaagggagcagctgctgagcgcttcttcagtgataaggaaacttttcacgacattgcccaggttgcatcagagttcccaggagcccagcactatgtaggaggaaatgcagctttaattggacagaaatttgcagccaactcagatttaaaggttcttctttgcggtccagttggtccaaagctacatgagcttcttgatgacaatgtctttgttccaccagagtcattgcaggaagtggatgagttccacctcattttagagtatcaagcaggggaggagtggggccagttaaaagctccccatgccaaccgattcatcttctctcacgacctctccaacggggccatgaatatgctggaggtgtttgtgtctagcctggaggagtttcagccagacctggtggtcctctctggattgcacatgatggagggacaaagcaaggagctccagaggaagagactcttggaggttgtaacctccatttctgacatccccactggtattccagttcacctagagctggccagtatgactaacagggagctcatgagcagcattgtccatcaggtctttcccgcggtgacttcccttgggctgaatgaacaggagctgttatttctcacccagtcagcctctggacctcactcttctctctcttcctggaacggtgttcctgatgtgggcatggtcagtgacatcctcttctggatcttgaaagaacatgggaggagtaaaagcagagcctcggatctcaccaggatccatttccacacgctggtctaccacatcctggcaactgtggatggacactgggccaaccagctggcagccgtggctgcaggagctcgtgtggctgggacacaggcctgcgccacagaaaccatagacaccagccgagtgtctctgagggcaccccaagagttcatgacttcccattcggaggcaggctccaggattgtattaaacccaaacaagccagtagtagaatggcacagagagggaatatccttccacttcacaccagtattggtgtgtaaagaccccattcgaactgtaggccttggagatgccatttcagccgaaggactcttctattcggaagtacaccctcactattaggaagattcttaggggtaatttttctgaggaaggagaactagccaacttaagaattacaggaagaaagtggtttggaagacagccaaagaaataaaagcagattaaactgtatcaggtacattccagcctgttggcaactccataaaaacatttcagattttaatccgaatttagctaatgagactggatttttgttttttatgttgtgtgtcacagagctaaaaactcagttcccaaatccccagtttatgcagcgccatcaggtattttaagctaaacttcttcacccctgagagcatgtcagctggagaaaagcagttcttccttgcccacttgagaagtgcacgcccactcacccaacatcctggtctctaggaaagcctcatgtgaggttcctctttctttcagctcagtgcccatgggcaaggatcatgatttccattccgtgttacaatgacaatatttaatgagcataaccttctcagtctcctgctctcaaatttaggacagagccgctaaggacaaaacaatccctcccgtgctttatgatggcagcaggggctggggagcctctgagggactctttcattctgcagttgtctggaagcctgggtggcgtcatgagctgaaggatcatgctttcctgtcctggctccataggttataggctggctggtgaaaggttcacgtggcccaggctgaacttcattgcctagctttggatgtgctttctgccataaagactgatttttgttcgttctgagccttcaaggaatttgttttttacaactggaatatgctcctgtgtgtgttaacagatcatggatgttttatgttttcactgatcatttaaagagtttgacctcagagctccaggatcatcagtaaatttgtcatgttatatatttatttttttataaatcaagacttctgtgtgctcttaaatatattaaaaacaatttacatttcagg

SEQ ID NO: 1302 - DNA, 1090 bp, Homo sapiens
  source 1..1090: mol_type = unassigned DNA
cagcattctgcattcaaggaatgatctggaagaagccttcattcacttcatggggaagggagcagctgctgagcgcttcttcagtgataaggaaacttttcacgacattgcccaggttgcatcagagttcccaggagcccagcactatgtaggaggaaatgcagctttaattggacagaaatttgcagccaactcagatttaaaggttcttctttgcggtccagttggtccaaagctacatgagcttcttgatgacaatgtctttgttccaccagagtcattgcaggaagtggatgagttccacctcattttagagtatcaagcaggggaggagtggggccagttaaaagctccccatgccaaccgattcatcttctctcacgacctctccaacggggccatgaatatgctggaggtgtttgtgtctagcctggaggagtttcagccagacctggtggtcctctctggattgcacatgatggagggacaaagcaaggagctccagaggaagagactcttggaggttgtaacctccatttctgacatccccactggtattccagttcacctagagctggccagtatgactaacagggagctcatgagcagcattgtccatcagcaggtctttcccgcggtgacttcccttgggctgaatgaacaggagctgttatttctcacccagtcagcctctggacctcactcttctctctcttcctggaacggtgttcctgatgtgggcatggtcagtgacatcctcttctggatcttgaaagaacatgggaggagtaaaagcagagcctcggatctcaccaggatccatttccacacgctggtctaccacatcctggcaactgtggatggacactgggccaaccagctggcagccgtggctagctcgtgtggctgggacacaggcctgcgccacagaaaccatagacaccagccgagtgtctctgagggcaccccaagagttcatgacttcccattcggaggcaggctccaggattgtattaaacccaaacaagccagtagtagaatggcacagagagggaatatccttccacttcacaccagtattggtgtgtaa

SEQ ID NO: 1303 - DNA, 1650 bp, Homo sapiens
  source 1..1650: mol_type = unassigned DNA
gttcgcgcaggtgcggcgcctgggtccccatggcgctgtggcgcggctccgcgtacgcgggcttcctggcacttggccttagtcctgggaatgggaaagatcacagcattctgcattcaaggaatgatctggaagaagccttcattcacttcatggggaagggagcagctgctgagcgcttcttcagtgataaggaaacttttcacgacattgcccaggttgcatcagagttcccaggagcccagcactatgtaggaggaaatgcagctttaattggacagaaatttgcagccaactcagatttaaaggttcttctttgcggtccagttggtccaaagctacatgagcttcttgatgacaatgtctttgttccaccagagtcattgcaggaagtggatgagttccacctcattttagagtatcaagcaggggaggagtggggccagttaaaagctccccatgccaaccgattcatcttctctcacgacctctccaacggggccatgaatatgctggaggtgtttgtgtctagcctggaggagtttcagccagacctggtggtcctctctggattgcacatgatggagggacaaagcaaggagctccagaggaagagactcttggaggttgtaacctccatttctgacatccccactggtattccagttcacctagagctggccagtatgactaacagggagctcatgagcagcattgtccatcagcaggtctttcccgcggtgacttcccttgggctgaatgaacaggagctgttatttctcacccagtcagcctctggacctcactcttctctctcttcctggaacggtgttcctgatgtgggcatggtcagtgacatcctcttctggatcttgaaagaacatgggaggagtaaaagcagagcctcggatctcaccaggatccatttccacacgctggtctaccacatcctggcaactgtggatggacactgggccaaccagctggcagccgtggctgcaggagctcgtgtggctgggacacaggcctgcgccacagaaaccatagacaccagccgagtgtctctgagggcaccccaagagttcatgacttcccattcggaggcaggctccaggattgtattaaacccaaacaagccagtagtagaatggcacagagagggaatatccttccacttcacaccagtattggtgtgtaaagaccccattcgaactgtaggccttggagatgccatttcagccgaaggactcttctattcggaagtacaccctcactattaggaagattcttaggggtaatttttctgaggaaggagaactagccaacttaagaattacaggaagaaagtggtttggaagacagccaaagaaataaaagcagttcttccttgcccacttgagaagtgcacgcccactcacccaacatcctggtctctaggaaagcctcatgtgaggttcctctttctttcagtctgcagttgtctggaagcctgggtggcgtcatgagctgaaggatcatgctttcctgtcctggctccataggttataggctggctggtgaaaggttcacgtggcccaggctgaacttcattgcctagctttggatgtgctttctgccataaagactgatttttgttcgttctgagccttc

SEQ ID NO: 1304 - DNA, 808 bp, Homo sapiens
  source 1..808: mol_type = unassigned DNA
atggctgcaagctgcagggttgtaacctccatttctgacatccccactggtattccagttcacctagagctggccagtatgactaacagggagctcatgagcagcattgtccatcaggtctttcccgcggtgacttcccttgggctgaatgaacaggagctgttatttctcacccagtcagcctctggacctcactcttctctctcttcctggaacggtgttcctgatgtgggcatggtcagtgacatcctcttctggatcttgaaagaacatgggaggagtaaaagcagagcctcggatctcaccaggatccatttccacacgctggtctaccacatcctggcaactgtggatggacactgggccaaccagctggcagccgtggctgcaggagctcgtgtggctgggacacaggcctgcgccacagaaaccatagacaccagccgagtgtctctgagggcaccccaagagttcatgacttcccattcggaggcaggctccaggattgtattaaacccaaacaagccagtagtagaatggcacagagagggaatatccttccacttcacaccagtattggtgtgtaaagaccccattcgaactgtaggccttggagatgccatttcagccgaaggactcttctattcggaagtacaccctcactattaggaagattcttaggggtaatttttctgaggaaggagaactagccaacttaagaattacaggaagaaagtggtttggaagacagccaaagaaataaaagcagattaaactgtatcaggtacattccagcctgttggcaact

SEQ ID NO: 1305 - DNA, 1885 bp, Homo sapiens
  source 1..1885: mol_type = unassigned DNA
ccttacccggcgtgccccgcgcccggaggcgctgacgtggccgccgtcagagccgccatcttgtgggagcaaaaccaacgcctggctcggagcagcagcctctgaggtgtccctggccagtgtccttccacctgtccacaagcatggggaacatcttcgccaacctcttcaagggcctttttggcaaaaaagaaatgcgcatcctcatggtgggcctggatgctgcagggaagaccacgatcctctacaagcttaagctgggtgagatcgtgaccaccattcccaccataggcttcaacgtggaaaccgtggagtacaagaacatcagcttcactgtgtgggacgtgggtggccaggacaagatccggcccctgtggcgccactacttccagaacacacaaggcctgatcttcgtggtggacagcaatgacagagagcgtgtgaacgaggcccgtgaggagctcatgaggatgctggccgaggacgagctccgggatgctgtcctcctggtgttcgccaacaagcaggacctccccaacgccatgaatgcggccgagatcacagacaagctggggctgcactcactacgccacaggaactggtacattcaggccacctgcgccaccagcggcgacgggctctatgaaggactggactggctgtccaatcagctccggaaccagaagtgaacgcgacccccctccctctcactcctcttgccctctgctttactctcatgtggcaaacgtgcggctcgtggtgtgagtgccagaagctgcctccgtggtttggtcaccgtgtgcatcgcaccgtgctgtaaatgtggcagacgcagcctgcggccaggctttttatttaatgtaaatagtttttgtttccaatgaggcagtttctggtactcctatgcaatattactcagctttttttattgtaaaaagaaaaatcaactcactgttcagtgctgagaggggatgtaggcccatgggcacctggcctccaggagtcgctgtgttgggagagccggccacgcccttggctttagagctgtgttgaaatccattttggtggttggtttttaacccaaactcagtgcattttttaaaatagttaagaatccaagtcgagaacacttgaacacacagaagggagaccccgcctagcatagatttgcagttacggcctggatgccagtcgccagcccagctgttcccctcgggaacatgaggtggtggtggcgcagcagactgcgatcaattctgcatggtcacagtagagatccccgcaactcgcttgtccttgggtcaccctgcattccatagccatgtgcttgtccctgtgctcccacggttcccaggggccaggctgggagcccacagccaccccactatgccgcaggccgccctacccaccttcaggcagcctatgggacgcagggccccatctgtccctcggtcgccgtgtggccagagtgggtccgtcgtccccaacactcgtgctcgctcagacactttggcaggatgtctggggcctcaccagcaggagcgcgtgcaagccgggcaggcggtccacctagacccacagcccctcgggagcaccccacctctgtgtgtgatgtagctttctctccctcagcctgcaagggtccgatttgccatcgaaaaagacaacctctacttttttcttttgtattttgataaacactgaagctggagctgttaaatttatcttggggaaacctcagaactggtctatttggtgtcgtggaacctcttactgctttcaatacacgattagtaatcaactgttttgtatacttgttttcagttttcatttcgacaaacaagcactgtaattatagctattagaataaaatctcttaactatt

SEQ ID NO: 1306 - DNA, 1972 bp, Homo sapiens
  source 1..1972: mol_type = unassigned DNA
ccttacccggcgtgccccgcgcccggaggcgctgacgtggccgccgtcagagccgccatcttgtgggagcaaaaccaacgcctggctcggagcagcagcctctgaggtgagggcgaggggcgcgggccggtgtgggccgcagagacgttggagccggcgggggctggggactggcctcggggcgacttgaggtgtccctggccagtgtccttccacctgtccacaagcatggggaacatcttcgccaacctcttcaagggcctttttggcaaaaaagaaatgcgcatcctcatggtgggcctggatgctgcagggaagaccacgatcctctacaagcttaagctgggtgagatcgtgaccaccattcccaccataggcttcaacgtggaaaccgtggagtacaagaacatcagcttcactgtgtgggacgtgggtggccaggacaagatccggcccctgtggcgccactacttccagaacacacaaggcctgatcttcgtggtggacagcaatgacagagagcgtgtgaacgaggcccgtgaggagctcatgaggatgctggccgaggacgagctccgggatgctgtcctcctggtgttcgccaacaagcaggacctccccaacgccatgaatgcggccgagatcacagacaagctggggctgcactcactacgccacaggaactggtacattcaggccacctgcgccaccagcggcgacgggctctatgaaggactggactggctgtccaatcagctccggaaccagaagtgaacgcgacccccctccctctcactcctcttgccctctgctttactctcatgtggcaaacgtgcggctcgtggtgtgagtgccagaagctgcctccgtggtttggtcaccgtgtgcatcgcaccgtgctgtaaatgtggcagacgcagcctgcggccaggctttttatttaatgtaaatagtttttgtttccaatgaggcagtttctggtactcctatgcaatattactcagctttttttattgtaaaaagaaaaatcaactcactgttcagtgctgagaggggatgtaggcccatgggcacctggcctccaggagtcgctgtgttgggagagccggccacgcccttggctttagagctgtgttgaaatccattttggtggttggtttttaacccaaactcagtgcattttttaaaatagttaagaatccaagtcgagaacacttgaacacacagaagggagaccccgcctagcatagatttgcagttacggcctggatgccagtcgccagcccagctgttcccctcgggaacatgaggtggtggtggcgcagcagactgcgatcaattctgcatggtcacagtagagatccccgcaactcgcttgtccttgggtcaccctgcattccatagccatgtgcttgtccctgtgctcccacggttcccaggggccaggctgggagcccacagccaccccactatgccgcaggccgccctacccaccttcaggcagcctatgggacgcagggccccatctgtccctcggtcgccgtgtggccagagtgggtccgtcgtccccaacactcgtgctcgctcagacactttggcaggatgtctggggcctcaccagcaggagcgcgtgcaagccgggcaggcggtccacctagacccacagcccctcgggagcaccccacctctgtgtgtgatgtagctttctctccctcagcctgcaagggtccgatttgccatcgaaaaagacaacctctacttttttcttttgtattttgataaacactgaagctggagctgttaaatttatcttggggaaacctcagaactggtctatttggtgtcgtggaacctcttactgctttcaatacacgattagtaatcaactgttttgtatacttgttttcagttttcatttcgacaaacaagcactgtaattatagctattagaataaaatctcttaactatttc

SEQ ID NO: 1307 - DNA, 2006 bp, Homo sapiens
  source 1..2006: mol_type = unassigned DNA
gcccgcgcgtggacggttgggattagcggccgcgggggccggtgggggtcgtggggcctcccccacccgagtacaggcgagcgagcggcatccgggcggacccccgcctcggggaccgggaaactgaggctcgggcggcctgagacgccgtcaaggtcatgtaggtggtgggggcttgcatcttcgcctcccgactccatccagttcgtgtttgctgtgaagacggtgtccctggccagtgtccttccacctgtccacaagcatggggaacatcttcgccaacctcttcaagggcctttttggcaaaaaagaaatgcgcatcctcatggtgggcctggatgctgcagggaagaccacgatcctctacaagcttaagctgggtgagatcgtgaccaccattcccaccataggcttcaacgtggaaaccgtggagtacaagaacatcagcttcactgtgtgggacgtgggtggccaggacaagatccggcccctgtggcgccactacttccagaacacacaaggcctgatcttcgtggtggacagcaatgacagagagcgtgtgaacgaggcccgtgaggagctcatgaggatgctggccgaggacgagctccgggatgctgtcctcctggtgttcgccaacaagcaggacctccccaacgccatgaatgcggccgagatcacagacaagctggggctgcactcactacgccacaggaactggtacattcaggccacctgcgccaccagcggcgacgggctctatgaaggactggactggctgtccaatcagctccggaaccagaagtgaacgcgacccccctccctctcactcctcttgccctctgctttactctcatgtggcaaacgtgcggctcgtggtgtgagtgccagaagctgcctccgtggtttggtcaccgtgtgcatcgcaccgtgctgtaaatgtggcagacgcagcctgcggccaggctttttatttaatgtaaatagtttttgtttccaatgaggcagtttctggtactcctatgcaatattactcagctttttttattgtaaaaagaaaaatcaactcactgttcagtgctgagaggggatgtaggcccatgggcacctggcctccaggagtcgctgtgttgggagagccggccacgcccttggctttagagctgtgttgaaatccattttggtggttggtttttaacccaaactcagtgcattttttaaaatagttaagaatccaagtcgagaacacttgaacacacagaagggagaccccgcctagcatagatttgcagttacggcctggatgccagtcgccagcccagctgttcccctcgggaacatgaggtggtggtggcgcagcagactgcgatcaattctgcatggtcacagtagagatccccgcaactcgcttgtccttgggtcaccctgcattccatagccatgtgcttgtccctgtgctcccacggttcccaggggccaggctgggagcccacagccaccccactatgccgcaggccgccctacccaccttcaggcagcctatgggacgcagggccccatctgtccctcggtcgccgtgtggccagagtgggtccgtcgtccccaacactcgtgctcgctcagacactttggcaggatgtctggggcctcaccagcaggagcgcgtgcaagccgggcaggcggtccacctagacccacagcccctcgggagcaccccacctctgtgtgtgatgtagctttctctccctcagcctgcaagggtccgatttgccatcgaaaaagacaacctctacttttttcttttgtattttgataaacactgaagctggagctgttaaatttatcttggggaaacctcagaactggtctatttggtgtcgtggaacctcttactgctttcaatacacgattagtaatcaactgttttgtatacttgttttcagttttcatttcgacaaacaagcactgtaattatagctattagaataaaatctcttaactatttc

SEQ ID NO: 1308 - DNA, 1796 bp, Homo sapiens
  source 1..1796: mol_type = unassigned DNA
gtgggagcaaaaccaacgcctggctcggagcagcagcctctgaggtgtccctggccagtgtccttccacctgtccacaagcatggggaacatcttcgccaacctcttcaagggcctttttggcaaaaaagaaatgcgcatcctcatggtgggcctggatgctgcagggaagaccacgatcctctacaagcttaagctgggtgagatcgtgaccaccattcccaccataggcttcaacgtggaaaccgtggagtacaagaacatcagcttcactgtgtgggacgtgggtggccaggacaagatccggcccctgtggcgccactacttccagaacacacaaggcctgatcttcgtggtggacagcaatgacagagagcgtgtgaacgaggcccaggacgagctccgggatgctgtcctcctggtgttcgccaacaagcaggacctccccaacgccatgaatgcggccgagatcacagacaagctggggctgcactcactacgccacaggaactggtacattcaggccacctgcgccaccagcggcgacgggctctatgaaggactggactggctgtccaatcagctccggaaccagaagtgaacgcgacccccctccctctcactcctcttgccctctgctttactctcatgtggcaaacgtgcggctcgtggtgtgagtgccagaagctgcctccgtggtttggtcaccgtgtgcatcgcaccgtgctgtaaatgtggcagacgcagcctgcggccaggctttttatttaatgtaaatagtttttgtttccaatgaggcagtttctggtactcctatgcaatattactcagctttttttattgtaaaaagaaaaatcaactcactgttcagtgctgagaggggatgtaggcccatgggcacctggcctccaggagtcgctgtgttgggagagccggccacgcccttggctttagagctgtgttgaaatccattttggtggttggtttttaacccaaactcagtgcattttttaaaatagttaagaatccaagtcgagaacacttgaacacacagaagggagaccccgcctagcatagatttgcagttacggcctggatgccagtcgccagcccagctgttcccctcgggaacatgaggtggtggtggcgcagcagactgcgatcaattctgcatggtcacagtagagatccccgcaactcgcttgtccttgggtcaccctgcattccatagccatgtgcttgtccctgtgctcccacggttcccaggggccaggctgggagcccacagccaccccactatgccgcaggccgccctacccaccttcaggcagcctatgggacgcagggccccatctgtccctcggtcgccgtgtggccagagtgggtccgtcgtccccaacactcgtgctcgctcagacactttggcaggatgtctggggcctcaccagcaggagcgcgtgcaagccgggcaggcggtccacctagacccacagcccctcgggagcaccccacctctgtgtgtgatgtagctttctctccctcagcctgcaagggtccgatttgccatcgaaaaagacaacctctacttttttcttttgtattttgataaacactgaagctggagctgttaaatttatcttggggaaacctcagaactggtctatttggtgtcgtggaacctcttactgctttcaatacacgattagtaatcaactgttttgtatacttgttttcagttttcatttcgacaaacaagcactgtaattatagctattagaataaaatctcttaactatt

SEQ ID NO: 1309 - DNA, 4105 bp, Homo sapiens
  source 1..4105: mol_type = unassigned DNA
accgcgcagctatcgcgcgatcggggaggtgggaagtatcccgggctgggggtgggggtacgccgcacagctccagtcgccgtcgcggcttccggtgctaggtggagggaaggaaggagggagccggggagtgggccagggcagcagccgggctgaagtcggcttggggagccagagggagcggagcggaacctgcggggcagaggcggcggccgcagcggcgcagctgatagcaggaacaggatcaagtcttccataccagggaccaggccaaaaccagactgccactgcccctacttgggccccactgtccccagaaagcagctgctgtgatcatgggcaatatctttggaaaccttctcaagagcctgattgggaagaaggagatgcgcatcctgatggtgggcctggatgccgcaggaaagaccaccatcctatacaagctgaaactcggggagatcgtcaccaccatccctaccattgggttcaatgtggagacagtggagtataagaacatcagctttacagtgtgggatgtgggtggccaggacaagattcgacccctctggagacactacttccagaacacccaagggttgatatttgtggtcgacagcaatgatcgggagcgagtaaatgaggcccgggaagagctgatgagaatgctggcggaggacgagctccgggatgctgtactccttgtctttgcaaacaaacaggatctgcctaatgctatgaacgctgctgagatcacagacaagctgggcctgcattcccttcgtcaccgtaactggtacattcaggccacctgtgccaccagcggggacgggctgtacgaaggcctggactggctggccaatcagctcaaaaacaagaagtgaaagccagacagccctaacaaagcaccccacccacccctgacatacctactgtcaccctgccccagtcctaccccttcctctccatgcaagtgtggccagggccctgggtatcatgtccacatgcccagcaagagccttgcctcccctgcctcccctcctttttcctgtccacctatatgaccaatccctaattgctgtcctgatgatgagtcattccaatttactggatttaaaacaaaaagttgttacggtttcatggggtggcccctctctctctcaccctctgggtttcgggaggtcgagtggggtattctctttgtttggcagtggttgctgtcctcttggcatctgagtcctttccctgtccccacaagcccttctactccctgtttgcctttcctttgccaccctctccctgttttacatggaaattgcacgggcctctctgtgtttgcgtgcatgtgtgcgcctgtatatacatgtatagagagatatatttgtgggggccggggggagcggggagggggtggagtgaagctcagggcttgcagccaggacactgcccactggagcctgtcatctgccccttccgtgttggtgagattaagggaagaaggtgggagggcattagtcaagccggactgccccagtctttgactggttaccctcctctctgcaggtaggtttttctggatgataggacagatgatggattcttcaccaccattttccttgtactcttctctccacccttcttagggctggaggatggcatttatctctagatgactgttcccaaggagatgccactctgctctgccttactgttgggaaggagagaggaacccactcactcttatcagcttagagtgttcaactgatccttccccaccatcttcagatctgttcctctggagcttgactggggggtggggatggcaagtccatggtgtgtgttagggacccagggcattgggggaagggaggcgaaggcctgaggttttccatcttcattctcttttgttattaggagaaggtgaggcatgggccaatcccattcctgccttccagtgccccaccacccttctgatcttaggggttggatgggtcatctgtccttggtcagaattttctcaccctagtactcctactggcctgaccagggctgactgggtattctaatgaggagctgggaagtggggtgacatagctgaccttagtatcaacccccctcttctccaactcttgttttctagtccaggatatgctaaaggacgaagattttctattgtttccaggccctcagaccatccttgctgtcccttcaccctccatgcccctgccatcctcactcacttctcataaatggatctgggggttagagtggaggaaataaaatcctgaagtggttgtcagtgcttgtgggatgcagtggtcttcaggattctccccgcattattatgtagttgttcagaagctgttgctactgcgtctctctgtctgcagggggcacttgttcctgaggtcctcgcctgggtcctgacttctgtagtttctgtgaagacgtggctgtcctgtgggctcctgtgtgtgctggctgcgccctgagctccgagacagctgcccataacctgctaaggtcagggcccagggccccccacagcatggctgagggaccccttcccagtagggctgtcccaagccccactccatggggccaggtttcctggccacttttgttgatagcagatggatcaatattagtaaccccatccaagattgaactgtgaaagagaggttccaggggtatctccctcagtgccagttacttagtgatgtgttacccaggatgcagcaggtgtgtgcaggtatcttgctctctaggcctgtgtgtgtgtgtgagtgtgtgtgtatatgggtgtgggtgtgtttgtgtgtggtggttgtggggggggtgttggaggttctatttcatttaaaaatgtattcatttccctggccccacagatgcttccctccatactttttatttgctctgtttcctcagatttattttgtcttgccccattgcctctccttccttgaactctttccttttcaatctcaactcattcactgctgttgctcatttgcccttttccatgtattttttcctacttaggattttccactctatctttgtggttcatgaggactttgcctcttctcctgcctcattccctgactttctctagttagatgtcagtcctaaataggttttcctcacttcaggcctcacccctcaccttgtttttttgggggctccagggaccaatctggggctggaaatgttaggaggttgccttggtgctgccccagatctgtccagcagggggcagtaagtgatcttggtagtatccctggctgctaagcccttggcaggggtggtcctttctacattcccattcacttaacagctcttttgggattgggtgtttcattccatttctgcccactccctctcctctcctctctggtaggtttaattttatgctttccctgattccagctttctgcttcctgaggactcccgctccccccaccccaaagtttgtctgtggtgttatagtggtaactgcagttcctcctctggaatgtagactgtatatgtttaataactcaccttctctatccttgctcaaaatgtgggataacgcgatgactgtgaccctggttggaaattaaacttgttttatgcagctttggagccgaccttcatctttgctgtgcagcagccgtgggacagtagtttcatggtgaggggagtcctgtttctggtccctctctccatagtgctccttctttcagcaaaggggtaaaaggcacacttgattgatagagagtaaggttatggaggaacttagtgccactccacactggttatttcttcccatcataccccgcggcgggggagcccaaatgaattgggcatcagagtgtgagggcttcgtgactttcctcctctagttctaaagggtttaaacctgaaatcagctgtatttctcacctgttggtagactgtatggacttcactggctgaagggccctgaacttggagggccccatgtgcctctactctcagatctcctcagccttgcacatgaggtgcttctagtttgaacagagaccccctcactagtctagttctggactttggcagtgaataaacatgaaggataaacgtc

SEQ ID NO: 1310 - DNA, 1089 bp, Homo sapiens
  source 1..1089: mol_type = unassigned DNA
agtcgccgtcgcggcttccggtgctaggtggagggaaggaaggagggagccggggagtgggccagggcagcagccgggctgaagtcggcttggggagccagagggagcggagcggaacctgcggggcagaggcggcggccgcagcggcgcagctgatagcaggaacaggatcaagtcttccataccagggaccaggccaaaaccagactgccactgcccctacttgggccccactgtccccagaaagcagctgctgtgatcatgggcaatatctttggaaaccttctcaagagcctgattgggaagaaggagatgcgcatcctgatggtgggcctggatgccgcaggaaagaccaccatcctatacaagctgaaactcggggagatcgtcaccaccatccctaccattgggttgatatttgtggtcgacagcaatgatcgggagcgagtaaatgaggcccgggaagagctgatgagaatgctggcggaggacgagctccgggatgctgtactccttgtctttgcaaacaaacaggatctgcctaatgctatgaacgctgctgagatcacagacaagctgggcctgcattcccttcgtcaccgtaactggtacattcaggccacctgtgccaccagcggggacgggctgtacgaaggcctggactggctggccaatcagctcaaaaacaagaagtgaaagccagacagccctaacaaagcaccccacccacccctgacatacctactgtcaccctgccccagtcctaccccttcctctccatgcaagtgtggccagggccctgggtatcatgtccacatgcccagcaagagccttgcctcccctgcctcccctcctttttcctgtccacctatatgaccaatccctaattgctgtcctgatgatgagtcattccaatttactggatttaaaacaaaaagttgttacggtttcatggggtggcccctctctctctcaccctctgggtttcgggaggtcgagtggggtattctctttgtttggcagtggttgctgtcctcttggcatctgagtcctttccctgtccccacaagcccttctactccctgtttg

SEQ ID NO: 1311 - DNA, 576 bp, Homo sapiens
  source 1..576: mol_type = unassigned DNA
agagggagcggagcggaacctgcggggcagaggcggcggccgcagcggcgcagctgatagcaggaacagttttattgggaggagatctgctgcaagagtctgattgcttgggtcagtgcaacaggacagaatctagtcgctgcatacctccttccctgtcctcaatcagaacctgtgggctctgaggacatggaaaccatttcttcagtttgtcagatacagggaaaaggatcagagaccacctatagaatacagtcttcttcaaccccacaagtgttttgccaccctcagtagaaccgttctcaacacgcctgtcagtcactagctataggatcaagtcttccataccagggaccaggccaaaaccagactgccactgcccctacttgggccccactgtccccagaaagcagctgctgtgatcatgggcaatatctttggaaaccttctcaagagcctgattgggaagaaggagatgcgcatcctgatggtgggcctggatgccgcaggaaagaccaccatcctatacaagctgaaactcggggagatcgtcaccaccatccctaccattgggtt

SEQ ID NO: 1312 - DNA, 485 bp, Homo sapiens
  source 1..485: mol_type = unassigned DNA
gctcaagggggcgacctgggctgcagttaggttgtcgcctgcaggaggtgtgctgttgagggagaggaaaaccgtccgaggagaggatcaagtcttccataccagggaccaggccaaaaccagactgccactgcccctacttgggccccactgtccccagaaagcagctgctgtgatcatgggcaatatctttggaaaccttctcaagagcctgattgggaagaaggagatgcgcatcctgatggtgggcctggatgccgcaggaaagaccaccatcctatacaagctgaaactcggggagatcgtcaccaccatccctaccattgggttcaatgtggagacagtggagtataagaacatcagctttacagtgtgggatgtgggtggccaggacaagattcgacccctctggagacactacttccagaacacccaagggttgatatttgtggtcgacagcaatgatcgggagcgagtaaatgagg

SEQ ID NO: 1313 - DNA, 807 bp, Homo sapiens
  source 1..807: mol_type = unassigned DNA
gggaaggaaggagggagccggggagtgggccagggcagcagccgggctgaagtcggcttggggagccagagggagcggagcggaacctgcggggcagaggcggcggccgcagcggcgcagctgatagcaggaacagaagtctcagggatcaagtcttccataccagggaccaggccaaaaccagactgccactgcccctacttgggccccactgtccccagaaagcagctgctgtgatcatgggcaatatctttggaaaccttctcaagagcctgattgggaagaaggagatgcgcatcctgatggtgggcctggatgccgcaggaaagaccaccatcctatacaagctgaaactcggggagatcgtcaccaccatccctaccattgggttcaatgtggagacagtggagtataagaacatcagctttacagtgtgggatgtgggtggccaggacaagattcgacccctctggagacactacttccagaacacccaagggttgatatttgtggtcgacagcaatgatcgggagcgagtaaatgaggcccgggaagagctgatgagaatgctggcggaggacgagctccgggatgctgtactccttgtctttgcaaacaaacaggatctgcctaatgctatgaacgctgctgagatcacagacaagctgggcctgcattcccttcgtcaccgtaactggtacattcaggccacctgtgccaccagcggggacgggctgtacgaaggcctggactggctggccaatcagctcaaaaacaagaagtgaaagccagacagccctaacaaag

SEQ ID NO: 1314 - DNA, 557 bp, Homo sapiens
  source 1..557: mol_type = unassigned DNA
aaaacgggccacttgattagcaaagtggtagctgttattttgggggaattcccgtcttgattgcattaaggcgggtctccatctttccaggccaggaggaatgtggtggtggaggtggaggattgtggtatgtggtcaggagtgagaagaaatagtaaggccgtcccggtgagggagaaatgtaacctaaaacctgtctctgctgttgttggattgggtcacccctggtctatggcatgaaagttttattgggaggagatctgctgcaagagtctgattgcttgggtcagtgcaacaggacagaatctagtcgctgcatacctccttccctgtcctcaatcaggatcaagtcttccataccagggaccaggccaaaaccagactgccactgcccctacttgggccccactgtccccagaaagcagctgctgtgatcatgggcaatatctttggaaaccttctcaagagcctgattgggaagaaggagatgcgcatcctgatggtgggcctggatgccgcaggaaagaccaccatcctatacaagctgaaactcgggg

SEQ ID NO: 1315 - DNA, 1660 bp, Homo sapiens
  source 1..1660: mol_type = unassigned DNA
gccgcggccgccgcgtgacgtggcacagccagagcctaaaggctagagccggagctgccgcgccagtcgcctagcaggtcctctaccggcttattcctgtgccggatcttcatcggcacaggggccactgagacgtttctgcctccctctttcttcctccgctctttctcttccctctcgtttagtttgcctgggagcttgaaaggagaaagcacggggtcgccccaaaccccttctgcttctgcccatcacaagtgccactaccgccatgggcctcactatctcctccctcttctcccgactatttggcaagaagcagatgcgcattttgatggttggattggatgctgctggcaagacaaccattctgtataaactgaagttaggggagatagtcaccaccattcctaccattggttttaatgtggaaacagtagaatataagaacatttgtttcacagtatgggatgttggtggtcaagatagaattaggcctctctggaagcattacttccagaatacccagggtcttatttttgtggtagatagcaacgatcgtgaaagaattcaggaagtagcagatgagctgcagaaaatgcttctggtagatgaattgagagatgcagtgctgctactttttgcaaacaaacaggatttgccaaatgctatggccatcagtgaaatgacagataaactagggcttcagtctcttcgtaacagaacatggtatgttcaagccacttgtgcaacacaaggaactggtctgtatgaaggacttgactggctgtcaaatgagctttcaaaacgttaaatgaaattggatatctaaccaaggacatgtttgataaaattggtctaggcttgttacaacaaaattagtttgtatcttggttattaaacagtatctgggactggtttgggcagaatattaaacttattttgttgccaattattgtttaccgagtataatgttgctatttagcaatgtgcttggttttaaagaaattctccttgggaaaaaagtatcctcttttaattttacttcccataagcgtaaatgcctggacatagctcttgtgcaacctttaaataaattgttttgagtgttttttgagccccagacaaataatgttttaaagttatccccttgctactttactgatacctttatcattcctgagacagtttgctaatttaaaaatgtagcattccatttgtatttatttctctcccttgccaaaaagattttctaatactgcttgtaccagccagagaaagatccaaaacactactcagctctcttgcactgaggaaatttttccccctacattgactcctggcctacatcagccaaacttaaccttggtggggtttggatttgatagccaattagttctgtgctggttgcaaagaattgatatttagatggtttttaatactcagcagattgtcttcctttatattgtgtcttttttatgttgcatgttgcttttgttatcagcctgattttttgctcagtatatgatagttctgctgatgttttgtttattgggcagacatatcttcattaagagtttttggaaaactcatcaaattcgatgaatacattttcttcataacccatttggaattattcctaataaaatgataaaatacgtaa

SEQ ID NO: 1316 - DNA, 641 bp, Homo sapiens
  source 1..641: mol_type = unassigned DNA
gcgcaagcgcagtggctcgggcgcaccggaagcgcagggggatggggcggcggtgacgcgattctgtccgcgttggaggggccgggccgctgctggagtcgccgcggccgccgcgtgacgtggcacagccagagcctaaaggctagagccggagctgccgcgccagtcgcctagcagtttgcctgggagcttgaaaggagaaagcacggggtcgccccaaaccccttctgcttctgcccatcacaagtgccactaccgccatgggcctcactatctcctccctcttctcccgactatttggcaagaagcagatgcgcattttgatggttggattggatgctgctggcaagacaaccattctgtataaactgaagttaggggagatagtcaccaccattcctaccattggttttaatgtggaaacagtagaatataagaacatttgtttcacagtatgggatgttggtggtcaagatagaattaggcctctctggaagcattacttccagaatacccagggtcttatttttgtggtagatagcaacgatcgtgaaagaattcaggaagtagcagatgagctgcagaaaatgcttctggtagatgaattgagagatgcagtgctgctactttttgcaaacaaa

SEQ ID NO: 1317 - DNA, 732 bp, Homo sapiens
  source 1..732: mol_type = unassigned DNA
ctgtgaattttaaaaggtgtagcaggccgggcgcggtgagtcaccgcgccaggcccgatcataaacacttttaaagtgaagaggctttccgcttcctcaacataaggagtaaatctttaatgctgcttctaggaaaaaaagtacaagaaaagcaagacttcctccttgccttctctttaaaaagcaacagccgatgaacacgtgttggagcgctctcgccttgacagaattagagatcttcagaatcacttggcgtggtggtcgaagcgtctagccctagctcattagggtgccacagtttctcggcccacaagtcagcttttaaccacttttctccgcaaaagaccggaccggtcttcatgcgtcaactaaagcaagcgtctggtcccgtgtgtgaaacgtgtaagttcatggcatcagggaatacccatcgcgcgtaccgtaatagaagagggcgaggttcctcacctaacccataatgctcagctcgcctttccggaagcaaggactatcaccccgacaataccttcatccgggcggaagcgtctcaccctgagtctgatttggcagtgacgaagcgagtttgcctgggagcttgaaaggagaaagcacggggtcgccccaaaccccttctgcttctgcccatcacaagtgccactaccgccatgggcctcactatctcctccctcttctcccgactatttggcaagaagcagatgcgcattttgatgg

SEQ ID NO: 1318 - DNA, 1103 bp, Homo sapiens
  source 1..1103: mol_type = unassigned DNA
acgggggcgggcccgcggtgacgtcgggagggcagcgacgcgcggaggcggcggcggagcctcctcctgctgctgctgcgccccatccccccgcggccggccagttccagcccgcaccccgcgtcggtgcccgcgcccctccccgggccccgccatgggcctcaccgtgtccgcgctcttttcgcggatcttcgggaagaagcagatgcggattctcatggttggcttggatgcggctggcaagaccacaatcctgtacaaactgaagttgggggagattgtcaccaccatcccaaccataggcttcaatgtagaaacagtggaatataagaacatctgtttcacagtctgggacgtgggaggccaggacaagattcggcctctgtggcggcactacttccagaacactcagggcctcatctttgtggtggacagtaatgaccgggagcgggtccaagaatctgctgatgaactccagaagatgctgcaggaggacgagctgcgggatgcagtgctgctggtatttgccaacaagcaggacatgcccaacgccatgcccgtgagcgagctgactgacaagctggggctacagcacttacgcagccgcacgtggtatgtccaggccacctgtgccacccaaggcacaggtctgtacgatggtctggactggctgtcccacgagctgtcaaagcgctaaccagccaggggcaggcccctgatgcccggaagctcctgcgtgcatccccgggatgaccagactcccggactcctcaggcagtgccctttcctcccacttttcctcccccatagccacaggcctctgctcctgctcctgcctgcatgttctctctgttgttggagcctggagccttgctctctgggcacagaggggtccactctcctgcctgctgggacctatggaaggggcttcctggccaaggccccctcttccagaggaggagcagggatctgggtttccttttttttttctgttttgggtgtactctaggggccaggttgggagggggaaggtgagggcttcgggtggtgctataatgtggcactggatcttgagtaataaatttgctgtggtttgtacacgg

SEQ ID NO: 1319 - DNA, 2776 bp, Homo sapiens
  source 1..2776: mol_type = unassigned DNA
cggccctacctcggccctggcctgaccccggcggccctgcccgcccctccctccagcatcatggccagcccaagaaccaggaaggttcttaaagaagtcagggtgcaggatgagaacaacgtttgttttgagtgtggcgcgttcaatcctcagtgggtcagtgtgacctacggcatctggatctgcctggagtgctcggggagacaccgcgggcttggggttcacctcagctttgtgcgctctgttactatggacaagtggaaggacattgagcttgagaagatgaaagctggtgggaatgctaagttccgagagttcctggagtctcaggaggattacgatccttgctggtccttgcaggagaagtacaacagcagagccgcggccctctttagggataaggtggtcgctctggccgaaggcagagagtggtctctggagtcatcacctgcccagaactggaccccacctcagcccaggacgctgccgtccatggtgcaccgagtctctggccagccgcagagtgtgaccgcctcctcggacaaggcttttgaagactggctgaatgatgacctcggctcctatcaaggggcccaggggaatcgctacgtggggtttgggaacacgccaccgcctcagaagaaagaagatgacttcctcaacaacgccatgtcctccctgtactcgggctggagcagcttcaccactggagccagccggtttgcctcggcagccaaggagggcgctacaaagtttggatcccaagcgagtcagaagttttggggtcacaagcagcagccggagccggcgtccgagctgggccacagcctgaacgagaacgtcctcaagcctgcgcaggagaaggtgaaggagggaaagatttttgatgatgtctccagtggggtctctcagttggcgtccaagggagtcggtagtaagggatggcgggacgtcaccacctttttttcggggaaagcagagggccccttggacagcccctcggagggccacagttatcagaacagcggtctggaccacttccaaaacagcaacatagaccagagcttctgggagacctttggaagtgctgagcccaccaagacccgcaagtccccgagcagcgacagctggacgtgcgcggacacctccaccgagaggaggagctcggacagctgggaggtgtggggctcggcctccaccaacaggaacagcaacagcgacggcggggagggcggggagggcaccaagaaggcagtgccgccggccgtgcccactgatgatggctgggacaaccagaactggtagggcccactgcgcccccgtccccagcgcccccgggcgacttcgtgtttgcactctgccctcgtcgttcctcctccttccatttgacccaagaatcagcaactgcagtgtgaggacagcgtctcgggaggcaggaccctagggagacccgggtgtgcgccgcctgcgcgtggggagtcttcggtgcgtgggggcggcttgctgtccagcctgtgtgggggccgtcccgtcccacactcccctgggcattcttggactcaaggccggggctctgcgtggcttgctgggaggtgggctgcagcacagaggcctgtgactgcgttccagcggccagttcactacgcagtatctctggggcctgggaccagccacgtgccgagctgtcagcgacgtgaggtgtcccttctcgttgagatatttaactttggttttgctctagttctttctttttgaagagagtgactggagtggtaaagatggaaatgctggaaatgatactggcgctcacgctgccatccgaccaccctcggctcccgagtccacgcctgcctgggcctgtgctgtcagacccgcgtcggtcgtaaccctctgtggctcccctgcatcagcaccgtcccaccaccaagttcaccaggttcaccagacacggcctccacaatagccacacccacacctgagctgttctcagtgctggaacttgaccatcctggaacaccctggaagaaaaaggagcgcagggtgggccctcggccctgatgcaggagggtgcgatagcggacgtggccaggcaggaggggccgggttcaggagctgagcaggggatgcctgtgcgtggtgcctgggtctagggaagctccagccccaggatggggctgccctgcacaccggtgcccgccacatgccaaccctcacctccccgaggactggatgatgtgctgccacgtgtgactcgtctcccttgtctgccctgtgtgaccctcagtcttggccagccatgcatgcgcccgaagctcgtgcagtttgtacgtgaggtgctctcctccctgccaccatgctcatcactctggccttggccatgctccctggtcaccccacttcccggtcgccgtctgcagcactcctggagcagcctgggcccttcagcccctgtgctcgtcccaccctagggactcagccacttgcagaacaggatgggaccgagatttcagcgagccctcctggcgcccggtcctccctgtgggcaccagccctcttggtagctggtgtggagggccggtgtccttggctgccacggagggatttgatcaccgaagcagccacctgctgtagttggacctgaggtcagaggcggggcatcagaggctcaaggtgctgagaagccaccgggaaagcagccagcacaaagggcccaggaagccagcccccgagagctgagcgtgggggtctttgagtgtctttctccaagctgagacgt

SEQ ID NO: 1320 - DNA, 3467 bp, Homo sapiens
  source 1..3467: mol_type = unassigned DNA
gggcgaccgggcgcatcctcattgcagtgcggcggccctacctcggccctggcctgaccccggcggccctgcccgcccctccctccagcatcatggccagcccaagaaccaggaaggttcttaaagaagtcagggtgcaggatgagaacaacgtttgttttgagtgtggcgcgttcaatcctcagtgggtcagtgtgacctacggcatctggatctgcctggagtgctcggggagacaccgcgggcttggggttcacctcagctttgtgcgctctgttactatggacaagtggaaggacattgagcttgagaagatgaaagctggtgggaatgctaagttccgagagttcctggagtctcaggaggattacgatccttgctggtccttgcaggagaagtacaacagcagagccgcggccctctttagggataaggtggtcgctctggccgaaggcagagagtggtctctggagtcatcacctgcccagaactggaccccacctcagcccaggacgctgccgtccatggtgcaccgagtctctggccagccgcagagtgtgaccgcctcctcggacaaggcttttgaagactggctgaatgatgacctcggctcctatcaaggggcccaggggaatcgctacgtggggtttgggaacacgccaccgcctcagaagaaagaagatgacttcctcaacaacgccatgtcctccctgtactcgggctggagcagcttcaccactggagccagccggtttgcctcggcagccaaggagggcgctacaaagtttggatcccaagcgagtcagaaggcgtccgagctgggccacagcctgaacgagaacgtcctcaagcctgcgcaggagaaggtgaaggagggaaagatttttgatgatgtctccagtggggtctctcagttggcgtccaagtgccagcgccgtctttgctgccatcagtcccactgctctgcgggccatttggggcgtgcattttgtcctgtttcctggcatgaggcgctctgcggacagacggggagggaagagcaggcctcgctcctcccccccaagcatgtggtgggagctcttgaggtctgtgcacgaggctgtcctcgctgccatgtcccgcacacacctggcaccgctgcagagtggccggggcgtctgtgtctgtccagggagtcggtagtaagggatggcgggacgtcaccacctttttttcggggaaagcagagggccccttggacagcccctcggagggccacagttatcagaacagcggtctggaccacttccaaaacagcaacatagaccagagcttctgggagacctttggaagtgctgagcccaccaagacccgcaagtccccgagcagcgacagctggacgtgcgcggacacctccaccgagaggaggagctcggacagctgggaggtgtggggctcggcctccaccaacaggaacagcaacagcgacggcggggagggcggggagggcaccaagaaggcagtgccgccggccgtgcccactgatgatggctgggacaaccagaactggtagggcccactgcgcccccgtccccagcgcccccgggcgacttcgtgtttgcactctgccctcgtcgttcctcctccttccatttgacccaagaatcagcaactgcagtgtgaggacagcgtctcgggaggcaggaccctagggagacccgggtgtgcgccgcctgcgcgtggggagtcttcggtgcgtgggggcggcttgctgtccagcctgtgtgggggccgtcccgtcccacactcccctgggcattcttggactcaaggccggggctctgcgtggcttgctgggaggtgggctgcagcacagaggcctgtgactgcgttccagcggccagttcactacgcagtatctctggggcctgggaccagccacgtgccgagctgtcagcgacgtgaggtgtcccttctcgttgagatatttaactttggttttgctctagttctttctttttgaagagagtgactggagtggtaaagatggaaatgctggaaatgatactggcgctcacgctgccatccgaccaccctcggctcccgagtccacgcctgcctgggcctgtgctgtcagacccgcgtcggtcgtaaccctctgtggctcccctgcatcagcaccgtcccaccaccaagttcaccaggttcaccagacacggcctccacaatagccacacccacacctgagctgttctcagtgctggaacttgaccatcctggaacaccctggaagaaaaaggagcgcagggtgggccctcggccctgatgcaggagggtgcgatagcggacgtggccaggcaggaggggccgggttcaggagctgagcaggggatgcctgtgcgtggtgcctgggtctagggaagctccagccccaggatggggctgccctgcacaccggtgcccgccacatgccaaccctcacctccccgaggactggatgatgtgctgccacgtgtgactcgtctcccttgtctgccctgtgtgaccctcagtcttggccagccatgcatgcgcccgaagctcgtgcagtttgtacgtgaggtgctctcctccctgccaccatgctcatcactctggccttggccatgctccctggtcaccccacttcccggtcgccgtctgcagcactcctggagcagcctgggcccttcagcccctgtgctcgtcccaccctagggactcagccacttgcagaacaggatgggaccgagatttcagcgagccctcctggcgcccggtcctccctgtgggcaccagccctcttggtagctggtgtggagggccggtgtccttggctgccacggagggatttgatcaccgaagcagccacctgctgtagttggacctgaggtcagaggcggggcatcagaggctcaaggtgctgagaagccaccgggaaagcagccagcacaaagggcccaggaagccagcccccgagagctgagcgtgggggtctttgagtgtctttctccaagctgagacgtgggcggccgcgtggtatctcccgagggctgcttggaccctggtgggctgagtgctccgaggaggggtggactccaccttggacagtgggatgtggtgttccacatgtgcctgtttccacgccagcaccttgacttggcagcatggagccaaggtctgtccccgcccaggagggtgccttcctcgggggtagggggacggcccactctgccccagggagtcccttttgatgggaagtgcagtcagcagcgtggaggtgtctgggccaccttcagaaggtggatgtggtggccgagaccccgtccacggagggtgatggcctttcccttctgcaggtgcgggcaggtgggcctgggaccggtgctggggcctctccttgctgtgtgtgagggcccaggtggaaggcgcggacctgacagcattccaataaagcatacgggaacatg

SEQ ID NO: 1321 - DNA, 3278 bp, Homo sapiens
  source 1..3278: mol_type = unassigned DNA
gtgagaccttgcaaagcgcaacgtagccggaagctggtggcggctggtgggcgaccgggcgcatcctcattgcagtgcggcggccctacctcggccctggcctgaccccggcggccctgcccgcccctccctccagcatcatggccagcccaagaaccaggaaggttcttaaagaagtcagggtgcaggatgagaacaacgtttgttttgagtgtggcgcgttcaatcctcagtgggtcagtgtgacctacggcatctggatctgcctggagtgctcggggagacaccgcgggcttggggttcacctcagctttgtgcgctctgttactatggacaagtggaaggacattgagcttgagaagatgaaagctggtgggaatgctaagttccgagagttcctggagtctcaggaggattacgatccttgctggtccttgcaggagaagtacaacagcagagccgcggccctctttagggataaggtggtcgctctggccgaaggcagagagtggtctctggagtcatcacctgcccagaactggaccccacctcagcccaggacgctgccgtccatggtgcaccgagtctctggccagccgcagagtgtgaccgcctcctcggacaaggcttttgaagactggctgaatgatgacctcggctcctatcaaggggcccaggggaatcgctacgtggggtttgggaacacgccaccgcctcagaagaaagaagatgacttcctcaacaacgccatgtcctccctgtactcgggctggagcagcttcaccactggagccagccggtttgcctcggcagccaaggagggcgctacaaagtttggatcccaagcgagtcagaaggcgtccgagctgggccacagcctgaacgagaacgtcctcaagcctgcgcaggagaaggtgaaggagggaaagatttttgatgatgtctccagtggggtctctcagttggcgtccaaggtccagggagtcggtagtaagggatggcgggacgtcaccacctttttttcggggaaagcagagggccccttggacagcccctcggagggccacagttatcagaacagcggtctggaccacttccaaaacagcaacatagaccagagcttctgggagacctttggaagtgctgagcccaccaagacccgcaagtccccgagcagcgacagctggacgtgcgcggacacctccaccgagaggaggagctcggacagctgggaggtgtggggctcggcctccaccaacaggaacagcaacagcgacggcggggagggcggggagggcaccaagaaggcagtgccgccggccgtgcccactgatgatggctgggacaaccagaactggtagggcccactgcgcccccgtccccagcgcccccgggcgacttcgtgtttgcactctgccctcgtcgttcctcctccttccatttgacccaagaatcagcaactgcagtgtgaggacagcgtctcgggaggcaggaccctagggagacccgggtgtgcgccgcctgcgcgtggggagtcttcggtgcgtgggggcggcttgctgtccagcctgtgtgggggccgtcccgtcccacactcccctgggcattcttggactcaaggccggggctctgcgtggcttgctgggaggtgggctgcagcacagaggcctgtgactgcgttccagcggccagttcactacgcagtatctctggggcctgggaccagccacgtgccgagctgtcagcgacgtgaggtgtcccttctcgttgagatatttaactttggttttgctctagttctttctttttgaagagagtgactggagtggtaaagatggaaatgctggaaatgatactggcgctcacgctgccatccgaccaccctcggctcccgagtccacgcctgcctgggcctgtgctgtcagacccgcgtcggtcgtaaccctctgtggctcccctgcatcagcaccgtcccaccaccaagttcaccaggttcaccagacacggcctccacaatagccacacccacacctgagctgttctcagtgctggaacttgaccatcctggaacaccctggaagaaaaaggagcgcagggtgggccctcggccctgatgcaggagggtgcgatagcggacgtggccaggcaggaggggccgggttcaggagctgagcaggggatgcctgtgcgtggtgcctgggtctagggaagctccagccccaggatggggctgccctgcacaccggtgcccgccacatgccaaccctcacctccccgaggactggatgatgtgctgccacgtgtgactcgtctcccttgtctgccctgtgtgaccctcagtcttggccagccatgcatgcgcccgaagctcgtgcagtttgtacgtgaggtgctctcctccctgccaccatgctcatcactctggccttggccatgctccctggtcaccccacttcccggtcgccgtctgcagcactcctggagcagcctgggcccttcagcccctgtgctcgtcccaccctagggactcagccacttgcagaacaggatgggaccgagatttcagcgagccctcctggcgcccggtcctccctgtgggcaccagccctcttggtagctggtgtggagggccggtgtccttggctgccacggagggatttgatcaccgaagcagccacctgctgtagttggacctgaggtcagaggcggggcatcagaggctcaaggtgctgagaagccaccgggaaagcagccagcacaaagggcccaggaagccagcccccgagagctgagcgtgggggtctttgagtgtctttctccaagctgagacgtgggcggccgcgtggtatctcccgagggctgcttggaccctggtgggctgagtgctccgaggaggggtggactccaccttggacagtgggatgtggtgttccacatgtgcctgtttccacgccagcaccttgacttggcagcatggagccaaggtctgtccccgcccaggagggtgccttcctcgggggtagggggacggcccactctgccccagggagtcccttttgatgggaagtgcagtcagcagcgtggaggtgtctgggccaccttcagaaggtggatgtggtggccgagaccccgtccacggagggtgatggcctttcccttctgcaggtgcgggcaggtgggcctgggaccggtgctggggcctctccttgctgtgtgtgagggcccaggtggaaggcgcggacctgacagcattccaataaagcatacgggaacatgca

SEQ ID NO: 1322 - DNA, 1548 bp, Homo sapiens
  source 1..1548: mol_type = unassigned DNA
agctggtggcggctggtgggcgaccgggcgcatcctcattgcagtgcggcggccctacctcggccctggcctgaccccggcggccctgcccgcccctccctccagcatcatggccagcccaagaaccaggaaggttcttaaagaagtcagggtgcaggatgagaacaacgtttgttttgagtgtggcgcgttcaatcctcagtgggtcagtgtgacctacggcatctggatctgcctggagtgctcggggagacaccgcgggcttggggttcacctcagctttgtgcgctctgttactatggacaagtggaaggacattgagcttgagaagatgaaagctggtgggaatgctaagttccgagagttcctggagtctcaggaggattacgatccttgctggtccttgcaggagaagtacaacagcagagccgcggccctctttagggataagagtctctggccagccgcagagtgtgaccgcctcctcggacaaggcttttgaagactggctgaatgatgacctcggctcctatcaaggggcccaggggaatcgctacgtggggtttgggaacacgccaccgcctcagaagaaagaagatgacttcctcaacaacgccatgtcctccctgtactcgggctggagcagcttcaccactggagccagccggtttgcctcggcagccaaggagggcgctacaaagtttggatcccaagcgagtcagaaggcgtccgagctgggccacagcctgaacgagaacgtcctcaagcctgcgcaggagaaggtgaaggagggaaagatttttgatgatgtctccagtggggtctctcagttggcgtccaaggtccagggagtcggtagtaagggatggcgggacgtcaccacctttttttcggggaaagcagagggccccttggacagcccctcggagggccacagttatcagaacagcggtctggaccacttccaaaacagcaacatagaccagagcttctgggagacctttggaagtgctgagcccaccaagacccgcaagtccccgagcagcgacagctggacgtgcgcggacacctccaccgagaggaggagctcggacagctgggaggtgtggggctcggcctccaccaacaggaacagcaacagcgacggcggggagggcggggagggcaccaagaaggcagtgccgccggccgtgcccactgatgatggctgggacaaccagaactggtagggcccactgcgcccccgtccccagcgcccccgggcgacttcgtgtttgcactctgccctcgtcgttcctcctccttccatttgacccaagaatcagcaactgcagtgtgaggacagcgtctcgggaggcaggaccctagggagacccgggtgtgcgccgcctgcgcgtggggagtcttcggtgcgtgggggcggcttgctgtccagcctgtgtgggggccgtcccgtcccacactcccctgggcattcttggactcaaggccggggctctgcgtggcttgctgggaggtgggctgcagcacagaggcctgtgactgcgt

SEQ ID NO: 1323 - DNA, 1311 bp, Homo sapiens
  source 1..1311: mol_type = unassigned DNA
ggaagctggtggcggctggtgggcgaccgggcgcatcctcattgcagtgcggcggccctacctcggccctggcctgaccccggcggccctgcccgcccctccctccagcatcatggccagcccaagaaccaggaaggttcttaaagaagtcagggtgcaggatgagaacaacctttgtgcgctctgttactatggacaagtggaaggacattgagcttgagaagatgaaagctggtgggaatgctaagttccgagagttcctggagtctcaggaggattacgatccttgctggtccttgcaggagaagtacaacagcagagccgcggccctctttagggataaggtggtcgctctggccgaaggcagagagtggtctctggagtcatcacctgcccagaactggaccccacctcagcccaggacgctgccgtccatggtgcaccgagtctctggccagccgcagagtgtgaccgcctcctcggacaaggcttttgaagactggctgaatgatgacctcggctcctatcaaggggcccaggggaatcgctacgtggggtttgggaacacgccaccgcctcagaagaaagaagatgacttcctcaacaacgccatgtcctccctgtactcgggctggagcagcttcaccactggagccagccggtttgcctcggcagccaaggagggcgctacaaagtttggatcccaagcgagtcagaagttttggggtcacaagcagcagccggagccggcgtccgagctgggccacagcctgaacgagaacgtcctcaagcctgcgcaggagaaggtgaaggagggaaagatttttgatgatgtctccagtggggtctctcagttggcgtccaagggagtcggtagtaagggatggcgggacgtcaccacctttttttcggggaaagcagagggccccttggacagcccctcggagggccacagttatcagaacagcggtctggaccacttccaaaacagcaacatagaccagagcttctgggagacctttggaagtgctgagcccaccaagacccgcaagtccccgagcagcgacagctggacgtgcgcggacacctccaccgagaggaggagctcggacagctgggaggtgtggggctcggcctccaccaacaggaacagcaacagcgacggcggggagggcggggagggcaccaagaaggcagtgccgccggccgtgcccactgatgatggctgggacaaccagaactggtagggcccactgcgcccccgtccccagcgcccccgggcgacttcgtgtttgcactctgccctcgtcg

SEQ ID NO: 1324 - DNA, 995 bp, Homo sapiens
  source 1..995: mol_type = unassigned DNA
acccgcaccccggatctggaatctcccaccggttacgggagtccagagggtccctgcccacgcacgtcgcctcccggggcgcgagcaggaccctgccccgtccgcttcaacacccttttcccgagctccttcggacccaggactcggcctggacacatcccagtcaggtggcctctgaagcccggtggggcttccaccccctaagaacatcatggccagcccaagaaccaggaaggttcttaaagaagtcagggtgcaggatgagaacaacgtttgttttgagtgtggcgcgttcaatcctcagtgggtcagtgtgacctacggcatctggatctgcctggagtgctcggggagacaccgcgggcttggggttcacctcagctttgtgcgctctgttactatggacaagtggaaggacattgagcttgagaagatgaaagctggtgggaatgctaagttccgagagttcctggagtctcaggaggattacgatccttgctggtccttgcaggagaagtacaacagcagagccgcggccctctttagggataaggtggtcgctctggccgaaggcagagagtggtctctggagtcatcacctgcccagaactggaccccacctcagcccaggacgctgccgtccatggtgcaccgagtctctggccagccgcagagtgtgaccgcctcctcggacaaggcttttgaagactggctgaatgatgacctcggctcctatcaaggggcccaggggaatcgctacgtggggtttgggaacacgccaccgcctcagaagaaagaagatgacttcctcaacaacgccatgtcctccctgtactcgggctggagcagcttcaccactggagccagccggtttgcctcggcagccaaggagggcgctacaaagtttggatcccaagcgagtcagaaggcgtccgagctgggccacagcctgaacgagaacgtcctcaagcctgcgcaggagaaggtgaaggagg

SEQ ID NO: 1325 - DNA, 579 bp, Homo sapiens
  source 1..579: mol_type = unassigned DNA
gcaaagcgcaacgtagccggaagctggtggcggctggtgggcgaccgggcgcatcctcattgcagtgcggcggccctacctcggccctggcctgaccccggcggccctgcccgcccctccctccagtcggctgtataggtggatgctcagtttgatgacggtatccgcctgaatgagtcatgctgggggtccaagtcctgcggtcaggagtgagcattcagatgtctgcctcatgatctgtggttcctggacactcttacagaaggcacagaattatggagcagaagggagcccagggtgaacttttggttttgttttgatgaactgcagaaaacagcatcatggccagcccaagaaccaggaaggttcttaaagaagtcagggtgcaggatgagaacaacgtttgttttgagtgtggcgcgttcaatcctcagtgggtcagtgtgacctacggcatctggatctgcctggagtgctcggggagacaccgcgggcttggggttcacctcagctttgtgcgctctgttactatggacaagtggaaggacattgagcttgagaagatgaaagctggtggga

SEQ ID NO: 1326 - DNA, 572 bp, Homo sapiens
  source 1..572: mol_type = unassigned DNA
cttttcccgagctccttcggacccaggactcggcctggacacatcccagtcaggtggcctctgaagcccggtggggcttccaccccctaagaagtgagggtcctaagaaggagatatatttttacatcttggtttcaagcgttcagagtttttgcgttatttttcaagataaactatatttgtacttttgaaggttaggagcatcatggccagcccaagaaccaggaaggttcttaaagaagtcagggtgcaggatgagaacaacgtttgttttgagtgtggcgcgttcaatcctcagtgggtcagtgtgacctacggcatctggatctgcctggagtgctcggggagacaccgcgggcttggggttcacctcagctttgtgcgctctgttactatggacaagtggaaggacattgagcttgagaagatgaaagctggtgggaatgctaagttccgagagttcctggagtctcaggaggattacgatccttgctggtccttgcaggagaagtacaacagcagagccgcggccctctttagggataaggtggtcgctctggccgaaggcagag

SEQ ID NO: 1327 - DNA, 1306 bp, Homo sapiens
  source 1..1306: mol_type = unassigned DNA
gtgtctgggaaggagagaaaatggcggcggagccgaacaagaccgaaatccagactctttttaagaggcttcgcgcagttccaaccaacaaggcctgtttcgactgcggcgccaagaatccgagttgggccagcatcacgtacggtgttttcttgtgcattgactgttccggggtgcaccgctccctgggcgtccatctgagcttcatcagctgggtgccaagaaaggcctaggggcccagaaggtgagcagccagagcttcagtgagattgagcggcaggctcaggtggcagagaagctccgtgagcagcaggcagccgatgccaagaagcaggcggaggagtccatggtcgcctccatgcgtctggcctaccaggagctccagattgatcgtaagaaagaggaaaagaagctacagaatctggaagggaagaagcgagagcaggcagaaaggttgggcatgggcttggtatcccgaagctctgtctcccactccgtgctgtctgagatgcaggtgattgagcaggaaaccccagtgagtgcaaaatcctctcgctcgcagctggacttgtttgacgatgttggtactttcgcctctggacccccaaagtacaaggacaatcccttttccttaggggaaagctttggctcccgctgggatacagatgctgcctggggtatggacagggtagaggagaaggagccagaagtgaccatctcaagcatccggcctatttcagaaagagccacaaaccggagggaagtggagagccggagctcaggcctcgagtctagtgaggcgcgtcagaaattcgcaggagccaaagccatctcatctgacatgttctttgggcgggaggtggatgcagagtatgaggccaggtctcggctgcagcagctctcaggcagcagtgccatcagctcttcagacctctttggggacatggatggagctcacggagcaggaagtgtatctctggggaacgtgctgcctacagcggacattgcccagtttaagcagggtgtcaagtctgtggctgggaaaatggctgtgctggccaatggtgtgatgaattccttgcaggatcgctacggttcctactgatccgagctctgtgactcaggcttacgatggtgacggcaacaagaactccacagttcccaggctggggatgctttgccttgtggaagctggggaggatttgttacttcgtatgtgtggtgtgtgtgtggggtggcctttgaggcgctcactcctgtgaggggaatggtcagtaccagcccttgtcctctgcctgtggactga

SEQ ID NO: 1328 - DNA, 1565 bp, Homo sapiens
  source 1..1565: mol_type = unassigned DNA
gaaatccagactctttttaagaggcttcgcgcagttccaaccaacaaggcctgtttcgactgcggcgccaagaatccgagttgggccagcatcacgtacggtgttttcttgtgcattgactgttccggggtgcaccgctccctgggcgtccatctgagcttcatcaggtccacagagttggattccaactggaactggttccagctgaggtgtatgcaggtcggcgggaatgccaatgcgacggctttttttcgccaacatggatgcacagccaatgatgccaacaccaaatataatagccgagctgcccagatgtaccgggagaagatccggcagctggggagtgcggccctggctaggcatggcactgatccccctgcctgggatgcgccagccactgagccttcagggacccagcagccagccccgtctacagagagcagtggcctggcacagccggagcatggccccaacacagacctgcttggcacctcacccaaagcctcactggaactgaaaagctccatcattggcaagaagaagccagcagcagctaagaaagggctgggtgccaagaaaggcctaggggcccagaaggtgagcagccagagcttcagtgagattgagcggcaggctcaggtggcagagaagctccgtgagcagcaggcagccgatgccaagaagcaggcggaggagtccatggtcgcctccatgcgtctggcctaccaggagctccagattgatcgtaagaaagaggaaaagaagctacagaatctggaagggaagaagcgagagcaggcagaaaggttgggcatgggcttggtatcccgaagctctgtctcccactccgtgctgtctgagatgcaggtgattgagcaggaaaccccagtgagtgcaaaatcctctcgctcgcagctggacttgtttgacgatgttggtactttcgcctctggacccccaaagtacaaggacaatcccttttccttaggggaaagctttggctcccgctgggatacagatgctgcctggggtatggacagggtagaggagaaggagccagaagtgaccatctcaagcatccggcctatttcagaaagagccacaaaccggagggaagtggagagccggagctcaggcctcgagtctagtgaggcgcgtcagaaattcgcaggagccaaagccatctcatctgacatgttctttgggcgggaggtggatgcagagtatgaggccaggtctcggctgcagcagctctcaggcagcagtgccatcagctcttcagacctctttggggacatggatggagctcacggagcaggaagtgtatctctggggaacgtgctgcctacagcggacattgcccagtttaagcagggtgtcaagtctgtggctgggaaaatggctgtgctggccaatggtgtgatgaattccttgcaggatcgctacggttcctactgatccgagctctgtgactcaggcttacgatggtgacggcaacaagaactccacagttcccaggctggggatgctttgccttgtggaagctggggaggatttgttacttc

SEQ ID NO: 1329 - DNA, 2369 bp, Homo sapiens
  source 1..2369: mol_type = unassigned DNA
gcggttgtgtctgggaaggagagaaaatggcggcggagccgaacaagaccgaaatccagactctttttaagaggcttcgcgcagttccaaccaacaaggcctgtttcgactgcggcgccaagaatccgagttgggccagcatcacgtacggtgttttcttgtgcattgactgttccggggtgcaccgctccctgggcgtccatctgagcttcatcaggtccacagagttggattccaactggaactggttccagctgaggtgtatgcaggtcggcgggaatgccaatgcgctgggtgccaagaaaggcctaggggcccagaaggtgagcagccagagcttcagtgagattgagcggcaggctcaggtggcagagaagctccgtgagcagcaggcagccgatgccaagaagcaggcggaggagtccatggtcgcctccatgcgtctggcctaccaggagctccagattgatcgtaagaaagaggaaaagaagctacagaatctggaagggaagaagcgagagcaggcagaaaggttgggcatgggcttggtatcccgaagctctgtctcccactccgtgctgtctgagatgcaggtgattgagcaggaaaccccagtgagtgcaaaatcctctcgctcgcagctggacttgtttgacgatgttggtactttcgcctctggacccccaaagtacaaggacaatcccttttccttaggggaaagctttggctcccgctgggatacagatgctgcctggggtatggacagggtagaggagaaggagccagaagtgaccatctcaagcatccggcctatttcagaaagagccacaaaccggagggaagtggagagccggagctcaggcctcgagtctagtgaggcgcgtcagaaattcgcaggagccaaagccatctcatctgacatgttctttgggcgggaggtggatgcagagtatgaggccaggtctcggctgcagcagctctcaggcagcagtgccatcagctcttcagacctctttggggacatggatggagctcacggagcaggaagtgtatctctggggaacgtgctgcctacagcggacattgcccagtttaagcagggtgtcaagtctgtggctgggaaaatggctgtgctggccaatggtgtgatgaattccttgcaggatcgctacggttcctactgatccgagctctgtgactcaggcttacgatggtgacggcaacaagaactccacagttcccaggctggggatgctttgccttgtggaagctggggaggatttgttacttcgtatgtgtggtgtgtgtgtggggtggcctttgaggcgctcactcctgtgaggggaatggtcagtaccagcccttgtcctctgcctgtggactgagccctttattccctctcacaccaccctccgtgtgttagactcttgtccttctgtcctgcccccacagctgctgctcacttatcctgccatactgggaaagggggttcccccacgatggcttattctgggtccagactttccccaggtagggaaagcggaaggtagaaggctttttttgctggctctagggttcttctagttcgaggccttgggtccccatcctctggaaccagggggaggcctggaaggagttcactgtagacccgtcccatggggaaagaggctgcggacttgctgctgctgctgctgccagtggcctcttctgggtgccaggagaggggaaggacctttgtctgggcgttaccaagggctggaaactttacctggtacctaaaggtttcatttgggatcagaccggagacccttgggttctcccgtctcaccacccctttctacagtaagcacttggaagattgtttcagggtgtctcagggtccctctgtaccatctgctgtggaatgcaggaccctctgtgacattctttatcccttcttccccgggttggtggccatggagggtcttgtctgctgtgattcgactctggatgctgtgagcttgatgctggccagggaagcagaggatgtgagaggcagaggcaggctcctggggctgagctccttcctctgcatcattctgggcttggcctggacagcacccgccagtgagagctgtgggcctcaccctctggcagctgagccaagcactgtcattcttggtgccatcttcccctgccgcaccggcagtctcagcccagcccccacctttgggttgtaggttgggctcccaagcaacacagaccactcttccccttgcccctcccccagagggacttgactttctttctggactgtttgtattgaaacaaagtggtgtcaaaataaagcccctgcagggcctggctccctgttggtctgagtgaagcag

SEQ ID NO: 1330 - DNA, 2976 bp, Homo sapiens
  source 1..2976: mol_type = unassigned DNA
cccgccccggctgcggattggcccggcgcggcgttgattcttgcggccgcggttgtcgtcgccgcccccgtcccgccggctgcccattggtccagatcggactccaatcaccccacccctcggctggcccaggcaccgctgaggccggcctggtgagcccgccctccccgccgtggattggcccgcggcgggacccgtcagccgcggttgtgtctgggaaggagagaaaatggcggcggagccgaacaagaccgaaatccagactctttttaagaggcttcgcgcagttccaaccaacaaggcctgtttcgactgcggcgccaagaatccgagttgggccagcatcacgtacggtgttttcttgtgcattgactgttccggggtgcaccgctccctgggcgtccatctgagcttcatcaggtccacagagttggattccaactggaactggttccagctgaggtgtatgcaggtcggcgggaatgccaatgcgacggctttttttcgccaacatggatgcacagccaatgatgccaacaccaaatataatagccgagctgcccagatgtaccgggagaagatccggcagctggggagtgcggccctggctaggcatggcactgatctttggatagacaacatgagtagtgccgttcctaatcactccccagagaagaaggactctgatttcttcacagaacacactcaaccccctgcctgggatgcgccagccactgagccttcagggacccagcagccagccccgtctacagagagcagtggcctggcacagccggagcatggccccaacacagacctgcttggcacctcacccaaagcctcactggaactgaaaagctccatcattggcaagaagaagccagcagcagctaagaaagggctgggtgccaagaaaggcctaggggcccagaaggtgagcagccagagcttcagtgagattgagcggcaggctcaggtggcagagaagctccgtgagcagcaggcagccgatgccaagaagcaggcggaggagtccatggtcgcctccatgcgtctggcctaccaggagctccagattgatcgtaagaaagaggaaaagaagctacagaatctggaagggaagaagcgagagcaggcagaaaggttgggcatgggcttggtatcccgaagctctgtctcccactccgtgctgtctgagatgcaggtgattgagcaggaaaccccagtgagtgcaaaatcctctcgctcgcagctggacttgtttgacgatgttggtactttcgcctctggacccccaaagtacaaggacaatcccttttccttaggggaaagctttggctcccgctgggatacagatgctgcctggggtatggacagggtagaggagaaggagccagaagtgaccatctcaagcatccggcctatttcagaaagagccacaaaccggagggaagtggagagccggagctcaggcctcgagtctagtgaggcgcgtcagaaattcgcaggagccaaagccatctcatctgacatgttctttgggcgggaggtggatgcagagtatgaggccaggtctcggctgcagcagctctcaggcagcagtgccatcagctcttcagacctctttggggacatggatggagctcacggagcaggaagtgtatctctggggaacgtgctgcctacagcggacattgcccagtttaagcagggtgtcaagtctgtggctgggaaaatggctgtgctggccaatggtgtgatgaattccttgcaggatcgctacggttcctactgatccgagctctgtgactcaggcttacgatggtgacggcaacaagaactccacagttcccaggctggggatgctttgccttgtggaagctggggaggatttgttacttcgtatgtgtggtgtgtgtgtggggtggcctttgaggcgctcactcctgtgaggggaatggtcagtaccagcccttgtcctctgcctgtggactgagccctttattccctctcacaccaccctccgtgtgttagactcttgtccttctgtcctgcccccacagctgctgctcacttatcctgccatactgggaaagggggttcccccacgatggcttattctgggtccagactttccccaggtagggaaagcggaaggtagaaggctttttttgctggctctagggttcttctagttcgaggccttgggtccccatcctctggaaccagggggaggcctggaaggagttcactgtagacccgtcccatggggaaagaggctgcggacttgctgctgctgctgctgccagtggcctcttctgggtgccaggagaggggaaggacctttgtctgggcgttaccaagggctggaaactttacctggtacctaaaggtttcatttgggatcagaccggagacccttgggttctcccgtctcaccacccctttctacagtaagcacttggaagattgtttcagggtgtctcagggtccctctgtaccatctgctgtggaatgcaggaccctctgtgacattctttatcccttcttccccgggttggtggccatggagggtcttgtctgctgtgattcgactctggatgctgtgagcttgatgctggccagggaagcagaggatgtgagaggcagaggcaggctcctggggctgagctccttcctctgcatcattctgggcttggcctggacagcacccgccagtgagagctgtgggcctcaccctctggcagctgagccaagcactgtcattcttggtgccatcttcccctgccgcaccggcagtctcagcccagcccccacctttgggttgtaggttgggctcccaagcaacacagaccactcttccccttgcccctcccccagagggacttgactttctttctggactgtttgtattgaaacaaagtggtgtcaaaataaagcccctgcagggcctggctccctgttggtctgagtgaa

SEQ ID NO: 1331 - DNA, 2857 bp, Homo sapiens
  source 1..2857: mol_type = unassigned DNA
gggccagcggcgcggctgaagcgagggcggggagggaaagcgagcggcgcctgcgccccggcggtggacgggcccggtcgtgggcggggattggggcggagcctgaccgttacgcgcagccccgcccccgcggcctcgtcgctcctgctgaggcggtagccgcttttcgtcgactcttaccggttggctgggccagctgcgccgcggctcacagctgacgatgggggaccccagcaagcaggacatcttgaccatcttcaagcgcctccgctcggtgcccactaacaaggtgtgttttgattgtggtgccaaaaatcccagctgggcaagcataacctatggagtgttcctttgcattgattgctcagggtcccaccggtcacttggtgttcacttgagttttattcgatctacagagttggattccaactggtcatggtttcagttgcgatgcatgcaagtcggaggaaacgctagtgcatcttccttttttcatcaacatgggtgttccaccaatgacaccaatgccaagtacaacagtcgtgctgctcagctctatagggagaaaatcaaatcgctcgcctctcaagcaacacggaagcatggcactgatctgtggcttgatagttgtgtggttccacctttgtcccctccaccaaaggaggaagatttttttgcctctcacgtttctcctgaggtgagtgacacagcgtgggcatcagcaatagcagaaccatcttctttaacatcaaggcctgtggaaaccactttggaaaataatgaaggtggacaagagcaaggaccaagtgtggaaggtcttaatgtaccaacaaaggctactttagaggtatcctctatcataaaaaagaaaccaaatcaagctaaaaaaggccttggggccaaaaaaggaagtttgggagctcagaaactggcaaacacatgctttaatgaaattgaaaaacaagctcaagctgcggataaaatgaaggagcaggaagacctggccaaggtggtatctaaagaagaatcaattgtttcatcattacgattagcctataaggatcttgaaattcaaatgaagaaagacgaaaagatgaacattagtggcaaaaaaaatgttgactcagacagactcggcatgggatttggaaattgcagaagtgttatttcacattcagtgacttcagatatgcagaccatagagcaggaatcacccattatggcaaaaccaagaaaaaagtataatgatgacagtgacgattcatattttacttccagctcaagttactttgacgagccagtggagttaaggagcagttctttctctagctgggatgacagttcagattcctattggaaaaaagagaccagcaaagatactgaaacagttctgaaaaccacaggctattcagacagacctactgctcgccgcaagccagattatgagccagttgaaaatacagatgaggcccagaagaagtttggcaatgtcaaggccatttcatcagatatgtattttggaagacaatcccaggctgattatgagaccagggcccgcctagagaggctgtcggcaagttcctccataagctcggctgatctgttcgaggagccgaggaagcagccagcagggaactacagcctgtccagtgtgctgcccaacgcccccgacatggcgcagttcaagcagggagtgagatcggttgctggaaaactctccgtctttgctaatggagtcgtgacttcaattcaggatcgctacggttcttaatactgaagtcatgatgtgtatttcctggagaaattcctctttaaatgaacaagtaaccacatctcaggcggcagtgaagtccagatagttttgcagattgttttgctactttttcatatggtatatgtttctgatttttaatatttcttttgagaaattctgagttctgatgtaggagctttcctgtgatttctgtttcacgttccttcctgtcacaccctcctttggcgtctctgtgtatatccttgctttattttcttggaacctttgatttcaacactgagggcctggagacctcggctcctcctgctcctgaaccaggaggcttcatgtgggggaggaggagaggtctccatgtgacacatgggctcagggctgccagaatcagcggatgctggatgggcctgcagaaacaacactcaccacacacacttccttcaaaagaccaaaagtgactggtgtctcgtgtgacagattgcttcatttatgtttctacatagtaaggtgactgccaaataatatttgaagtcatctgtctctttgtaaattattttatatgacctataaatttaaaaatgtttttcagtgagtgcttttaacaaacttaagcttctgccctgccaagggaattaatgttatcttgtgaaaggtgttgctgtttgaattgatgagaaatggaagatgagaactccctaagagttctcataataaatcatctcatcacaaatcaatacggtatacagagttaaagtggaatgaggtaagaagatacagctacagaaaatagttgcgtgtatgggagaacagtcattgtaattgggtagttttgttaataaatatttttaaatcttgcttttcagaaattaccgaatgtgtataaacaaataaagaaaaataatttagctgtgttttagacagcattagaatatattgttcagcacagtaaaatatatttgaaatttgataagccaaaaatgtggttttgaatgaatattttgtgaatctttcttaaaagctcaaatttgtagacttctaaatagaataaacacttgcagcagatggcattgcctacatttttccctgaaa

SEQ ID NO: 1332 - DNA, 1640 bp, Homo sapiens
  source 1..1640: mol_type = unassigned DNA
ctcgtcgctcctgctgaggcggtagccgcttttcgtcgactcttaccggttggctgggccagctgcgccgcggctcacagctgacgatgggggaccccagcaagcaggacatcttgaccatcttcaagcgcctccgctcggtgcccactaacaaggtgtgttttgattgtggtgccaaaaatcccagctgggcaagcataacctatggagtgttcctttgcattgattgctcagggtcccaccggtcacttggtgttcacttgagttttattcgatctacagagttggattccaactggtcatggtttcagttgcgatgcatgcaagtcggaggaaacgctagtgcagtgagtgacacagcgtgggcatcagcaatagcagaaccatcttctttaacatcaaggcctgtggaaaccactttggaaaataatgaaggtggacaagagcaaggaccaagtgtggaaggtcttaatgtaccaacaaaggctactttagaggtatcctctatcataaaaaagaaaccaaatcaagctaaaaaaggccttggggccaaaaaaggaagtttgggagctcagaaactggcaaacacatgctttaatgaaattgaaaaacaagctcaagctgcggataaaatgaaggagcaggaagacctggccaaggtggtatctaaagaagaatcaattgtttcatcattacgattagcctataaggatcttgaaattcaaatgaagaaagacgaaaagatgaacattagtggcaaaaaaaatgttgactcagacagactcggcatgggatttggaaattgcagaagtgttatttcacattcagtgacttcagatatgcagaccatagagcaggaatcacccattatggcaaaaccaagaaaaaagtataatgatgacagtgacgattcatattttacttccagctcaagttactttgacgagccagtggagttaaggagcagttctttctctagctgggatgacagttcagattcctattggaaaaaagagaccagcaaagatactgaaacagttctgaaaaccacaggctattcagacagacctactgctcgccgcaagccagattatgagccagttgaaaatacagatgaggcccagaagaagtttggcaatgtcaaggccatttcatcagatatgtattttggaagacaatcccaggctgattatgagaccagggcccgcctagagaggctgtcggcaagttcctccataagctcggctgatctgttcgaggagccgaggaagcagccagcagggaactacagcctgtccagtgtgctgcccaacgcccccgacatggcgcagttcaagcagggagtgagatcggttgctggaaaactctccgtctttgctaatggagtcgtgacttcaattcaggatcgctacggttcttaatactgaagtcatgatgtgtatttcctggagaaattcctctttaaatgaacaagtaaccacatctcaggcggcagtgaagtccagatagttttgcagattgttttgctactttttcatatggtatatgtttctgatttttaatatttcttttgagaaattctgagttctgatgtaggagctttcctgtgatttctgtttcacgttccttcctgtcacacc

SEQ ID NO: 1333 - DNA, 1650 bp, Homo sapiens
  source 1..1650: mol_type = unassigned DNA
ttttcgtcgactcttaccggttggctgggccagctgcgccgcggctcacagctgacgatgggggaccccagcaagcaggacatcttgaccatcttcaagcgcctccgctcggtgcccactaacaaggtgtgttttgattgtggtgccaaaaatcccagctgggcaagcataacctatggagtgttcctttgcattgattgctcagggtcccaccggtcacttggtgttcacttgagttttattcgatctacagagttggattccaactggtcatggtttcagttgcgatgcatgcaagtcggaggaaacgctagtgcactgtggcttgatagttgtgtggttccacctttgtcccctccaccaaaggaggaagatttttttgcctctcacgtttctcctgaggtgagtgacacagcgtgggcatcagcaatagcagaaccatcttctttaacatcaaggcctgtggaaaccactttggaaaataatgaaggtggacaagagcaaggaccaagtgtggaaggtcttaatgtaccaacaaaggctactttagaggtatcctctatcataaaaaagaaaccaaatcaagctaaaaaaggccttggggccaaaaaaggaagtttgggagctcagaaactggcaaacacatgctttaatgaaattgaaaaacaagctcaagctgcggataaaatgaaggagcaggaagacctggccaaggtggtatctaaagaagaatcaattgtttcatcattacgattagcctataaggatcttgaaattcaaatgaagaaagacgaaaagatgaacattagtggcaaaaaaaatgttgactcagacagactcggcatgggatttggaaattgcagaagtgttatttcacattcagtgacttcagatatgcagaccatagagcaggaatcacccattatggcaaaaccaagaaaaaagtataatgatgacagtgacgattcatattttacttccagctcaagttactttgacgagccagtggagttaaggagcagttctttctctagctgggatgacagttcagattcctattggaaaaaagagaccagcaaagatactgaaacagttctgaaaaccacaggctattcagacagacctactgctcgccgcaagccagattatgagccagttgaaaatacagatgaggcccagaagaagtttggcaatgtcaaggccatttcatcagatatgtattttggaagacaatcccaggctgattatgagaccagggcccgcctagagaggctgtcggcaagttcctccataagctcggctgatctgttcgaggagccgaggaagcagccagcagggaactacagcctgtccagtgtgctgcccaacgcccccgacatggcgcagttcaagcagggagtgagatcggttgctggaaaactctccgtctttgctaatggagtcgtgacttcaattcaggatcgctacggttcttaatactgaagtcatgatgtgtatttcctggagaaattcctctttaaatgaacaagtaaccacatctcaggcggcagtgaagtccagatagttttgcagattgttttgctactttttcatatggtatatgtttctgatttttaatatttcttttgagaaattctgagttctgatgta

SEQ ID NO: 1334 - DNA, 817 bp, Homo sapiens
  source 1..817: mol_type = unassigned DNA
tctcgccttgtttcaggtgagtgacacagcgtgggcatcagcaatagcagaaccatcttctttaacatcaaggcctgtggaaaccactttggaaaataatgaaggtggacaagagcaaggaccaagtgtggaaggtcttaatgtaccaacaaaggctactttagaggtatcctctatcataaaaaagaaaccaaatcaagctaaaaaaggccttggggccaaaaaaggaagtttgggagctcagaaactggcaaacacatgctttaatgaaattgaaaaacaagctcaagctgcggataaaatgaaggagcaggaagacctggccaaggtggtatctaaagaagaatcaattgtttcatcattacgattagcctataaggatcttgaaattcaaatgaagaaagacgaaaagatgaacattagtggcaaaaaaaatgttgactcagacagactcggcatgggatttggaaattgcagaagtgttatttcacattcagtgacttcagatatgcagaccatagagcaggaatcacccattatggcaaaaccaagaaaaaagtataatgatgacagtgacgattcatattttacttccagctcaagacctactgctcgccgcaagccagattatgagccagttgaaaatacagatgaggcccagaagaagtttggcaatgtcaaggccatttcatcagatatgtattttggaagacaatcccaggctgattatgagaccagggcccgcctagagaggctgtcggcaagttcctccataagctcggctgatctgttcgaggagccgaggaagcagccagca

SEQ ID NO: 1335 - DNA, 542 bp, Homo sapiens
  source 1..542: mol_type = unassigned DNA
ctcgtcgctcctgctgaggcggtagccgcttttcgtcgactcttaccggttggctgggccagctgcgccgcggctcacagctgacgatgggggaccccagcaagcaggacatcttgaccatcttcaagcgcctccgctcggtgcccactaacaaggtgtgttttgattgtggtgccaaaaatcccagctgggcaagcataacctatggagtgttcctttgcattgattgctcagggtcccaccggtcacttggtgttcacttgagttttattcgatctacagagttggattccaactggtcatggtttcagttgcgatgcatgcaagtcggaggaaacgctagtgcagtgagtgacacagcgtgggcatcagcaatagcagaaccatcttctttaacatcaaggcctgtggaaaccactttggaaaataatgaaggtggacaagagcaaggaccaagtgtggaaggtcttaatgtaccaacaaaggctactttagaggtatcctctatcataaaaaagaaaccaaatcaagctaaaaaaggc

SEQ ID NO: 1336 - DNA, 7225 bp, Homo sapiens
  source 1..7225: mol_type = unassigned DNA
gcggtgcctctgagagccgccgccacctcgtccctcagttcccggcagacagccgcccgggccgggctccctcaccgccaccagggccggagggacgagtgagaggggcggccgggacgcgacccccgggccgggagaagcggaggcccgacgggcgcggccctcgaggtacggcttcttgggggcggcgaggacctcgacgcccttcgccgacaccgcggctggtcccgctcgcccgccccttcctgatcctgccgctgccctccacgcctccaatcccccacctccaccccctctcctttctctcttctcttccttcctctcctcctcctcccctccagccgctgggagccgcgggtcggacgagccgccgcctccttctctgcgtccatgtatgaggggaagaagacgaagaacatgttcctgacccgggctctggagaagatattggccgacaaggaagtgaagaaggcgcatcactcccagctgcgcaaagcttgcgaggtggcgttagaggaaataaaagcggaaactgaaaaacagagtcctcctcatggagaagcaaaagctggatcaagcacccttccaccagtgaaatcaaagacaaattttattgaagcagacaagtacttcttgccttttgagttggcatgccagtccaaatgtcctcgcatagttagtacatctctagattgcttacagaaacttattgcttatgggcacttgactggcaatgctccagatagtacaacaccaggcaaaaaattaattgatagaattattgaaacaatatgtggctgctttcagggccctcagacagatgaaggagttcagctgcagataataaaggctttacttactgcagtaacatcacaacacatagaaattcatgaagggactgtactgcaagctgtgagaacatgttacaatatctacttagcaagcaaaaatctcatcaatcagacaacagccaaagctactctcactcagatgctaaatgttatctttgcacgcatggaaaaccaagcattacaggaagcaaaacaaatggaaaaagaaaggcatcggcagcatcatcatctgttacagtctccagtaagccatcacgagcctgaatcacctcaacttagatatttgccacctcagactgttgatcatatatcccaagaacacgaaggggaccttgacctccatacaaatgatgtagataaaagtcttcaggatgacacagagcctgaaaatggatctgatatttccagtgcagaaaatgaacagactgaagctgatcaggcaactgcagctgaaacattatctaaaaatgaagtgttatatgacggagaaaaccatgattgtgaggaaaagccacaagacattgtacagaacattgtagaagaaatggtgaacattgttgttggagatatgggagaagggactactataaatgcaagtgcagatggcaacattggaactatagaggatggtagtgacagtgaaaatattcaagcaaatggaattccaggaacaccaatttctgttgcatatacaccatccttacctgatgatagattgtcagtctcttccaatgatactcaggaatctggaaattcttcaggaccttcacctggtgctaagttttcccacattttacaaaaggatgcctttctagtattcaggtcattgtgtaaactgtcaatgaaaccactgtcagatggaccaccagatccaaagtctcatgaactacgatccaagattctttcattgcagttacttctatccattctgcagaatgcaggacctattttcaggacaaatgagatgtttattaatgctattaagcagtatctttgtgttgcactctcaaaaaatggagtctcatctgttccagaggtttttgagctttctctttctatatttcttactttgttgtcaaatttcaagacacatctgaagatgcaaattgaggtgttctttaaagaaattttcttatacattttggaaacttctaccagctcatttgatcacaaatggatggttattcagacactgacgaggatttgtgcagatgctcagagtgtagtggatatttatgtaaactatgactgtgacttaaatgcagccaatatatttgaaagactagtaaatgatctatcaaaaattgctcaaggaaggggcagtcaagaacttggtatgagtaatgttcaggaattgagcctgaggaaaaaaggtttagaatgcttagtgtcgattttgaagtgtatggttgaatggagtaaggatcagtatgtgaatcccaactcccagacaactcttggtcaggaaaaaccctcagagcaagagatgagtgaaatcaaacaccctgagacaataaacagatacggaagtttaaattccctggagtcaacatcatcatcaggaataggcagctacagtacacagatgtctggcactgataatccagaacaatttgaggtcctaaagcaacaaaaagaaataatagaacaagggatagatttatttaataagaaaccaaagagaggaatacagtacctccaagaacaagggatgcttggcaccacacctgaagatattgcccaattcttacatcaagaggaaagattagactctactcaagtgggtgagttcctgggagataatgataaatttaacaaagaagtcatgtatgcatatgtggaccaacatgacttttcaggaaaagacttcgtttcagcccttcgtatgtttctagaaggatttcgtcttccaggggaagctcagaaaatcgatcgattaatggaaaaatttgctgcaagatacctagaatgcaaccaaggacaaactctctttgctagtgcggatacagcttatgttttggcttattcaattatcatgttgaccacagaccttcacagtccacaggtgaaaaataaaatgacaaaggaacaatacattaagatgaatagaggtatcaatgacagtaaagaccttcctgaagagtatctatcagccatctataatgaaatagctgggaaaaagatatcaatgaaagaaacaaaagaactaacaatccctacaaaatcaagtaaacagaatgtagccagtgaaaaacaaagaagacttctgtataacttagaaatggagcagatggccaagacagctaaagcactcatggaggccgtgagccatgttcaggcaccctttacaagtgcaacacatttggagcatgtgaggcccatgtttaagttggcttggacgccttttctggctgcattcagtgtgggtctacaagattgtgatgatactgaagtagcctctctttgcctggaaggtataagatgtgcaatcagaattgcatgcattttcagcattcagctggagagagatgcatatgtccaggcactagcaagatttaccttactcacagtgagttccggtattactgaaatgaaacagaagaacattgacacaataaaaacacttatcacagtggctcatacagatggaaattatttaggaaattcatggcatgagattctgaagtgcatcagtcagttggagctggcacagcttataggaactggagtgaaacctcgatacatttctggaacagtgcgaggcagagaaggatctcttactggaacaaaagatcaggctcctgatgaatttgtgggtttagggctagttggaggaaatgtggactggaaacagatagcaagtattcaggaatccattggagaaaccagttctcagagtgttgttgttgctgtagatagaatattcacaggatctacaaggctagatggaaatgccattgtggattttgtccgttggctctgtgctgtgtctatggatgaattactttccacgacacacccaagaatgtttagtctacaaaaaatagtagaaatatcatattacaacatgggaagaataagattacagtggtctcgaatttgggaagttattggagatcattttaataaggttgggtgtaatcctaatgaagatgtagctatttttgcagtagactccttgaggcagttgtcaatgaagttcttagagaaaggggagcttgctaacttcagattccagaaggatttcttaagaccttttgaacatataatgaaacggaacaggtctccaacaattcgagatatggttgtacggtgtatagcacagatggttaattctcaagctgctaacattcgatctggatggaagaacattttctctgtatttcatctagctgcatctgatcaagatgaaagcatagtggaacttgcattccaaacaaccgggcacattgtcacccttgtatttgaaaaacactttccagcgaccattgattctttccaggatgcagtgaagtgtttgtctgaatttgcgtgcaatgcagctttcccagacacaagtatggaagcaattcgacttattcgccattgtgcaaaatatgtgtctgatagacctcaggctttcaaggaatacacaagcgatgatatgaacgtagcacctgaagacagggtgtgggtgagaggatggttcccaattctctttgagttatcctgtatcatcaatagatgcaaattagatgtaagaaccaggggtttaacagtaatgtttgaaataatgaaaacatatggccacacttatgagaaacactggtggcaggatttatttagaattgttttcagaatctttgacaatatgaaattgccagaacaacagacagagaaagctgaatggatgacaacaacttgcaatcatgcactttatgcaatctgtgatgtattcactcagtatttagaagtactcagtgatgtacttttggatgacatttttgctcagctctactggtgtgtgcagcaagacaatgagcagttagcgcgatctggtacaaactgtttagagaatgttgttattctgaatggtgaaaaatttaccctagaaatctgggataaaacttgcaactgcacactggatatcttcaaaaccacaatcccacatgcgctgttgacctggcgacccaattctggagaaactgcccccccacctccatctcctgtaagtgaaaagccattggatacaatatcacagaagtctgtagatattcatgattctattcaaccaaggtctgtggataacagaccacaagcaccactggtttctgcgtctgctgttaatgaagaagtcagcaaaattaaatctacagcaaaatttccagaacaaaaattgtttgctgccctgttgattaaatgtgttgtgcagctggaactcatccagactatcgacaacattgtcttcttcccagccacaagtaagaaagaagatgcagaaaacttagctgcagcacagagagatgcggtggactttgatgttcgcgttgatactcaagaccaaggaatgtaccgctttttaacatcacaacaactttttaagctactggactgcttattagagtcacatagatttgcaaaagcgtttaattccaacaacgaacagaggactgccctgtggaaagcaggattcaaaggcaaatccaagcccaaccttctgaagcaggagaccagcagcctggcctgtgggctgcgcattctcttccggatgtacatggatgagagccgcgttagtgcctgggaggaggtccagcagaggcttttgaatgtctgcagtgaagcactaagttacttcctcactctaacatcagaaagtcatcgagaagcctggactaacttactgcttttgtttctaactaaagttctaaagataagtgataataggtttaaagctcatgcatcattctactaccctctcttatgtgaaattatgcaatttgacttgattcctgaacttcgtgctgttcttagaagattttttctgcgaatcggagtagtttttcagatatcacaaccacctgaacaggaacttggaataaacaagcaatgatgggaacttaatatttttgttggcatttacatccctctgctctttaaaaggacgctggagctgaggtttcctacctgaaaaatgatttctctggattgcagtgtctgagttactggtaaagatgcttagaagtcttactcaaacttgcaacactccagtcccttttagtgctggtggattttgtgtgttatattggcctcatgttgagcagaaagcctgtttaaacagtgtcagctcatgctcacgggtccttccctgtcttccacggcaggaaaagccccacgtttttggcaggtgtggaagtgaaacttacccaaagaactatagatgtaaagattgaacttctacaagaagtacaactcaggagagctgtattttgaaggataaaatgtttataattggggagtggggagagaagaagaaattattgttcatggtaaaagatatttagcaactatggtattcttattctgaagatttttgcacactcaggctatctgagatactggtaatcatcctgtgaaaaatgtacagagatgcaggtctgtaatataaaaatcttaaaacattatatagttcttcctgcactgttttctttattttcttattcatttgctaaatacccataatattttgtcaaatgcactaaacatttgggtggaactttcttttttattttatagggatttttagttttgccctttttggtaggtggtgattttgaggctgtaacatgcccagaagctgttgtggccgacacttcaacaatagggaaaaaaaggtagaaaatatccctactgacagtaactacctgtcacatatttctcttaggacttttaaagatgagccattaaaatagaatgatcctttatggaccaaaacttgaatcactgcaaaatgaatccagattgctgtcattttcttttcttttgggtggtggggcttgatgtagattttactctatgtacagaatttaacgttgaatatattaaaataacaaatctggcatggtttgcggaggttagatttactggaaatgtattcatactgtgaattgtgctctgatggttaaaagacaagattgtcaagcattccgtattaacagtggatgtagaaaattttttcagatggacaaaatgtatatggtacagatgtaaagttttctatgtaaaaaattctgtacaactttctgtacaatattgattcccatctggcatattctaatcaggttataggtcaataaagtttttgaattatttcatcagtgcaatcaaaacctgtataa

SEQ ID NO: 1337 - DNA, 8852 bp, Homo sapiens
  source 1..8852: mol_type = unassigned DNA
atgcaggagagccagaccaagagcatgttcgtgtcccgggccctggagaagatcctagccgacaaggaggtgaagcggccccagcactcccagctgcgcagggcctgccaggtggcgctcgatgaaattaaagcagaaatagaaaagcagaggcttggcactgctgcaccaccaaaggcaaacttcattgaagctgacaagtattttcttccattcgagctagcttgccagtccaagtccccaagggtagtcagcacatcccttgactgcttgcagaaactcatcgcatacgggcacatcactggcaacgcccctgacagtggagcccctgggaagcggctgatcgacagaattgttgaaaccatttgcagttgttttcagggccctcagactgatgaaggggttcagttacaaataattaaggctcttctgactgcagtgacttccccacacattgaaattcatgagggtactatcctgcagacagtgagaacatgttacaatatctatttggccagcaaaaatctcatcaatcaaaccactgccaaggctacccttactcagatgctgaacgtcattttcacccgcatggaaaaccaagtgttgcaggaggccagagaactggaaaaaccaatccagtcaaaaccccagtcccctgtgatccaagctgcagcagtatccccaaagttcgttcgtttgaagcacagtcaggcacaaagcaaaccaacaactcccgaaaaaacagatttaaccaacggtgaacatgccaggagtgattctggaaaagtaagcacagaaaatggagacgcacccagagaaagaggctcatcactgtcagggactgatgacggagcccaggaggtggtgaaggacatcttggaagatgtagtcacatctgccattaaagaagcagcggaaaagcatggtctgacagaacctgagagagttctaggtgaactggagtgccaggaatgtgctattcccccaggagttgatgaaaactcacagaccaacgggatagccgatgacaggcagtccttgtcgtcagcagataatctggaatcggatgcacaaggacatcaagtggctgccaggttctcccacgttctgcagaaggatgccttccttgtgttccgctccctgtgcaagctgtccatgaaaccccttggtgaaggccctccagacccaaaatcccatgagctgcgttccaaggtggtttccctgcagctgctcctctctgtgttgcaaaatgctggccccgtattcaggactcacgagatgttcatcaatgcaatcaagcaatatctctgtgtggccttgtccaaaaacggcgtctcttcagtgcctgatgtctttgagctctctcttgccatttttcttactcttctttcaaactttaaaatgcacttgaaaatgcagatagaggtctttttcaaagagattttcctgaacattttagaaacatcaacaagttcttttgagcacaggtggatggtcattcagactctgacgaggatctgtgcagatgcccagtgtgttgtggatatttatgtcaactacgactgtgatttaaatgctgctaacatttttgagcgccttgtaaatgatttatccaaaattgctcagggaagaagtggacatgagctgggaatgacacctctgcaggagctcagcctgaggaagaaaggcctggagtgcctcgtgtccattctcaagtgcatggtggagtggagcaaagacctgtatgtgaatcccaaccaccagaccagcctcggtcaggagaggctcacggatcaggaaataggggatgggaaaggccttgacatggcaagacggtgtagtgtgacgtccatggagtccacagtgtcctcggggacccagacaactgttcaggatgaccctgagcaatttgaggtcatcaagcaacaaaaagaaatcattgaacacggcatcgagctgttcaacaagaaacccaagagggggatccagtttctccaggagcagggcatgctgggaacgtcagttgaagacatagcccaattcctgcaccaggaggagcgcctggattccacccaagtaggcgattttctgggagatagcgcaaggttcaacaaggaggtgatgtatgcctacgtggaccaacttgacttctgtgaaaaagaatttgtctcagccctgcggacattcctagaaggtttccgcctacctggagaagcccaaaagattgaccgattaatggagaagtttgccgcaagatacatagaatgcaaccaagggcaaactctgtttgctagtgctgacactgcttatgtcctagcgtattcaattattatgctgactacagacttgcacagtcctcaggtaaaaaataaaatgacgaaagagcagtatattaaaatgaatcggggtatcaatgatagtaaagatctgccagaagagtatctctcaagcatctatgaagagatagaaggcaagaaaattgcaatgaaagaaacaaaagagctaacgattgcaaccaaatctactaagcagaatgtagctagtgaaaagcagcggcggctgctgtacaacttagagatggagcaaatggctaaaacagccaaagctctgatggaggctgtgagccatgccaaagccccgtttaccagtgccactcacctggaccatgtccggccaatgttcaaactggtgtggacgccactattggcagcctacagcatcggactccagaactgtgatgacactgaagtggcctccttgtgtttggaaggcatccgatgtgcaatccgaatcgcctgcatctttggaatgcagctggaacgagatgcctatgttcaggctcttgctcgcttctccctactcacagccagctccagcatcacagaaatgaagcagaaaaacatcgacaccattaagacgcttatcacagtggctcacaccgatggcaactaccttgggaattcctggcatgagatcttgaaatgcatcagccagctggagctcgctcagctgataggaaccggtgtgaagacgcgctacctgtctggatctgggcgtgaaagagaagggagcctgaagggccacacattggcaggagaagagttcatgggccttggcctcggtaatttggtgagtggcggagtggataaaagacagatggccagcttccaagaatcggttggtgagaccagctcgcagagtgtggttgtagctgtggacaggatttttactgggtctaccagactggatggaaatgcaatagttgactttgtccgctggctgtgtgctgtgtccatggatgaactggcttccccccaccatcctcgcatgttcagcttgcagaagattgtggagatatcatactacaacatgaatcggatccgactacagtggtctcgaatatggcatgtgattggagatcacttcaataaggttggctgcaaccctaatgaagatgtggctatctttgctgttgactcattaaggcaactctccatgaagtttcttgagaagggtgaattagccaacttccgtttccagaaagattttctgaggccctttgagcatattatgaagaaaaacaggtctcccaccatccgggacatggcgatccgctgcattgcccagatggtgaactcccaggcggccaacatccgctcaggttggaagaacatctttgccgtgttccaccaggcagcctctgatcatgatgggaacattgtggagctggccttccagaccacttgccacattgtcacaactattttccagcaccattttcctgcagccatcgattcctttcaggatgctgtgaagtgcttatcagagttcgcctgcaacgccgctttccctgacacgagcatggaagcgattcggctcatccgcttctgtggcaaatacgtctctgagaggcctcgggtgctacaagaatacacaagtgatgacatgaatgtagctcctggtgacagagtctgggtccgaggctggttccccatcttattcgaactctcctgcatcattaatagatgcaagttagatgtacgaacaaggggactcacagtcatgtttgagatcatgaagagctatggccacacctttgaaaagcactggtggcaggacctgttcagaatcgtgtttcggatttttgacaatatgaaactccctgagcaactgtcagagaaatctgagtggatgacaacaacctgcaatcacgcactttatgctatttgtgatgtttttacccagttttatgaagctttgaatgaagttcttctttctgatgtatttgcacaattgcagtggtgtgtcaaacaagataatgaacagttggcgcgatcaggtacaaattgcttagaaaacttagtaatatccaatggagagaaattcagtcctgaagtctgggatgaaacctgcaactgtatgttggatattttcaaaacaaccatcccacatgttttgctgacatggagacctgtaggaatggaggaagattcatcagaaaagcatttggatgtggatctggaccgccagtctttaagcagcatagataaaaatccctctgagaggggacagagccagctctctaacccaacagatgacagctggaagggtagaccatacgcaaatcagaaactgtttgccagcctcctcatcaagtgtgtggtccagttggaattgatacagaccattgacaacattgtgttctaccctgcgacgagcaaaaaggaggatgcagagcacatggttgccgcccagcaagacacgctggatgcagatatccacatagagacggaggatcagggcatgtataagtacatgtcttcccagcacctcttcaagctgttggactgtttgcaggaatcccattcattctcaaaggccttcaactccaattacgagcagcggactgtcctgtggcgagcaggttttaagggcaagtctaaacccaatcttctaaaacaagaaaccagcagcctggcctgttgtttgaggatcctgtttcgaatgtatgttgatgagaaccgcagggattcctgggaagaaatacagcagagacttttaactgtttgcagtgaagctcttgcctatttcatcactgtgaattctgagagccatcgggaggcctggacaagtctcttgttgttacttctaactaaaaccctcaaaataaatgatgaaaagttcaaagcacatgcttcaatgtactacccctacttgtgtgaaattatgcagtttgacctgatccctgagctccgagcagttctgcggaagttcttcctacggataggtgttgtgtataagatatggataccagaagagccatcacaggtaccagcagcactgtcaccagtgtggtagccctggctgcccaggccagtgctgcagctctgcagaatgttcagcatgccatttctgactggcacatctcgtgaagtttcatagaaacaaggagttggcatcttggatctcagaatggcctggaaacggatggcctctacgctgttccatcacagtctccaactaaggcttatggtatttcattaaactgttgcatacccagttagcacagtaggtggggagtctgcttcatttctatcattccatttttctgattaaactgtcaaatctgtcattgcatatgccatcgttttctagcaaaatcccatgattggctataaacgttttgtaagaagtcactctccttgaaaatactgaacatagctgtataggtttgtgattattagagaatatgttaataaaacttcttgtaacggctaactgccacctaaaatatgctgggttttctgttgtttgagtgtgttagagaaatttgaatgtttttgtcagttacgagtcagccgtaattagattagtttaaggacaggtcaggattagagaagagttgtttttgtgttttgttaatgtctgagtgatttttaaagtattttacaaaaagatattgaaaatttggttgaaggcagagtttagtaattaagttagaattaagagttttgcgaggttaaaaaaatgtgcctcgtggatctccctgttttagtaacatggagagaaaaagtctacacgaaaaagtgaacaatttaatgaagatgattagccttccttgaaataagtatttgtggatgggtgttaaattaaaatttccagaatacactgtccatctcacacactctgaaatctaatatatgaagtagtaatgaaaatgaagtagtaatttaaccagagttcatttatccttgaataaacctttttattttcacctcagaaaagtgagtgtactggcagttagtgtcactgctttgcacagtccccattaaaggaccctccagagagggacagtaactgtgcatgagaagccgctcccataagcctcctcagccagatgtcatgggtggaactggagctgtgtcggggccagcacagctgaactgtgacaatggcaggaggtggcatgtgcccagcacttccattaatctgagcctaggagttgaattctttggcaaggttggattctgaggtccttattatgttaatgatggtgcaatactctcacctgcagtagaactgagttctgctgcagcttgtgtaaaagtgggcagtacacaagtacgtcccaaagcctgtgagcagtatacgtggatgctcacccatgagaaggagcacacacgcctcattctctgccctcacccactgctcacctagagcatcgctgagcgttagacaaagtgttacacagaatgattaaaactttcagacttctacctatgctctttagtcctgtaaattgggttgtattgatgtcaactctggtgccttagaagttagtagtttgggaacctatctgtaaaatcagatgttttttctttgtagagaaggatttctggtgcttttgcttactaagagaccgatattcttaagttgttttcttgttttaacagccttgagaaatgtttggttttggccagcagaattcttgtctacttttttctttcccaaaaagtgttttttaatttctctaccaaagaaaaaatgagcaggtttaggtttttacatgacttatatacattagataaaaggagctgtataatttagcaggaagggactatgggagaatactttactgtgagtggaaaatgttagcacatttgactggtttgccctggaatccactgcacctttacactgcaccatgaaacctacactccctggtatcatagcgcgtcatcacctcaacaagtcagtcgtctccattgatatttgtacaaaaggtatacatggggaacacgtgttcattcattaagtccatcttgcgtgcagctatatccctgattggttatttttcctttccttctgaggttctcatgtcattttcttcatcggatgtgactaaaatttttctggtgtcttctgccctctctttaattttgcctcttgaggggtagcagatgtgtcagtgcattttattacttgctgaaacattcaggcttacatttcttattagtttagtattttaaaagatttaattttctgaatgaggcatttgaattgtaccagcaatggacttttaaaaaattggatgtaaaaccattcagggtgatttttcttgtcagtggacagtgacgaacagagatttgaaatcccttacctccaataataagccattcagcctaaattcatttttatgaataaatctcttctttctcatggtaaatgtggcttgtgccactcaaacactagtgaaagggtatgtacaaccgcaacatcaggccaggacaccatttatttaaccaagtaatggaggagagtgaaacattttccaaggccttatttctttttcagaatgctttaagtgttgattatatgtgctgggtctctagagaagtttttatttgttacaatactgctgctttgagcaattttgtttctcttcattgtctgttagggaaatcaccagctttggcatcttaacaacaaacagtggatgggtaatttttatttctgatacgcatctttagagtcaaatatatcttttccctgtactcctcatgtacaaccaaagaacatacattatgaaaattgtattataatatctggaaacacaacattttcctctggcaggtgacttttgtacgaaatgaaaaaaaaaaaacctgtattttttttgttgttcttttgtgattaaggatatacatttagtagtctttgttattaaaggaacctgctgataagtacaagtgtgaccatctcattcaaatgtttgttgttatgatgcaaatggatattggtttcaatagaagctggatccttaatactgcattttctgaattctgttttaatatttgtgttaaagtagacatagctgaactcacatggaatcctggagttttgttatcagcagctttgcagtttgggaaacaaagaaaccaaagctgagtgttttaaagaatgaacatatctggaaatccttgctctcaaaacaaaacaatataatctatcaaaggtgttttactcagtgttctaatttttaaaaaattttatctgcatatttgcatcaaatatttatgtgtaaaatgtatgttttacctccttaaaatgcctaaaagttagttaatagttactttggtttaacctatacacaatgattaagtgcatttaatattggtaatttaatgaaaaccattccttgcccaatggatgtataaatttttgaaagaataagcagaattatataatatgaaatgctatgtaaagttttctatgtaaaaatattatgtataatactattaaaatatcccatgctttgatcaggtggtacatcaataaaattttaaaaagta

SEQ ID NO: 1338 - DNA, 2651 bp, Homo sapiens
  source 1..2651: mol_type = unassigned DNA
ggcggcgccgtggggccgaggtgtcgcttcctgacggggcggcgcggacggacgcggccggtgccggccgggacgccgggcccgcagcctagctcgccatctcgctcacgccgcccgcccgcggggccgtcagcccccgccgggccggggccatgcaggagagccagaccaagagcatgttcgtgtcccgggccctggagaagatcctagccgacaaggaggtgaagcggccccagcactcccagctgcgcagggcctgccaggtggcgctcgatgaaattaaagcagaaatagaaaagcagaggcttggcactgctgcaccaccaaaggcaaacttcattgaagctgacaagtattttcttccattcgagctagcttgccagtccaagtccccaagggtagtcagcacatcccttgactgcttgcagaaactcatcgcatacgggcacatcactggcaacgcccctgacagtggagcccctgggaagcggctgatcgacagaattgttgaaaccatttgcagttgttttcagggccctcagactgatgaaggggttcagttacaaataattaaggctcttctgactgcagtgacttccccacacattgaaattcatgagggtactatcctgcagacagtgagaacatgttacaatatctatttggccagcaaaaatctcatcaatcaaaccactgccaaggctacccttactcagatgctgaacgtcattttcacccgcatggaaaaccaagtgttgcaggaggccagagaactggaaaaaccaatccagtcaaaaccccagtcccctgtgatccaagctgcagcagtatccccaaagttcgttcgtttgaagcacagtcaggcacaaagcaaaccaacaactcccgaaaaaacagatttaaccaacggtgaacatgccaggagtgattctggaaaagtaagcacagaaaatggagacgcacccagagaaagaggctcatcactgtcagggactgatgacggagcccaggaggtggtgaaggacatcttggaagatgtagtcacatctgccattaaagaagcagcggaaaagcatggtctgacagaacctgagagagttctaggtgaactggagtgccaggaatgtgctattcccccaggagttgatgaaaactcacagaccaacgggatagccgatgacaggcagtccttgtcgtcagcagataatctggaatcggatgcacaaggacatcaagtggctgccaggttctcccacgttctgcagaaggatgccttccttgtgttccgctccctgtgcaagctgtccatgaaaccccttggtgaaggccctccagacccaaaatcccatgagctgcgttccaaggtggtttccctgcagctgctcctctctgtgttgcaaaatgctggccccgtattcaggactcacgagatgttcatcaatgcaatcaagcaatatctctgtgtggccttgtccaaaaacggcgtctcttcagtgcctgatgtctttgagctctctcttgccatttttcttactcttctttcaaactttaaaatgcacttgaaaatgcagatagaggtctttttcaaagagattttcctgaacattttagaaacatcaacaagttcttttgagcacaggtggatggtcattcagactctgacgaggatctgtgcagatgcccagtgtgttgtggatatttatgtcaactacgactgtgatttaaatgctgctaacatttttgagcgccttgtaaatgatttatccaaaattgctcagggaagaagtggacatgagctgggaatgacacctctgcaggagctcagcctgaggaagaaaggcctggagtgcctcgtgtccattctcaagtgcatggtggagtggagcaaagacctgtatgtgaatcccaaccaccagaccagcctcggtcaggagaggctcacggatcaggaaataggggatgggaaaggccttgacatggcaagacggtgtagtgtgacgtccatggagtccacagtgtcctcggggacccagacaactgttcaggatgaccctgagcaatttgaggtcatcaagcaacaaaaagaaatcattgaacacggcatcgagctgttcaacaagaaacccaagagggggatccagtttctccaggagcagggcatgctgggaacgtcagttgaagacatagcccaattcctgcaccaggaggagcgcctggattccacccaagtaggcgattttctgggagatagcgcaaggttcaacaaggaggtgatgtatgcctacgtggaccaacttgacttctgtgaaaaagaatttgtctcagccctgcggacattcctagaaggtttccgcctacctggagaagcccaaaagattgaccgattaatggagaagtttgccgcaagatacatagaatgcaaccaagggcaaactctgtttgctagtgctgacactgcttatgtcctagcgtattcaattattatgctgactacagacttgcacagtcctcaggtaaaaaataaaatgacgaaagagcagtatattaaaatgaatcggggtatcaatgatagtaaagatctgccagaagagtatctctcaagcatctatgaagagatagaaggcaagaaaattgcaataaaaaaaaattaa

SEQ ID NO: 1339 - DNA, 3760 bp, Homo sapiens
  source 1..3760: mol_type = unassigned DNA
cacccaagtctgagttgctaaaaaatggagctgtcactgggccttgctctgccaggacctgcagagccggggacctctctgtggcaagcccagcaagatgactgctctgaggcgccctagggctgagggaggggccgtgacaccagccccgccccccagccacctgggaaaaggaagcacaaaaaggagaagcagcaacggctgctctgcttccttcccatctcgctcttgggtcatgcctggccagcagaaagcagctccataggggaggagagccacgcaggatctcacagctgcagtctaatagtaacacagaggattcagcagtggccaccatgggttctgtgaattccagaggtcacaaggcggaagcccaggtggtgatgatgggcctggactcggcgggcaagaccacgctcctttacaagctgaagggccaccagctggtggagaccctgcccactgttggtttcaacgtggagcctctgaaagctcctgggcacgtgtcactgactctctgggacgttggggggcaggccccgctcagagccagctggaaggactatctggaaggcacagatatcctcgtgtacgtgctggacagcacagatgaagcccgcttacccgagtcggcggctgagctcacagaagtcctgaacgaccccaacatggctggcgtccccttcttggtgctggccaacaagcaggaggcacctgatgcacttccgctgcttaagatcagaaacaggctgagtctagagagattccaggaccactgctgggagctccggggctgcagtgccctcactggggaggggctgcccgaggccctgcagagcctgtggagcctcctgaaatctcgcagctgcatgtgtctgcaggcgagagcccatggggctgagcgcggagacagcaagagatcttgatccagacagagcagcatatctttgctcatacaaactagaagaaccagctgatccttgagaaatttacgcttagtctatcaaacaagaaatgctggcttggcccggtggctcatgcctgtaatcccagcactgtgggagaccacggtgggggaatcccttgagcccaggagttggagagcaacatcacaacaccccatttctactaataatcaaaaaattggccgggcatggtggcatgtgcctgtagtcccagctacttgggaggctgaggcaggagaatcgcttgagcccaagaggtagaggttgcagtgagccaagatcgcgccactgcactccagtctgggcaacagagtgagaccctgtctcaataataataataataataatgatgatactctaagaaaaaaatctcaacatacttcatttaatagctcgttaccaagtgtgaatgaagcaatatgtcataatagagtagccactggttgcataataatagagacctaaattctcaaatagggaaagaggttttaaaatcaaatttgaggccaggtgcagtggctcatgggcggaggagggcagattacttgaggctaggagttcaagaccagcctggccaacatggtgaaaccccatctctactgaaaatacaaaaattaggcatagtggtgcacgcctgcagtcccagctactcaggaggttgaggcagaagaatcgcttgaacccaggaagtggaggttgcagtgagccgagattgtgctgctgcactccagcctgggtgaaaaagacaggctgtgtctccaaaaagaaaaaaaaaagtcaaattcaaatatcatctggacatgtcacaatggatcgcggatccttatgagtgattttccccagtggcccctggggatgtgccactgtcactcagaagggcaagctaggcagggcccatacaacagcaggggtctgcaggttagacgttccctgccctgggacgctcacccctgggcaagaggctggaagttcacaccatccaaaatttatccttgttttttttctgatgctaattagcctctcccgattttatgacatcttgtgttgatctttttcaaaaactcattttcttttttttccttctcttttctccttcttgtagcacatatctttcgttaaagatcagatcaataaaatattttatttattcattaatttaacaaaaaaaacagagcatttagtttgtggcaaaaacactgagctttcgaatatgaatcatgtgctttaggtgggaattgtgaattctgaagatacagatgacagtgacgaatgccttctgtctcatgattgacagggaaaaggaaggttgaccatagcatcctagaaggctcatcaggtgatcattacctagcatccatgaagcacctgaaattatttgcaaaatgttacgctttggaccatttttccggggaaggagatccagaactttttaccagattttcaaagacatctgtgactcccaaaagttaacaatcactgatgtggttgttgtatccctcatccaaccccagaacactttctgtaatctgagttttttaatggcaagtggcctatatttagcacctgttctcatgttaaacagctctgaatgttagatattctttcttatcctggactggttctctctatctctggagtaatgcagtataaattggccatcagtaccctcctaaaatctgagatctgccaggcccctcttctaacaccaggttaggcatgcttggttatttccagtacttgtcagtcaacatgtttcaagacgctgtgttagacactagggatgcaaagatgaatgagataaggcctcaggcctcatggaaggtgagacagtaaagacattactcccataaaaatgtgaggagagagactcagttcagcaactgtttattctgtttattgagcacttacttggaccaagcactgtggtcttggtgttttacatagactgtctctaattctcacaactctgcaaaatatatatattcccattttataaaactacaaactgaggctcagagaaggtgtgacctcttgttgcttgaggcacagagttataaagtaacatatctggaatttgaaatcagatctgtttagggctaatgctgcatttttctacaacatcatgcctctagaaggtttaagctaggtaggctttcagccagcagacatgatggggagagccttctaataagagggaagagactgcttggaagcatgaagggaggtgtaagaaagataagtaagtcagtgtacttgcaacagaggcttgggatgaagggtgggtgaagttgacatcacgatagaaaacaaaactggaatgggagtttaggtccaatttgggcaaggttgtttgaatttcaataatcaggggtttgggtcaaggaagaaaaatcatgggacttgccatttaggaggataattttgtggtagtgtggaggtgaaataaagagaaaagggaaccttggagctgggaaggcaggaaaccggctagatgaccatcacacagcaaaggagggagtggaagagagatgagaaaattgagagctattattaagaaaaacagttgagagaggaagaatttgaagagggctcaagattttgagtccacatgacagaaggactggaatgccatgaactggagaaggtgagcgctgaagaaccaggatgggacggggctggaacagctgggttcagcttttgcagggtgggtacgtgtttggttatagctgctttcagattgttccattatctgtactcccaacaaccctgccggatatatttgttggctttcactc

SEQ ID NO: 1340 - DNA, 3264 bp, Homo sapiens
  source 1..3264: mol_type = unassigned DNA
acgtcgacgcggggcttttctttagccgggtcccgctaactcggctacggtgtatctgcgtctttggtcaggttgttccttggctaagagggcagtcgtcgcggacccacgcggttagcaaggcttagtgctcgggccggccgccttcacttccctcccggcttttcctcccgacttatccactttaggggcgtctcggagtgccggaggcccccggggaagagcggggtgccggtgtccgctccgggctcggatgggaagtggtgggaggagcgacccgggatgttcagtctgatggccagttgctgcggctggttcaagcggtggcgggagcctgtcaggttggcaaataaacaagataaagaaggagctttaggagaagctgatgtcattgaatgtctatctctggaaaaattggtcaatgagcacaagtgcctgtgtcagatagaaccatgttcagcaatctcggggtatggaaagaaaattgacaagtccattaaaaaaggcctttattggctgctacatgttattgcaagagactttgatgccttaaatgaacgcatccaaaaagagacaacagagcagcgtgctcttgaggaacaagagaaacaagaaagagctgaacgagtgcgaaaattacgagaagaaagaaaacaaaatgaacaggagcaggctgaactcgatggaaccagtggtctggctgagttggacccagaaccaacgaatcctttccagccaatagcatctgtaatcattgagaatgaaggaaaacttgaaagagagaaaaaaaaccaaaaaatggagaaagacagtgatggctgccacctgaaacataaaatggagcatgagcaaatagagacacaaggccaggttaatcacaatggccaaaaaaataatgaatttggactagtagaaaattataaggaggcattaacacagcagttaaagaatgaagatgagacagaccggccatcattggaatcagctaatggtaaaaagaaaactaagaaactaagaatgaaaaggaaccaccgggtagaaccacttaatatagatgactgtgctcctgagagtccaacgccacccccaccccctcctcctgttggctggggaacccctaaagtcactagacttccaaaacttgagcctcttggtgaaacacatcataatgatttctataggaagccactgcctcccctggctgtgccacagcgacctaacagtgatgctcatgatgtgatctcataaacaagacgtatggaggagttctcttaatatcagcaaggtgaactgggacattcttctttctcagaagaagaaacatcttgtaaattgatgactggggcaagataaccataataattttagtgagaagattaatactcaaggacctgacttgataattacttatttgtgtttttcatggttaaaaaaataaaagaagcacaatgaccagtacatgaaatcagcatttggaccaaattagcaagatttactgttgactctggtttatacatccccactcatgagcatacttctgaaggaaaactttacaaaaagagccaatggactcagcactttctttactatttgttcaatagcctatatttctagatattaaatattttttgtaagatatatgcacatagaagggggacttctaggaatttataaccaaaattttaaaactatttttatatttttttaaatctttaaaaattttaattactgtgatattgattatacaccttttttatagatgatttgtttaaattatatctggaaaatagagttgatttactttcagacatgaactatacaaacaggatatatttatatggcttgaggtatgttttgtaatagcgttgttctttaagtgtacatcgtaatttgacctaatttaaaaataatatattttcgaagtagtagattctcagatctttattctaacaattacatgatttgaaaacagtactcaatgagactggaaataccttttgtacctaaatgttttttaaattaatcaaaatacattctgtgagatactattaaaagtctcagtaaagtcctattttaaaggttagacactttcagagatcaaggtgctccctatactcccttgttccatcagaagctgcagtgactcttttaggtgattctaattctttcatgccttgaaattaaactatgaaattaaaggcagaaaaactggaaaacctactgcaggtccagagacttctgttttacaactgggaaacagcttgtgtactaaagtaatgagaataaaaatgttggcccaaaattacttttataaataaataattccaaaataatttcttaatttaaaatgatagcacttctcttgcacttaagaatggcatccataagattctgtatttggcatttagactaacttctagatgtatatttttaataatagattcataatgttacatttaattgaaaacaaacctttatatccaatgaaaatagtataaacagaatgatttttataccaccttgttaagattggtgcttttggtaacttgtactgacacaacagacatgtgctagtatctgataacattaagtacattttatgtcgtttaatataattatttactttaaaaattgtacttcagaacatcagattttattcacattttttaactcactgaactttaataatcaggtcacctgtactctagtcagcactgtatatattcttggagtttgtacatgggacttagcaaccacactgagtgaggtaaaagcatttgatttcagatctaaaattcgtaacaacctaaatttgagaggtggctgaaatgtgatgaaaagcaatacgaaaagacaatgtaaactttgaaaaggattttagagggaaaattgcatagctttttgtaacatttacttaattttaaaactaaactcatacttttgctatctttttaatatttatctcgtttgggagtatacgtgtttttaaaatttgtgttttctatctgtttactatagtgtagctactggcttcatttaataaaaataaatgattttgaaattaaatataatatagaattcacattttatatagctctctcaaaaattaatttttattccttaagcattttaaaaacattttaaaaaatgttttgtaaatccaggtgtattttaacaattaaatgcctattttgttatatgttatacttttattcttaattctgaattttgacattttcacacaataaaaataatttatatcaa

SEQ ID NO: 1341 - DNA, 2453 bp, Homo sapiens
  source 1..2453: mol_type = unassigned DNA
cgcggggcttttctttagccgggtcccgctaactcggctacggtgtatctgcgtctttggtcaggttgttccttggctaagagggcagtcgtcgcggacccacgcggttagcaaggcttagtgctcgggccggccgccttcacttccctcccggcttttcctcccgacttatccactttaggggcgtctcggagtgccggaggcccccggggaagagcggggtgccggtgtccgctccgggctcggatgggaagtggtgggaggagcgacccgggatgttcagtctgatggccagttgctgcggctggttcaagcggtggcgggagcctgtcagaaaggtgactcttttgatggtgggacttgataatgctggtaaaaccgcaacagcaaagggaatccaaggagaataccctgaagatgtagctcctactgttggattttcaaaaattaaccttagacaaggaaagtttgaagtcaccatctttgacttgggaggtggaataagaattcggggaatctggaagaattactatgctgaatcctatggggtaatatttgttgtggattccagtgatgaagagagaatggaagagacaaaagaggctatgtcagaaatgctaagacatcctaggatatcgggaaagcctatattggtgttggcaaataaacaagataaagaaggagctttaggagaagctgatgtcattgaatgtctatctctggaaaaattggtcaatgagcacaagtgcctgtgtcagatagaaccatgttcagcaatctcggggtatggaaagaaaattgacaagtccattaaaaaaggcctttattggctgctacatgttattgcaagagactttgatgccttaaatgaacgcatccaaaaagagacaacagagcagcgtgctcttgaggaacaagagaaacaagaaagagctgaacgagtgcgaaaattacgagaagaaagaaaacaaaatgaacaggagcaggctgaactcgatggaaccagtggtctggctgagttggacccagaaccaacgaatcctttccagccaatagcatctgtaatcattgagaatgaaggaaaacttgaaagagagaaaaaaaaccaaaaaatggagaaagacagtgatggctgccacctgaaacataaaatggagcatgagcaaatagagacacaaggccaggttaatcacaatggccaaaaaaataatgaatttggactagtagaaaattataaggaggcattaacacagcagttaaagaatgaagatgagacagaccggccatcattggaatcagctaatggtaaaaagaaaactaagaaactaagaatgaaaaggaaccaccgggtagaaccacttaatatagatgactgtgctcctgagagtccaacgccacccccaccccctcctcctgttggctggggaacccctaaagtcactagacttccaaaacttgagcctcttggtgaaacacatcataatgatttctataggaagccactgcctcccctggctgtgccacagcgacctaacagtgatgctcatgatgtgatctcataaacaagacgtatggaggagttctcttaatatcagcaaggtgaactgggacattcttctttctcagaagaagaaacatcttgtaaattgatgactggggcaagataaccataataattttagtgagaagattaatactcaaggacctgacttgataattacttatttgtgtttttcatggttaaaaaaataaaagaagcacaatgaccagtacatgaaatcagcatttggaccaaattagcaagatttactgttgactctggtttatacatccccactcatgagcatacttctgaaggaaaactttacaaaaagagccaatggactcagcactttctttactatttgttcaatagcctatatttctagatattaaatattttttgtaagatatatgcacatagaagggggacttctaggaatttataaccaaaattttaaaactatttttatatttttttaaatctttaaaaattttaattactgtgatattgattatacaccttttttatagatgatttgtttaaattatatctggaaaatagagttgatttactttcagacatgaactatacaaacaggatatatttatatggcttgaggtatgttttgtaatagcgttgttctttaagtgtacatcgtaatttgacctaatttaaaaataatatattttcgaagtagtagattctcagatctttattctaacaattacatgatttgaaaacagtactcaatgagactggaaataccttttgtacctaaatgttttttaaattaatcaaaatacattctgtgagatactattaaaagtctcagtaaagtcctattttaaaggttagacactttcagagatcaaggtgctccctatactcccttgttccatcagaagctgca

SEQ ID NO: 1342 - DNA, 2206 bp, Homo sapiens
  source 1..2206: mol_type = unassigned DNA
gcttttctttagccgggtcccgctaactcggctacggtgtatctgcgtctttggtcaggttgttccttggctaagagggcagtcgtcgcggacccacgcggttagcaaggcttagtgctcgggccggccgccttcacttccctcccggcttttcctcccgacttatccactttaggggcgtctcggagtgccggaggcccccggggaagagcggggtgccggtgtccgctccgggctcggatgggaagtggtgggaggagcgacccgggatgttcagtctgatggccagttgctgcggctggttcaagcggtggcgggagcctgtcagaaaggtgactcttttgatggtgggacttgataatgctggtaaaaccgcaacagcaaagggaatccaaggagaataccctgaagatgtagctcctactgttggattttcaaaaattaaccttagacaaggaaagtttgaagtcaccatctttgacttgggaggtggaataagaattcggggaatctggaagaattactatgctgaatcctatggggtaatatttgttgtggattccagtgatgaagagagaatggaagagacaaaagaggctatgtcagaaatgctaagacatcctaggatatcgggaaagcctatattggtgttggcaaataaacaagataaagaaggagctttaggagaagctgatgtcattgaatgtctatctctggaaaaattggtcaatgagcacaagtgcctgtgtcagatagaaccatgttcagcaatctcggggtatggaaagaaaattgacaagtccattaaaaaaggcctttattggctgctacatgttattgcaagagactttgatgccttaaatgaacgcatccaaaaagagacaacagagcagcgtgctcttgaggaacaagagaaacaagaaagagctgaacgagtgcgaaaattacgagaagaaagaaaacaaaatgaacaggagcaggctgaactcgatggaaccagtggtctggctgagttggacccagaaccaacgaatcctttccagccaatagcatctgtaatcattgagaatgaaggaaaacttgaaagagagaaaaaaaaccaaaaaatggagaaagacagtgatggctgccacctgaaacataaaatggagcatgagcaaatagagacacaaggccaggttaatcacaatggccaaaaaaataatgaatttggactagtagaaaattataaggaggcattaacacagcagttaaagaatgaagatgagacagaccggccatcattggaatcagctaatggtaaaaagaaaactaagaaactaagaatgaaaaggaaccaccgggtagaaccacttaatatagatgactgtgctcctgagagtccaacgccacccccaccccctcctcctgttggctggggaacccctaaagtcactagacttccaaaacttgagcctcttggtgaaacacatcataatgatttctataggaagccactgcctcccctggctgtgccacagcgacctaacagtgatgctcatgatgtgatctcataaacaagacgtatggaggagttctcttaatatcagcaagaagcacaatgaccagtacatgaaatcagcatttggaccaaattagcaagatttactgttgactctggtttatacatccccactcatgagcatacttctgaaggaaaactttacaaaaagagccaatggactcagcactttctttactatttgttcaatagcctatatttctagatattaaatattttttgtaagatatatgcacatagaagggggacttctaggaatttataaccaaaattttaaaactatttttatatttttttaaatctttaaaaattttaattactgtgatattgattatacaccttttttatagatgatttgtttaaattatatctggaaaatagagttgatttactttcagacatgaactatacaaacaggatatatttatatggcttgaggtatgttttgtaatagcgttgttctttaagtgtacatcgtaatttgacctaatttaaaaataatatattttcgaagtagtagattctcagatctttattctaacaattacatgatttgaaaacagtactcaatgagactggaaataccttttgtacctaaatgttttttaaattaatcaaaatacattctgtgagatactattaaaa

SEQ ID NO: 1343 - DNA, 3906 bp, Homo sapiens
  source 1..3906: mol_type = unassigned DNA
agcacgtcgacgcggggcttttctttagccgggtcccgctaactcggctacggtgtatctgcgtctttggtcaggttgttccttggctaagagggcagtcgtcgcggacccacgcggttagcaaggcttagtgctcgggccggccgccttcacttccctcccggcttttcctcccgacttatccactttaggggcgtctcggagtgccggaggcccccggggaagagcggggtgccggtgtccgctccgggctcggatgggaagtggtgggaggagcgacccgggatgttcagtctgatggccagttgctgcggctggttcaagcggtggcgggagcctgtcagaataccctgaagatgtagctcctactgttggattttcaaaaattaaccttagacaaggaaagtttgaagtcaccatctttgacttgggaggtggaataagaattcggggaatctggaagaattactatgctgaatcctatggggtaatatttgttgtggattccagtgatgaagagagaatggaagagacaaaagaggctatgtcagaaatgctaagacatcctaggatatcgggaaagcctatattggtgttggcaaataaacaagataaagaaggagctttaggagaagctgatgtcattgaatgtctatctctggaaaaattggtcaatgagcacaagtgcctgtgtcagatagaaccatgttcagcaatctcggggtatggaaagaaaattgacaagtccattaaaaaaggcctttattggctgctacatgttattgcaagagactttgatgccttaaatgaacgcatccaaaaagagacaacagagcagcgtgctcttgaggaacaagagaaacaagaaagagctgaacgagtgcgaaaattacgagaagaaagaaaacaaaatgaacaggagcaggctgaactcgatggaaccagtggtctggctgagttggacccagaaccaacgaatcctttccagccaatagcatctgtaatcattgagaatgaaggaaaacttgaaagagagaaaaaaaaccaaaaaatggagaaagacagtgatggctgccacctgaaacataaaatggagcatgagcaaatagagacacaaggccaggttaatcacaatggccaaaaaaataatgaatttggactagtagaaaattataaggaggcattaacacagcagttaaagaatgaagatgagacagaccggccatcattggaatcagctaatggtaaaaagaaaactaagaaactaagaatgaaaaggaaccaccgggtagaaccacttaatatagatgactgtgctcctgagagtccaacgccacccccaccccctcctcctgttggctggggaacccctaaagtcactagacttccaaaacttgagcctcttggtgaaacacatcataatgatttctataggaagccactgcctcccctggctgtgccacagcgacctaacagtgatgctcatgatgtgatctcataaacaagacgtatggaggagttctcttaatatcagcaaggtgaactgggacattcttctttctcagaagaagaaacatcttgtaaattgatgactggggcaagataaccataataattttagtgagaagattaatactcaaggacctgacttgataattacttatttgtgtttttcatggttaaaaaaataaaagaagcacaatgaccagtacatgaaatcagcatttggaccaaattagcaagatttactgttgactctggtttatacatccccactcatgagcatacttctgaaggaaaactttacaaaaagagccaatggactcagcactttctttactatttgttcaatagcctatatttctagatattaaatattttttgtaagatatatgcacatagaagggggacttctaggaatttataaccaaaattttaaaactatttttatatttttttaaatctttaaaaattttaattactgtgatattgattatacaccttttttatagatgatttgtttaaattatatctggaaaatagagttgatttactttcagacatgaactatacaaacaggatatatttatatggcttgaggtatgttttgtaatagcgttgttctttaagtgtacatcgtaatttgacctaatttaaaaataatatattttcgaagtagtagattctcagatctttattctaacaattacatgatttgaaaacagtactcaatgagactggaaataccttttgtacctaaatgttttttaaattaatcaaaatacattctgtgagatactattaaaagtctcagtaaagtcctattttaaaggttagacactttcagagatcaaggtgctccctatactcccttgttccatcagaagctgcagtgactcttttaggtgattctaattctttcatgccttgaaattaaactatgaaattaaaggcagaaaaactggaaaacctactgcaggtccagagacttctgttttacaactgggaaacagcttgtgtactaaagtaatgagaataaaaatgttggcccaaaattacttttataaataaataattccaaaataatttcttaatttaaaatgatagcacttctcttgcacttaagaatggcatccataagattctgtatttggcatttagactaacttctagatgtatatttttaataatagattcataatgttacatttaattgaaaacaaacctttatatccaatgaaaatagtataaacagaatgatttttataccaccttgttaagattggtgcttttggtaacttgtactgacacaacagacatgtgctagtatctgataacattaagtacattttatgtcgtttaatataattatttactttaaaaattgtacttcagaacatcagattttattcacattttttaactcactgaactttaataatcaggtcacctgtactctagtcagcactgtatatattcttggagtttgtacatgggacttagcaaccacactgagtgaggtaaaagcatttgatttcagatctaaaattcgtaacaacctaaatttgagaggtggctgaaatgtgatgaaaagcaatacgaaaagacaatgtaaactttgaaaaggattttagagggaaaattgcatagctttttgtaacatttacttaattttaaaactaaactcatacttttgctatctttttaatatttatctcgtttgggagtatacgtgtttttaaaatttgtgttttctatctgtttactatagtgtagctactggcttcatttaataaaaataaatgattttgaaattaaatataatatagaattcacattttatatagctctctcaaaaattaatttttattccttaagcattttaaaaacattttaaaaaatgttttgtaaatccaggtgtattttaacaattaaatgcctattttgttatatgttatacttttattcttaattctgaattttgacattttcacacaataaaaataatttatatcaatattctgtttctcttttcaattggtagatttaaatgatttcctttgggtaataaaataggtaaagattttaaaatatgattattgaaaaacagtttaaatcagtagattaaaataatgcatttttttgatactttacacacaaaacttttttctctctgcaagtttttatgtatgtgggaaagaatttgtgattttaaatgcagctacaaatagcatttcaccatatgatgttagaggatttgatgtctgtcttgcgttaaagctgttggtcaacagatatgtttttatgtatttaaaagaggctcttgtgtgcctttatgtgtaaaatgcatattacgtagtatacatgatattgtatgtaactgacttcaaatataaaactatgcat

SEQ ID NO: 1344 - DNA, 1615 bp, Homo sapiens
  source 1..1615: mol_type = unassigned DNA
gcttttctttagccgggtcccgctaactcggctacggtgtatctgcgtctttggtcaggttgttccttggctaagagggcagtcgtcgcggacccacgcggttagcaaggcttagtgctcgggccggccgccttcacttccctcccggcttttcctcccgacttatccactttaggggcgtctcggagtgccggaggcccccggggaagagcggggtgccggtgtccgctccgggctcggatgggaagtggtgggaggagcgacccgggatgttcagtctgatggccagttgctgcggctggttcaagcggtggcgggagcctgtcagaaaggtgactcttttgatggtgggacttgataatgctggtaaaaccgcaacagcaaagggaatccaaggaggttggcaaataaacaagataaagaaggagctttaggagaagctgatgtcattgaatgtctatctctggaaaaattggtcaatgagcacaagtgcctgtgtcagatagtaaggaaccatgttcagcaatctcggggtatggaaagaaaattgacaagtccattaaaaaaggcctttattggctgctacatgttattgcaagagactttgatgccttaaatgaacgcatccaaaaagagacaacagagcagcgtgctcttgaggaacaagagaaacaagaaagagctgaacgagtgcgaaaattacgagaagaaagaaaacaaaatgaacaggagcaggctgaactcgatggaaccagtggtctggctgagttggacccagaaccaacgaatcctttccagccaatagcatctgtaatcattgagaatgaaggaaaacttgaaagagagaaaaaaaaccaaaaaatggagaaagacagtgatggctgccacctgaaacataaaatggagcatgagcaaatagagacacaaggccaggttaatcacaatggccaaaaaaataatgaatttggactagtagaaaattataaggaggcattaacacagcagttaaagaatgaagatgagacagaccggccatcattggaatcagctaatggtaaaaagaaaactaagaaactaagaatgaaaaggaaccaccgggtagaaccacttaatatagatgactgtgctcctgagagtccaacgccacccccaccccctcctcctgttggctggggaacccctaaagtcactagacttccaaaacttgagcctcttggtgaaacacatcataatgatttctataggaagccactgcctcccctggctgtgccacagcgacctaacagtgatgctcatgatgtgatctcataaacaagacgtatggaggagttctcttaatatcagcaaggtgaactgggacattcttctttctcagaagaagaaacatcttgtaaattgatgactggggcaagataaccataataattttagtgagaagattaatactcaaggacctgacttgataattacttatttgtgtttttcatggttaaaaaaataaaagaagcacaatgaccagtacatgaaatcagcatttggaccaaattagcaagatttactgttgactctggtttatacatccccactcatgagcatacttctgaaggaaaacttt

SEQ ID NO: 1345 - DNA, 1286 bp, Homo sapiens
  source 1..1286: mol_type = unassigned DNA
gataagctacaacataaacacatctaggttcttgttcttagaatacagcatgaagaatttgctttcttctttcttcctaacattttcatgtgagatccagaaaggacacattgtctctggccattcgaagaaagaaagaaagaaaaaaaaaaaaggtatttagagacagagagagaaaaaggctgaaatgggttcgctgggttctaaaaatccgcaaaccaaacaagcccaagttcttcttttgggacttgactcagctgggaagtctactctcctttataaattaaagcttgctaaggatattaccaccatccctacaataggtttcaatgtggaaatgatcgagttggaaaggaatctttcactcacagtctgggatgttggaggacaggaaaaaatgagaactgtttggggctgttactgtgagaacaccgatgggctggtgtatgttgtggacagtacagacaaacagcgactggaagagtctcagagacagtttgagcacattttgaagaatgaacacattaaaaatgtgcctgttgttctattagccaacaaacaagacatgcctggagctctgactgctgaggacatcaccagaatgttcaaagtgaagaagctttgcagtgaccggaactggtatgtgcaaccctgctgtgccctcacaggggaggggctggcccaggggttcaggaaattaactggatttgtgaagagccacatgaaatcaagaggagacactttggcgttcttcaagcagaactgaggctgcgaaaaatccaagtctctacagagacactgatgaagttgaaagggtaattgtttttccatgccaaatgaggaaatcaaattaatgagttgacaaacttttcctgagatgttatttcatctacatttagttaaacaacttagaatgatatctagaaaatatttattttcagccaggaactttagcaaactgtggcaatgatcactgggaatgaaaacgtataatgttctacaatttttgttatcacattggatgactttgaatatagtagtgacacttgggaccaaataaattattttatatgactactagaacaaagttttagtaagctgtctgctaatagagtcagaattcttccagattgtttccagctgtaacaggtattgaatttccaccgtgctcctatgtaacagctgggtggtgtaaaaaatgaacttcaaattatggagtggaaaaagcgtaatgttaatatcttgtaaattcgtattccctattaaataaagctttcttattccct

SEQ ID NO: 1346 - DNA, 979 bp, Homo sapiens
  source 1..979: mol_type = unassigned DNA
gactatgccgtcggcgagcgtgatagccaacaggaaccgggagcggggtcccgggactgggaagaaacggcggccgggagggggctccggggaccatggggctcctgaccattctgaagaagatgaagcagaaagagcgggagctgcgactgctcatgcttggcctggacaatgctggaaagacaaccatcctgaagaagttcaatggggaggacatcgacaccatctccccaacgctgggcttcaacatcaagaccctggagcaccgaggattcaagctgaacatctgggatgtgggtggccagaagtccctgcggtcctactggcggaactactttgagagcaccgatggcctcatctgggtagtggacagcgcagaccgccagcgcatgcaggactgccagcgggagctccagagcctgctggtggaggagcgcctggccggagcaaccctcctcatctttgctaataagcaggacctgcctggagcactgtcctctaacgccatccgcgaggtcctggagctggactccatccgcagccaccactggtgcatccagggctgcagcgccgtcaccggggagaacctgctgccgggcatcgactggctcctggatgacatttccagccgcattttcacagctgactgaaccactccagatgccccccacctagcagtccaggtccctcaaccttcaccaaacactacccatggggggttgggagtcagccggccaaactaacactccccctcctccaccccagcctgctgctgctactgctgcccgctgctgctctgtggccacccggctcccatggcgggagggctgtgccctggctgtctctctggctcctgacctggcctttggctaccataccaagaagagagggctgggcggggaggagctgctactgctgctaccgaggctgtgggcctcatccttcactcagttgtgaaataaaccgctccttgccccga

SEQ ID NO: 1347 - DNA, 830 bp, Homo sapiens
  source 1..830: mol_type = unassigned DNA
cggcggccgggagggggctccggggaccatggggctcctgaccattctgaagaagatgaagcagaaagagcgggagctgcgactgctcatgcttggcctggacaatgctggaaagacaaccatcctgaagaagttcaatggggaggacatcgacaccatctccccaacgctgggcttcaacatcaagaccctggagcaccgaggattcaagctgaacatctgggatgtgggtggccagaagtccctgcggtcctactggcggaactactttgagagcaccgatggcctcatctgggtagtggacagcgcagaccgccagcgcatgcaggactgccagcgggagctccagagcctgctggtggaggagcgcctggccggagcaaccctcctcatctttgctaataagcaggacctgcctggagcactgtcctctaacgccatccgcgaggtcctggagctggactccatccgcagccaccactggtgcatccagggctgcagcgccgtcaccggggagaacctgctgccgggcatcgactggctcctggatgacatttccagccgcattttcacagctgactgaaccactccagatgccccccacctagcagtccagcctgctgctgctactgctgcccgctgctgctctgtggccacccggctcccatggcgggagggctgtgccctggctgtctctctggctcctgacctggcctttggctaccataccaagaagagagggctgggcggggaggagctgctactgctgctaccgaggctgtgggcctcatccttcactcagttgtgaaataaaccgctccttgccccga

SEQ ID NO: 1348 - DNA, 795 bp, Homo sapiens
  source 1..795: mol_type = unassigned DNA
gggggctccggggaccatggggctcctgaccattctgaagaagatgaagcagaaagagcgggagctgcgactgctcatgcttggcctggacaatgctggaaagacaaccatcctgaagaagttcaatggggaggacatcgacaccatctccccaacgctgggcttcaacatcaagaccctggagcaccgaggattcaagctgaacatctgggatgtgggtggccagaagtccctgcggtcctactggcggaactactttgagagcaccgatggcctcatctgggtagtggacagcgcagaccgccagcgcatgcaggactgccagcgggagctccagagcctgctggtggaggaggtcctggagctggactccatccgcagccaccactggtgcatccagggctgcagcgccgtcaccggggagaacctgctgccgggcatcgactggctcctggatgacatttccagccgcattttcacagctgactgaaccactccagatgccccccacctagcagtccaggtccctcaaccttcaccaaacactacccatggggggttgggagtcagccggccaaactaacactccccctcctccaccccagcctgctgctgctactgctgcccgctgctgctctgtggccacccggctcccatggcgggagggctgtgccctggctgtctctctggctcctgacctggcctttggctaccataccaagaagagagggctgggcggggaggagctgctactgctgctaccgaggctgtgggcctcatccttcactcagttgt

SEQ ID NO: 1349 - DNA, 1017 bp, Homo sapiens
  source 1..1017: mol_type = unassigned DNA
accccgccccgtattgctgctcagctcctcagctgtgcgtgcgagggacgtcgggggcggcgccgcagcagttgcccctggtaacgggggaggcagcaggaggaggaggaggaggagggactcggcgggaggatgggcttgctctcaattttgcgcaagttgaaaagtgcaccagaccaggaggtgagaatacttctcctgggcttggataatgctggcaagaccactcttctgaagcagcttgcatctgaagacatcagccacatcacacctacacagggtttcaacatcaaaagtgtacaatcacaaggttttaaactgaatgtatgggacattggtggacagaggaaaatcagaccatactggaagaattattttgaaaataccgatattcttatatatgtaatcgacagtgcagacagaaaaagatttgaagagacgggtcaggaactagcggaattactggaggaagaaaaactaagttgtgtgccagtgctcatctttgctaataagcaggatttgctcacagcagcccctgcctctgaaattgcagaaggactgaacctgcataccatccgcgaccgagtctggcagatccagtcttgctcagctctcacaggagagggcgttcaggatggcatgaactgggtctgcaaaaatgtcaatgcaaagaagaaataaaatctagacgaatggagatgcaggagctgcgggagccgaattcggtcctgaaaaacactaatttgctgctttctgaccaaatgtttttccatctgtgtacagctccagctgtttgaagagagggaacaacacggtttagaaagaatccccattccagcagtagatttaactgatctctgaggttcagtatcatttttcaaataaaggaattatattatttcctctgcataattgaaatagtattaaatgtctcaaagcacatgattagaaaatgagatcttttaaatgagcaagagattgcattgcagtttagacaattccagtgggctttttttt

SEQ ID NO: 1350 - DNA, 1584 bp, Homo sapiens
  source 1..1584: mol_type = unassigned DNA
ggctctgcagaggcagcggttggaggcgcggtgggtgtctgcgggggtctcgcggggcggctgcggtgtttcaccgggaaaggctcgaggagagcgcggctcacgagagataacccagctgtgctccctggaaccttcaatttcaaggcctccctgcctctactaggcgccttagctcactatggggaaccacttgactgagatggcgcccactgcctcctccttcttgccccacttccaagccctgcatgtcgtggtcattgggctggactctgctggaaagacctccctcctttaccgcctcaagttcaaggagtttgtccagagtgtccccaccaaaggcttcaacaccgagaagatccgggtgcccctcgggggatcgcgtggcatcaccttccaagtgtgggacgtcggggggcaggagaagctgcgaccactgtggcgctcttatacccgccggacagacggtctagtgtttgtggtggacgctgcggaggctgagcggctggaggaagccaaggtggagttgcaccgaatcagccgggcctcggacaaccagggcgtgccagtgctggtgctggccaacaagcaggaccagcccggggcactgagcgctgctgaggtggagaagaggctggcagtccgagagctagcagccgccactctcactcatgtgcaaggctgcagcgctgtggacggtctgggcctgcagcagggccttgagcgcctctatgagatgatcctcaagaggaagaaggcagctcggggtggcaagaagagacggtgacccaagccccccctccctttcctcccacctagtaggggtctgcacacttggacagcagggtgggaccagcctgtgacctctcagtcagactggggtgcaggacctgtccacctcaatgaaggagagaggagcatggggtgtcccgttttggtgccacactggggtggggatgggagatgggatgtctttgcatatctctctcatcctctctggagaagtgggcgctgcaggactgtggagacgtaaatgtaaactgtgactctacctcgaccctgtttcttatttttcttctctggctaaaaatttttaattggatgtgtttgggggcggggggatggaagtgacttggagaatgtgtttgggatgaaataactatctccccttcctctgtcccccaactggggagtctccccaggctgcttttctaggaataccagtcacatagtttttatttttgtgtctgtgaaagtgccaagaacccctccccacatttgtagatccatgaccctttttataagctgtgtgtgtcctctgtattattgttattaactattttttagcatttgcctgtaagttattaaagactgataactgtagctcttaccttggtctggggcattttcctctccttatcttgccccagagacaattcaagatttctatatggggttgtggcgcagggggagggagatttatcttgaagctgaatttgcaaagcaagcacttataaaaattagattgtgtgttacgggatggcttgtgaaaattataggggggagtggaaaacccctcaagct

SEQ ID NO: 1351 - DNA, 1390 bp, Homo sapiens
  source 1..1390: mol_type = unassigned DNA
gcctgccaaggcgcctgctcagcgactgatgcacagactgctgcagaggctgccggttttcccaacttctagagacggctttgctcattaccaggcatccttcccatgtaggcatcgagaagaaggctgagggaccctcgcaccagatttccatcccggagaccgatacgagtgcgtccattcctgttgccagctcctgcgccctccggactaacctcaaaaaccagaaaaactgcctgctcttctaaattgtgtgtcccaaaatatttcattaacaagtatcaagtgataatccatggaaaagtgatggaaagtcacaatacaagctggtttgtaaatatttgaatcacattatgggattgctagacagactttcagtcttgcttggcctgaagaagaaggaggttcatgttttgtgccttgggctagataatagtggcaaaacgacgatcattaacaaacttaaaccttcaaatgctcaatctcaaaatatccttccaacaataggattcagcatagagaaattcaaatcatccagtttgtcatttacagtgtttgacatgtcaggtcaaggaagatacagaaatctctgggaacactattataaagaaggccaagctattatttttgtcattgatagtagtgatagattaagaatggttgtggccaaagaagaactcgatactcttctgaatcatccagatattaaacaccgtcgaattccaatcttattctttgcaaataaaatggatcttagagatgcagtgacatctgtaaaagtgtctcagttgctgtgtttagagaacatcaaagataaaccctggcatatttgtgctagtgatgccataaaaggagaaggcttgcaagaaggtgtagactggcttcaagatcagatccagactgtgaagacatgaaaagataatagttggaaacctcagcaattttcaattcaaggaatctatctaagacaaatagaatacattttgtaaaagatgtttatgcatcaaaaaatataattttctgcttgcatttatggactctgacctttttaagaacataggacttcaggtatgctaatttggccattaattatttaaaaactaaatattccctcaaaagggctccctagaattatcaagttcttagtgaaggtctacatttgattgtacgtagaatgtttaaaagtcagttataagccatctcatcccatcataatttatgatatgtttaatatattttattttttaattgtctttttaaaaaatttagtttatgactttgcagtatgaattgtgcttgtgaaaaagaactttaaatatttataagggaccatgggtaattaatatatattcaatttttactatgtgtcactgtcaataaaatgtaaaat

SEQ ID NO: 1352 - DNA, 1350 bp, Homo sapiens
  source 1..1350: mol_type = unassigned DNA
gcctgccaaggcgcctgctcagcgactgatgcacagactgctgcagaggctgccggttttcccaacttctagagacggctttgctcattaccaggcatccttcccatgtaggcatcgagaagaaggctgagggaccctcgcaccagatttccatcccggagaccgatacgagtgcgtccattcctgttgccagctcctgcgccctccggactaacctcaaaaaccagatacagttgtcttggaagcctgttattgataaagttgctgcagcctcacatccttcaagctggtttgtaaatatttgaatcacattatgggattgctagacagactttcagtcttgcttggcctgaagaagaaggaggttcatgttttgtgccttgggctagataatagtggcaaaacgacgatcattaacaaacttaaaccttcaaatgctcaatctcaaaatatccttccaacaataggattcagcatagagaaattcaaatcatccagtttgtcatttacagtgtttgacatgtcaggtcaaggaagatacagaaatctctgggaacactattataaagaaggccaagctattatttttgtcattgatagtagtgatagattaagaatggttgtggccaaagaagaactcgatactcttctgaatcatccagatattaaacaccgtcgaattccaatcttattctttgcaaataaaatggatcttagagatgcagtgacatctgtaaaagtgtctcagttgctgtgtttagagaacatcaaagataaaccctggcatatttgtgctagtgatgccataaaaggagaaggcttgcaagaaggtgtagactggcttcaagatcagatccagactgtgaagacatgaaaagataatagttggaaacctcagcaattttcaattcaaggaatctatctaagacaaatagaatacattttgtaaaagatgtttatgcatcaaaaaatataattttctgcttgcatttatggactctgacctttttaagaacataggacttcaggtatgctaatttggccattaattatttaaaaactaaatattccctcaaaagggctccctagaattatcaagttcttagtgaaggtctacatttgattgtacgtagaatgtttaaaagtcagttataagccatctcatcccatcataatttatgatatgtttaatatattttattttttaattgtctttttaaaaaatttagtttatgactttgcagtatgaattgtgcttgtgaaaaagaactttaaatatttataagggaccatgggtaattaatatatattcaatttttactatgtgtcactgtcaataaaatgtaaaat

SEQ ID NO: 1353 - DNA, 894 bp, Homo sapiens
  source 1..894: mol_type = unassigned DNA
gctacgccgggaactgcccggctcctcgcaggaaataggcagctcaccctgccacctgtgcacacatttttcttcaatgtatagttcctcggcgcgcctctgaccttttcccggagctcttcaatcccagaagctatagcacaacggctgaatcgccaggacccccggggaggcgtggcttcaggaccggaagaagctcctgttgccaagggaacggtgcctgccaaggcgcctgctcagcgactgatgcacagactgctgcagaggctgccggttttcccaacttctagagacggctttgctcattaccaggcatccttcccatgtaggcatcgagaagaaggctgagggaccctcgcaccagatttccatcccggagaccgatacgagtgcgtccattcctgttgccagctcctgcgccctccggactaacctcaaaaaccagatacagttgtcttggaagcctgttattgataaagttgctgcagcctcacatccttcaagctggtttgtaaatatttgaatcacattatgggattgctagacagactttcagtcttgcttggcctgaagaagaaggaggttcatgttttgtgccttgggctagataatagtggcaaaacgacgatcattaacaaacttaaaccttcaaatgctcaatctcaaaatatccttccaacaataggattcagcatagagaaattcaaatcatccagtttgtcatttacagtgtttgacatgtcaggtcaaggaagatacagaaatctctgggaacactattataaagaaggccaagctattatttttgtcattgatagtagtgatagattaagaatggttgtggccaaagaagaactcgatactcttctgaatcatccagatattaaacaccgt

SEQ ID NO: 1354 - DNA, 1518 bp, Homo sapiens
  source 1..1518: mol_type = unassigned DNA
atgatgctacgccgggaactgcccggctcctcgcaggaaataggcagctcaccctgccacctgtgcacacatttttcttcaatgtatagttcctcggcgcgcctctgaccttttcccggagctcttcaatcccagaagctatagcacaacggctgaatcgccaggacccccggggaggcgtggcttcaggaccggaagaagctcctgttgccaagggaacggtgcctgccaaggcgcctgctcagcgactgatgcacagactgctgcagaggctgccggttttcccaacttctagagacggctttgctcattaccaggcatccttcccatgtaggcatcgagaagaaggctgagggaccctcgcaccagatttccatcccggagaccgatacgagtgcgtccattcctgttgccagctcctgcgccctccggactaacctcaaaaaccagctggtttgtaaatatttgaatcacattatgggattgctagacagactttcagtcttgcttggcctgaagaagaaggaggttcatgttttgtgccttgggctagataatagtggcaaaacgacgatcattaacaaacttaaaccttcaaatgctcaatctcaaaatatccttccaacaataggattcagcatagagaaattcaaatcatccagtttgtcatttacagtgtttgacatgtcaggtcaaggaagatacagaaatctctgggaacactattataaagaaggccaagctattatttttgtcattgatagtagtgatagattaagaatggttgtggccaaagaagaactcgatactcttctgaatcatccagatattaaacaccgtcgaattccaatcttattctttgcaaataaaatggatcttagagatgcagtgacatctgtaaaagtgtctcagttgctgtgtttagagaacatcaaagataaaccctggcatatttgtgctagtgatgccataaaaggagaaggcttgcaagaaggtgtagactggcttcaagatcagatccagactgtgaagacatgaaaagataatagttggaaacctcagcaattttcaattcaaggaatctatctaagacaaatagaatacattttgtaaaagatgtttatgcatcaaaaaatataattttctgcttgcatttatggactctgacctttttaagaacataggacttcaggtatgctaatttggccattaattatttaaaaactaaatattccctcaaaagggctccctagaattatcaagttcttagtgaaggtctacatttgattgtacgtagaatgtttaaaagtcagttataagccatctcatcccatcataatttatgatatgtttaatatattttattttttaattgtctttttaaaaaatttagtttatgactttgcagtatgaattgtgcttgtgaaaaagaactttaaatatttataagggaccatgggtaattaatatatattcaatttttactatgtgtcactgtcaataaaatgtaaaatataa

SEQ ID NO: 1355 - DNA, 1705 bp, Homo sapiens
  source 1..1705: mol_type = unassigned DNA
aactcccatgatgctacgccgggaactgcccggctcctcgcaggaaataggcagctcaccctgccacctgtgcacacatttttcttcaatgtatagttcctcggcgcgcctctgaccttttcccggagctcttcaatcccagaagctatagcacaacggctgaatcgccaggacccccggggaggcgtggcttcaggaccggaagaagctcctgttgccaagggaacggtgcctgccaaggcgcctgctcagcgactgatgcacagactgctgcagaggctgccggttttcccaacttctagagacggctttgctcattaccaggcatccttcccatgtaggcatcgagaagaaggctgagggaccctcgcaccagatttccatcccggagaccgatacgagtgcgtccattcctgttgccagctcctgcgccctccggactaacctcaaaaaccagaaaaactgcctgctcttctaaattgtgtgtcccaaaatatttcattaacaagtatcaagtgataatccatggaaaagtgatggaaagtcacaatacaagctggtttgtaaatatttgaatcacattatgggattgctagacagactttcagtcttgcttggcctgaagaagaaggaggttcatgttttgtgccttgggctagataatagtggcaaaacgacgatcattaacaaacttaaaccttcaaatgctcaatctcaaaatatccttccaacaataggattcagcatagagaaattcaaatcatccagtttgtcatttacagtgtttgacatgtcaggtcaaggaagatacagaaatctctgggaacactattataaagaaggccaagctattatttttgtcattgatagtagtgatagattaagaatggttgtggccaaagaagaactcgatactcttctgaatcatccagatattaaacaccgtcgaattccaatcttattctttgcaaataaaatggatcttagagatgcagtgacatctgtaaaagtgtctcagttgctgtgtttagagaacatcaaagataaaccctggcatatttgtgctagtgatgccataaaaggagaaggcttgcaagaaggtgtagactggcttcaagatcagatccagactgtgaagacatgaaaagataatagttggaaacctcagcaattttcaattcaaggaatctatctaagacaaatagaatacattttgtaaaagatgtttatgcatcaaaaaatataattttctgcttgcatttatggactctgacctttttaagaacataggacttcaggttgctataacaaagtaccatagactgggtggcttataaacgacagaaatttatttcttacagctctggagctggaagtctgagatcagattaccagcatggttgggttctggtgagagccgtcttggttgcagactgccatcttcttgtatcctcacatggccaaaagaggacaagagaactctctggagtctgtttgataagagcatgaatcccattacatcttcacatggctcctcccaaagaccccacctcctaatatcatcacatgtcatcacatagggggttagaatttcaacatagaaattttgggagaacacaaacattcagtcagttgcaatacttaaggcaaattcatcttgcttataactctggtgcatgtgcattaaaatactattgcattgtaa

SEQ ID NO: 1356 - DNA, 836 bp, Homo sapiens
  source 1..836: mol_type = unassigned DNA
ctatttgtctttaataatcctgggtaatagtcaactaataatcctgggtagtagtctggagacactcctagcggagtttactcgggagagggcggagaaatacatgacatgagcagtacaggctcatggttgggagctgagggaaggctgagaatcctcccggaacctctggattctgacgccccaggggttcttcacacaggctggccggtctcgggattgaagccggagacgtcagacgctaaggttgcttagactgcggcccacgtggaaggctcttagccaccctgcctggcccgaggagaaaaacaagcaaatcctagtgctgggcctggatggagcaggaaaaaccagtgtcctgcactctctagcttcaaacagagtccagcacagtgtggcacccacccaaggtttccatgcagtttgcatcaacactgaagacagccagatggagttcctggagattggtggcagtaaaccttttcggtcctactgggaaatgtacctatccaagggattgctgctgatctttgtggtggattcagcagatcacagccgattacctgaagccaagaaataccttcatcagctaattgcagcaaacccagtacttcctctggttgtgtttgcaaacaaacaggatcttgaagcagcctatcacattacagatatccatgaagctttggcattatctgaagtgggaaatgacaggaagatgttcttgtttggaacctacctgactaagaatggctcagagataccctccaccatgcaagatgccaaagacttgattgcacagctggctgcagatgtgcagtgaccaggactcagcccac

SEQ ID NO: 1357 - DNA, 1644 bp, Homo sapiens
  source 1..1644: mol_type = unassigned DNA
ctgtcattgtggaagagttgcaacttgggggcccgagattggatgaagcgcacagccacgctttgggttacacatttgaaactcagggggcttccatattgcagtcttgagtttggtctccctgggaaggtggggcaccagccccatgccacgttgcacgtatcagctggagcagaatcctggcttccttccggatgggcctggggtccatgcccgcgctcactgccaagatctttctggcccctacggacacgagtttgcgacctctgagtcactgggtgggcgcgtcggaaagaccagggcgcctcagtctggagctcgcagtcgtatggagagggcaggaccagccggggaggagggcggcgcgcgcgagggtcgccttcttcccagggcaccgggggcgtgggtgctgcgggcgtgcgccgagagggcagccttggaagtgggcgcagcttcggcagacacaggcgtgaggggctgcggagctcgagggccggcgcccctgcttgcctctgcgggaggtgggcgcgcccgggacggaacctggggcgtcagaacgaaaggcagcggcgccgcgcttcccagccggccagcctcccgcgcagcgccccggccggaagcctcctcgccgccgcttcctctcgagaaggcgcggggcgggctgtccggcccgcagggcggtcgagcccgcggcgccatggctcacgtcggctcccgcaagcgctcgaggagtcgcagccggtcccggggacgggggtcggaaaagagaaagaagaagagcaggaaagacacctcgaggaactgctcggcctccacatcccaaggtcgcaaggccagcacggcccctggggcggaggcctcaccttctccctgcatcacagagagaagcaagcagaaggcccggaggagaacaagatccagctcctcctcctcttcttccagttcttctagctcctcttcttcctcctcgtcctcctcctcttcctccagtgatggccggaagaagcgggggaagtacaaggacaagaggaggaagaagaagaagaagaggaagaagctgaagaagaagggcaaggagaaggcggaagcacagcaggtggaggctctgccgggcccctcgctggaccagtggcaccgatcagctggggaggaagaggatggcccagtcctgacggatgagcagaagtcccgaatccaggccatgaagcccatgaccaaggaggagtgggatgcccggcagagcatcatccgcaaggtggtggaccctgagacggggcgcaccaggcttattaagggagatggcgaggtcctagaggaaatcgtaaccaaagaacgacacagagagatcaacaagcaagccacccgaggggactgcctggccttccagatgcgagctgggttgcttccctgagggcccccgctggccaaggcctgtggacgacgctggcggcccagcctgggcaggtttcagggtgccagtgggaagcctgatgggtgctggtggcctttcccccgtggattggtctctggcccagcccagtctcttctcaggggcagggggtggaggttggggtcaccggcctgcttggcacccccatctgaaagagcagcacttctcagctattaaaggccccctggatagac

SEQ ID NO: 1358 - DNA, 1339 bp, Homo sapiens
  source 1..1339: mol_type = unassigned DNA
ggggcaccagccccatgccacgttgcacgtatcagctggagcagaatcctggcttccttccggatgggcctggggtccatgcccgcgctcactgccaagatctttctggcccctacggacacgagtttgcgacctctgagtcactgggtgggcgcgtcggaaagaccagggcgcctcagtctggagctcgcagtcgtatggagagggcaggaccagccggggaggagggcggcgcgcgcgagggtcgccttcttcccagggcaccgggggcgtgggtgctgcgggcgtgcgccgagagggcagccttggaagtgggcgcagcttcggcagacacaggcgtgaggggctgcggagctcgagggccggcgcccctgcttgcctctgcgggaggtgggcgcgcccgggacggaacctggggcgtcagaacgaaaggcagcggcgccgcgcttcccagccggccagcctcccgcgcagcgccccggccggaagcctcctcgccgccgcttcctctcgagaaggcgcggggcgggctgtccggcccgcagggcggtcgagcccgcggcgccatggctcacgtcggctcccgcaagcgctcgaggagtcgcagccggtcccggggacgggggtcggaaaagagaaagaagaagagcaggaaagacacctcgaggaactgctcggcctccacatcccaagagagaagcaagcagaaggcccggaggagaacaagatccagctcctcctcctcttcttccagttcttctagctcctcttcttcctcctcgtcctcctcctcttcctccagtgatggccggaagaagcgggggaagtacaaggacaagaggaggaagaagaagaagaagaggaagaagctgaagaagaagggcaaggagaaggcggaagcacagcaggtggaggctctgccgggcccctcgctggaccagtggcaccgatcagctggggaggaagaggatggcccagtcctgacggatgagcagaagtcccgaatccaggccatgaagcccatgaccaaggaggagtgggatgcccggcagagcatcatccgcaaggtggtggaccctgagacggggcgcaccaggcttattaagggagatggcgaggtcctagaggaaatcgtaaccaaagaacgacacagagagatcaacaaggtgggtgtggcccctctgcctgccatccgcccccagctctgtttgtgatgtacccctcctcctgtgtgctttcttccccagcaagccacccgaggggactgcctggccttccagatgcgagctgggttgcttccctgagggcccccgctggccaaggcctgtggacgacgctg

SEQ ID NO: 1359 - DNA, 1354 bp, Homo sapiens
  source 1..1354: mol_type = unassigned DNA
ctgagtcactgggtgggcgcgtcggaaagaccagggcgcctcagtctggagctcgcagtcgtatggagagggcaggaccagccggggaggagggcggcgcgcgcgagggtcgccttcttcccagggcaccgggggcgtgggtgctgcgggcgtgcgccgagagggcagccttggaagtgggcgcagcttcggcagacacaggcgtgaggggctgcggagctcgagggccggcgcccctgcttgcctctgcgggaggtgggcgcgcccgggacggaacctggggcgtcagaacgaaaggcagcggcgccgcgcttcccagccggccagcctcccgcgcagcgccccggccggaagcctcctcgccgccgcttcctctcgagaaggcgcggggcgggctgtccggcccgcagggcggtcgagcccgcggcgccatggctcacgtcggctcccgcaagcgctcgaggagtcgcagccggtcccggggacgggggtcggaaaagagaaagaagaagagcaggaaagacacctcgaggaactgctcggcctccacatcccaaggtcgcaaggccagcacggcccctggggcggaggagagaagcaagcagaaggcccggaggagaacaagatccagctcctcctcctcttcttccagttcttctagctcctcttcttcctcctcgtcctcctcctcttcctccagtgatggccggaagaagcgggggaagtacaaggacaagaggaggaagaagaagaagaagaggaagaagctgaagaagaagggcaaggagaaggcggaagcacagcaggtggaggctctgccgggcccctcgctggaccagtggcaccgatcagctggggaggaagaggatggcccagtcctgacggatgagcagaagtcccgaatccaggccatgaagcccatgaccaaggaggagtgggatgcccggcagagcatcatccgcaaggtggtggaccctgagacggggcgcaccaggcttattaagggagatggcgaggtcctagaggaaatcgtaaccaaagaacgacacagagagatcaacaagcaagccacccgaggggactgcctggccttccagatgcgagctgggttgcttccctgagggcccccgctggccaaggcctgtggacgacgctggcggcccagcctgggcaggtttcagggtgccagtgggaagcctgatgggtgctggtggcctttcccccgtggattggtctctggcccagcccagtctcttctcaggggcagggggtggaggttggggtcaccggcctgcttggcacccccatctgaaagagcagcacttctcagctattaaaggccccctggatagac

SEQ ID NO: 1360 - DNA, 1587 bp, Homo sapiens
  source 1..1587: mol_type = unassigned DNA
ctgtcattgtggaagagttgcaacttgggggcccgagattggatgaagcgcacagccacgctttgggttacacatttgaaactcagggggcttccatattgcagtcttgagtttggtctccctgggaaggtggggcaccagccccatgccacgttgcacgtatcagctggagcagaatcctggcttccttccggatgggcctggggtccatgcccgcgctcactgccaagatctttctggcccctacggacacgagtttgcgacctctgagtcactgggtgggcgcgtcggaaagaccagggcgcctcagtctggagctcgcagtcgtatggagagggcaggaccagccggggaggagggcggcgcgcgcgagggtcgccttcttcccagggcaccgggggcgtgggtgctgcgggcgtgcgccgagagggcagccttggaagtgggcgcagcttcggcagacacaggcgtgaggggctgcggagctcgagggccggcgcccctgcttgcctctgcgggaggtgggcgcgcccgggacggaacctggggcgtcagaacgaaaggcagcggcgccgcgcttcccagccggccagcctcccgcgcagcgccccggccggaagcctcctcgccgccgcttcctctcgagaaggcgcggggcgggctgtccggcccgcagggcggtcgagcccgcggcgccatggctcacgtcggctcccgcaagcgctcgaggagtcgcagccggtcccggggacgggggtcggaaaagagaaagaagaagagcaggaaagacacctcgaggaactgctcggcctccacatcccaagagagaagcaagcagaaggcccggaggagaacaagatccagctcctcctcctcttcttccagttcttctagctcctcttcttcctcctcgtcctcctcctcttcctccagtgatggccggaagaagcgggggaagtacaaggacaagaggaggaagaagaagaagaagaggaagaagctgaagaagaagggcaaggagaaggcggaagcacagcaggtggaggctctgccgggcccctcgctggaccagtggcaccgatcagctggggaggaagaggatggcccagtcctgacggatgagcagaagtcccgaatccaggccatgaagcccatgaccaaggaggagtgggatgcccggcagagcatcatccgcaaggtggtggaccctgagacggggcgcaccaggcttattaagggagatggcgaggtcctagaggaaatcgtaaccaaagaacgacacagagagatcaacaagcaagccacccgaggggactgcctggccttccagatgcgagctgggttgcttccctgagggcccccgctggccaaggcctgtggacgacgctggcggcccagcctgggcaggtttcagggtgccagtgggaagcctgatgggtgctggtggcctttcccccgtggattggtctctggcccagcccagtctcttctcaggggcagggggtggaggttggggtcaccggcctgcttggcacccccatctgaaagagcagcacttctcagctattaaaggccccctggatagac

SEQ ID NO: 1361 - DNA, 2101 bp, Homo sapiens
  source 1..2101: mol_type = unassigned DNA
cgaccgagacggagccgctgtcaactctccaactcagctcagctgatcggttgccgccgccgccgccgccagattctggaggcgaagaacgcaaagctgagaacatggacgttaatatcgccccactccgcgcctgggacgatttcttcccgggttccgatcgctttgcccggccggacttcagggacatttccaaatggaacaaccgcgtagtgagcaacctgctctattaccagaccaactacctggtggtggctgccatgatgatttccattgtggggtttctgagtcccttcaacatgatcctgggaggaatcgtggtggtgctggtgttcacagggtttgtgtgggcagcccacaataaagacgtccttcgccggatgaagaagcgctaccccacgacgttcgttatggtggtcatgttggcgagctatttccttatctccatgtttggaggagtcatggtctttgtgtttggcattacttttcctttgctgttgatgtttatccatgcatcgttgagacttcggaacctcaagaacaaactggagaataaaatggaaggaataggtttgaagaggacaccgatgggcattgtcctggatgccctagaacagcaggaagaaggcatcaacagactcactgactatatcagcaaagtgaaggaataaacataacttacctgagctagggttgcagcagaaattgagttgcagcttgcccttgtccagacctatgttctgcttgcgtttttgaaacaggaggtgcacgtaccacccaattatctatggcagcatgcatgtataggccgaactattatcagctctgatgtttcagagagaagacctcagaaaccgaaagaaaaccaccaccctcctattgtgtctgaagtttcacgtgtgtttatgaaatctaatgggaaatggatcacacgatttctttaagggaattaaaaaaaataaaagaattacggcttttacagcaacaatacgattatcttataggaaaaaaaaaatcattgtaaagtatcaagacaatacgagtaaatgaaaaggctgttaaagtagatgacatcatgtgttagcctgttcctaatcccctagaattgtaatgtgtgggatataaattagtttttattattctcttaaaaatcaaagatgatctctatcactttgccacctgtttgatgtgcagtggaaactggttaagccagttgttcatacttcctttacaaatataaagatagctgtttaggatattttgttacatttttgtaaatttttgaaatgctagtaatgtgttttcaccagcaagtatttgttgcaaacttaatgtcattttccttaagatggttacagctatgtaacctgtattattctggacggacttattaaaatacaaacagacaaaaaataaaacaaaacttgagttctatttaccttgcacattttttgttgttacagtgaaaaaaatggtccaagaaaatgtttgccatttttgcattgtttcgtttttaactggaacatttagaaagaaggaaatgaatgtgcattttattaattccttaggggcacaaggaggacaataatagctgatcttttgaaatttgaaaaacgtctttagatgaccaagcaaaaagactttaaaaaatggtaatgaaaatggaatgcagctactgcagctaataaaaaattttagatagcaattgttacaaccatatgcctttatagctagacattagaattatgatagcatgagtttatacattctattatttttcctccctttctcatgtttttataaataggtaataaaaaatgttttgcctgccaattgaatgatttcgtagctgaagtagaaacatttaggtttctgtagcattaaattgtgaagacaactggagtggtacttactgaagaaactctctgtatgtcctagaataagaagcaatgatgtgctgcttctgatttttcttgcattttaaattctcagccaacctacagccatgatctttagcacagtgatatcaccatgacttcacagacatggtctagaatctgtacccttacccacatatgaagaataaaattgattaaaggtt

SEQ ID NO: 1362 - DNA, 2060 bp, Homo sapiens
  source 1..2060: mol_type = unassigned DNA
cgaccgagacggagccgctgtcaactctccaactcagctcagctgatcggttgccgccgccgccgccgccagattctggaggcgaagaacgcaaagctgagaacatggacgttaatatcgccccactccgcgcctgggacgatttcttcccgggttccgatcgctttgcccggccggacttcagggacatttccaaatggaacaaccgcgtagtgagcaacctgctctattaccagaccaactacctggtggtggctgccatgatgatttccattgtggggtttctgagtcccttcaacatgatcctgggaggaatcgtggtggtgctggtgttcacagggtttgtgtgggcagcccacgacgttcgttatggtggtcatgttggcgagctatttccttatctccatgtttggaggagtcatggtctttgtgtttggcattacttttcctttgctgttgatgtttatccatgcatcgttgagacttcggaacctcaagaacaaactggagaataaaatggaaggaataggtttgaagaggacaccgatgggcattgtcctggatgccctagaacagcaggaagaaggcatcaacagactcactgactatatcagcaaagtgaaggaataaacataacttacctgagctagggttgcagcagaaattgagttgcagcttgcccttgtccagacctatgttctgcttgcgtttttgaaacaggaggtgcacgtaccacccaattatctatggcagcatgcatgtataggccgaactattatcagctctgatgtttcagagagaagacctcagaaaccgaaagaaaaccaccaccctcctattgtgtctgaagtttcacgtgtgtttatgaaatctaatgggaaatggatcacacgatttctttaagggaattaaaaaaaataaaagaattacggcttttacagcaacaatacgattatcttataggaaaaaaaaaatcattgtaaagtatcaagacaatacgagtaaatgaaaaggctgttaaagtagatgacatcatgtgttagcctgttcctaatcccctagaattgtaatgtgtgggatataaattagtttttattattctcttaaaaatcaaagatgatctctatcactttgccacctgtttgatgtgcagtggaaactggttaagccagttgttcatacttcctttacaaatataaagatagctgtttaggatattttgttacatttttgtaaatttttgaaatgctagtaatgtgttttcaccagcaagtatttgttgcaaacttaatgtcattttccttaagatggttacagctatgtaacctgtattattctggacggacttattaaaatacaaacagacaaaaaataaaacaaaacttgagttctatttaccttgcacattttttgttgttacagtgaaaaaaatggtccaagaaaatgtttgccatttttgcattgtttcgtttttaactggaacatttagaaagaaggaaatgaatgtgcattttattaattccttaggggcacaaggaggacaataatagctgatcttttgaaatttgaaaaacgtctttagatgaccaagcaaaaagactttaaaaaatggtaatgaaaatggaatgcagctactgcagctaataaaaaattttagatagcaattgttacaaccatatgcctttatagctagacattagaattatgatagcatgagtttatacattctattatttttcctccctttctcatgtttttataaataggtaataaaaaatgttttgcctgccaattgaatgatttcgtagctgaagtagaaacatttaggtttctgtagcattaaattgtgaagacaactggagtggtacttactgaagaaactctctgtatgtcctagaataagaagcaatgatgtgctgcttctgatttttcttgcattttaaattctcagccaacctacagccatgatctttagcacagtgatatcaccatgacttcacagacatggtctagaatctgtacccttacccacatatgaagaataaaattgattaaaggtt

SEQ ID NO: 1363 - DNA, 1872 bp, Homo sapiens
  source 1..1872: mol_type = unassigned DNA
ggcacgagagcagactctgaaccaggaagtagccgtgtctagcgctctacaagacacataggagaggtggcatccatggccctgaaacgacaagcccatgttgccagcgcattatcaccaagtcacttggcaagcgtttagcagactactggtgcctggatgatctgtaccgggagatggtgagatgctatgtggaaatcgttgagaagcttccagaacgccggccagacccagctaccattgaaggctgtgctcagctaaagcccaataactaccttctcgcctggcacacaccgttcaatgaaaaaggctcagggtttggagcggccaccaaggccatgtgcatcggcctgcggtactggaagcctgagcggctggagaccctcatcgaggtcagcgtggagtgcggccggatgacccacaaccatcccacaggcttcctgggctccctgtgcacggccctgtttgtgtcgttcgccgcacaaggaaagcccctggtccagtgggggagagacatgctgcgggcggtgcctctggcagaagagtactgcaggaagaccatccggcacacggcagaataccaggagcactggttttactttgaagctaaatggcaattttatttggaggagaggaaaatcagtaaagactcagaaaataaagccatcttccccgacaattatgatgcagaagagagggaaaagacctacaggaagtggagctcggaaggtcgagggggaagacgaggccacgatgcccccatgatagcctatgacgccctccttgcagcaggaaacagctggactgagctgtgtcaccgggccatgtttcatggaggggagagcgcggccacgggcaccattgcaggctgcctgttcgggttgctgtacggcctggacctcgttcccaaaggcttgtaccaggacctggaggacaaggagaagctggaggacctgggcgcggctctctaccgcctgtccacagaggagaagtaaagccatttctgccactttccccctagagagccgattccaccccggggcccgtagggccctctcgcagcccctgggtgagggtgtctctgtgaggctccactgcggtctgtgcctgactggccacatctaactctctgtttccaatttcagaatcctaactgttgcataaaatacattgtttgtcctgcgagaatattttccgtcctccaccatcaacattgacactgcgtagatttgccgcacttggacctccatgcgtggcactcacccgcagtctcctggacaggcgctgtattttattctgtcgcagagctaatgctgtttactcactcacttcaacaacactaactgcggtggtggcctccagcaggcccccccgctgcagaccctctgtcctgcctctgcctccaggcatgcgtttccccgtgagggccaatgcacctccccccaccccccaccctcccatgtccacagtgggtcgtgtgttcctggacagagaaacagtccacactggggcctgcgggacacatatagcagcatattttgctcttaaccccacccacctttttaatcacactagattttaagatcaatccctttttgaaacaactcacggagaaaaccagaacataaatggcctcctgccagctccggcgtctctctgtggtctgccttagtgggccaagtccaaatgcagagaaggcctttcccttccgcgcctgccccatcgggctcgctgacgaggaagcgctgtccctgtgatgaggttctctctcagagagtcttggaaaagagaccacttgctcttgtttaaaataaatttggacgtgatttttccatgcagcatctggtgtgaataaaacagcagttgactgat

SEQ ID NO: 1364 - DNA, 1341 bp, Homo sapiens
  source 1..1341: mol_type = unassigned DNA
tgaccactataaaagtcaggcgggctgaggaggagacaaaggccaggacgctccgcagctgttggggaagaggagctgcctcctgggatggagaaatttaaggctgcgatgttgctggggagcgtcggcgatgctcttggctacagaaatgtctgcaaggagaacagcactgtaggcatgaagatccaggaggagctgcaacgttccgggggcctggaccacctcgtactctcgccaggagaatggcccgtgagtgacaacaccatcatgcacatcgcaaccgccgaggccctcaccacagactactggtgcctggatgatctgtaccgggagatggtgagatgctatgtggaaatcgttgagaagcttccagaacgccggccagacccagctaccattgaaggctgtgctcagctaaagcccaataactaccttctcgcctggcacacaccgttcaatgaaaaaggctcagggtttggagcggccaccaaggccatgtgcatcggcctgcggtactggaagcctgagcggctggagaccctcatcgaggtcagcgtggagtgcggccggatgacccacaaccatcccacaggcttcctgggctccctgtgcacggccctgtttgtgtcgttcgccgcacaaggaaagcccctggtccagtgggggagagacatgctgcgggcggtgcctctggcagaagagtactgcaggaagaccatccggcacacggcagaataccaggagcactggttttactttgaagctaaatggcaattttatttggaggagaggaaaatcagtaaagactcagaaaataaagccatcttccccgacaattatgatgcagaagagagggaaaagacctacaggaagtggagctcggaaggtcgagggggaagacgaggccacgatgcccccatgatagcctatgacgccctccttgcagcaggaaacagctggactgagctgtgtcaccgggccatgtttcatggaggggagagcgcggccacgggcaccattgcaggctgcctgttcgggttgctgtacggcctggacctcgttcccaaaggcttgtaccaggacctggaggacaaggagaagctggaggacctgggcgcggctctctaccgcctgtccacagaggagaagtaaagccatttctgccactttccccctagagagccgattccaccccggggcccgtagggccctctcgcagcccctgggtgagggtgtctctgtgaggctccactgcggtctgtgcctgactggccacatctaactctctgtttccaatttcagaatcctaactgttgcataaaatacattgtttgtcctgcg

SEQ ID NO: 1365 - DNA, 950 bp, Homo sapiens
  source 1..950: mol_type = unassigned DNA
cctccttccgggtgagcctctgaacagggctgtctccttctgggtgagcctctctgaaccgggctgcctccttccgggtgtgtctctctgaacggggctcactccttccagggtccctccttcccggtgagcctctctgactggggctgcctccttccgggtgagcctctctgactggggctgcctccttccgggtgagcctctctgactggggctgcctccttccgggtgagcctctctgaacagggcacgagagcagactctgaaccaggaagtagccgtgtctagcgctctacaagacacataggagaggtggcatccatggccctgaaacgacaagcccatgttgccagcgcattatcaccaagtcacttggcaagcgtttagcagactactggtgcctggatgatctgtaccgggagatggtgagatgctatgtggaaatcgttgagaagcttccagaacgccggccagacccagctaccattgaaggctgtgctcagctaaagcccaataactaccttctcgcctggcacacaccgttcaatgaaaaaggctcagggtttggagcggccaccaaggccatgtgcatcggcctgcggtactggaagcctgagcggctggagaccctcatcgaggtcagcgtggagtgcggccggatgacccacaaccatcccacaggcttcctgggctccctgtgcacggccctgtttgtgtcgttcgccgcacaaggaaagcccctggtccagtgggggagagacatgctgcgggcggtgcctctggcagaagagtactgcaggaagaccatccggcacacggcagaataccaggagcactggttttactttgaagctaaatggcaattttatttggaggagaggaaaatcagtaaagactcagaaaataaagccatcttccccgacaattatgatgcagaagagagggaaaag

SEQ ID NO: 1366 - DNA, 1668 bp, Homo sapiens
  source 1..1668: mol_type = unassigned DNA
caccggaagtggcgagcagtctgcgcgcggatggccgcagcggcgatggcggcagcggcaggtggaggggctggcgcggcccgctccctctcgcgcttccgaggctgcctggctggcgcgctgctcggggactgcgtgggctccttctacgaggcccacgacaccgtcgacctgacgtcagtcctgcgtcatgtccagagtctggagccggaccccggcacgcccgggagtgagcggacagaagccttgtactacacagatgacacagccatggccagggccctggtgcagtccctgctagccaaggaggcctttgacgaggtggacatggctcacagatttgctcaggagtacaagaaagaccctgacaggggctatggtgctggagtagtcactgtcttcaagaagctcctgaaccccaaatgtcgcgatgtctttgagcctgcccgggcccagtttaacgggaaaggctcctatggcaatggaggtgccatgcgggtggctggcatctccctggcctatagcagtgtccaggatgtgcagaagtttgcccggctctcggcccagctgacacacgcctcctccctgggttacaatggcgccatcctgcaggccctggctgtgcacctggccttgcagggcgagtcttccagcgagcactttctcaagcaactcctgggccacatggaggatctggagggtgatgcccagtccgtcttggatgccagggagttgggcatggaggagcgtccatactccagccgcctgaagaagattggagagcttctagaccaggcatcggtgaccagggaggaagtggtgtctgagctagggaatggcattgctgcctttgagtcggtacccaccgccatctactgcttcctacgctgcatggagccagaccctgagatcccttctgccttcaatagcctccaaaggactctcatttattccatctcacttggtggggacacagacaccattgccaccatggctggggccattgctggtgcctactatgggatggatcaggtgccagagagctggcagcaaagctgtgaaggctacgaggagacagacatcctggcccaaagcctgcaccgtgtcttccagaagagttgatgagggctacagctgttggggctctgccaggtcccctgggaccaactacagctccaatcagaaaccctgcgcttccttgagtgtggcttcccacttttcctgcattgtggagctgactgagtacaccggtgaggctggggtctctgcaggggaggtcactggaacagcgagcaagggactggtgcctcgctggtgctgggtctctggtttgctgcagagccgtaggacactcctggctcctcagtaggacagacagacgcaggcgggtttattttggaggggtacttgtggcattttcctgtattgtcttggacatgggatgtggggaggtggaaatgatgagcagtagcatcatttctccctgttgggttttagccagtttgccagcaagcgcatcctagcagggtccccgagcagcaggttgtgtggatgaagggacaggcacttgcatccagctgatctaggtcacacctggctcttggctgccatgtggcttattaacagcttccagtggaagtcgcaataaacagtttttggtaaatctca

SEQ ID NO: 1367 - DNA, 1425 bp, Homo sapiens
  source 1..1425: mol_type = unassigned DNA
agcagtctgcgcgcggatggccgcagcggcgatggcggcagcgcttccgaggctgcctggctggcgcgctgctcggggactgcgtgggctccttctacgaggcccacgacaccgtcgacctgacgtcagtcctgcgtcatgtccagagtctggagccggaccccggcacgcccgggagtgagcggacagaagccttgtactacacagatgacacagccatggccagggccctggtgcagtccctgctagccaaggaggcctttgacgaggtggacatggctcacagatttgctcaggagtacaagaaagaccctgacaggggctatggtgctggagtagtcactgtcttcaagaagctcctgaaccccaaatgtcgcgatgtctttgagcctgcccgggcccagtttaacgggaaaggctcctatggcaatggaggtgccatgcgggtggctggcatctccctggcctatagcagtgtccaggatgtgcagaagtttgcccggctctcggcccagctgacacacgcctcctccctgggttacaatggcgccatcctgcaggccctggctgtgcacctggccttgcagggcgagtcttccagcgagcactttctcaagcaactcctgggccacatggaggatctggagggtgatgcccagtccgtcttggatgccagggagttgggcatggaggagcgtccatactccagccgcctgaagaagattggagagcttctagaccaggcatcggtgaccagggaggaagtggtgtctgagctagggaatggcattgctgcctttgagtcggtacccaccgccatctactgcttcctacgctgcatggagccagaccctgagatcccttctgccttcaatagcctccaaaggactctcatttattccatctcacttggtggggacacagacaccattgccaccatggctggggccattgctggtgcctactatgggatggatcaggtgccagagagctggcagcaaagctgtgaaggctacgaggagacagacatcctggcccaaagcctgcaccgtgtcttccagaagagttgatgagggctacagctgttggggctctgccaggtcccctgggaccaactacagctccaatcagaaaccctgcgcttccttgagtgtggcttcccacttttcctgcattgtggagctgactgagtacaccggtgaggctggggtctctgcaggggaggtcactggaacagcgagcaagggactggtgcctcgctggtgctgggtctctggtttgctgcagagccgtaggacactcctggctcctcagtaggacagacagacgcaggcgggtttattttggaggggtacttgtggcattttcctgtattgtcttggacatgggatgtggggaggtggaaatgatgagcagtagcatcat

SEQ ID NO: 1368 - DNA, 1279 bp, Homo sapiens
  source 1..1279: mol_type = unassigned DNA
agtctgcgcgcggatggccgcagcggcgatggcggcagcggcaggtggaggggctggcgcggcccgctccctctcgcgcttccgaggctgcctggctggcgcgctgctcggggactgcgtgggctccttctacgaggcccacgacaccgtcgacctgacgtcagtcctgcgtcatgtccagagtctggagccggaccccggcacgcccgggagtgagcggacagaagccttgtactacacagatgacacagccatggccagggccctggtgcagtccctgctagccaaggaggcctttgacgaggtggacatggctcacagatttgctcaggagtacaagaaagaccctgaaccccaaatgtcgcgatgtctttgagcctgcccgggcccagtttaacgggaaaggctcctatggcaatggaggtgccatgcgggtggctggcatctccctggcctatagcagtgtccaggatgtgcagaagtttgcccggctctcggcccagctgacacacgcctcctccctgggttacaatggcgccatcctgcaggccctggctgtgcacctggccttgcagggcgagtcttccagcgagcactttctcaagcaactcctgggccacatggaggatctggagggtgatgcccagtccgtcttggatgccagggagttgggcatggaggagcgtccatactccagccgcctgaagaagattggagagcttctagaccaggcatcggtgaccagggaggaagtggtgtctgagctagggaatggcattgctgcctttgagtcggtacccaccgccatctactgcttcctacgctgcatggagccagaccctgagatcccttctgccttcaatagcctccaaaggactctcatttattccatctcacttggtggggacacagacaccattgccaccatggctggggccattgctggtgcctactatgggatggatcaggtgccagagagctggcagcaaagctgtgaaggctacgaggagacagacatcctggcccaaagcctgcaccgtgtcttccagaagagttgatgagggctacagctgttggggctctgccaggtcccctgggaccaactacagctccaatcagaaaccctgcgcttccttgagtgtggcttcccacttttcctgcattgtggagctgactgagtacaccggtgaggctggggtctctgcaggggaggtcactggaacagcgagcaagggactggtgcctcgctggtgctgggtctctggtttgctgcagagcc

SEQ ID NO: 1369 - DNA, 1312 bp, Homo sapiens
  source 1..1312: mol_type = unassigned DNA
ggccatggtggagatcagcagcagcttccccacccaggacaaggcctagatgaggaaactgagacccaaaaagagacagcaactggcccagggtcaccagcatgcagatgcctgctatgatgtctctgcttcttgtgtctgtgggcctcatggaagcacttcaggcccagagccaccccatcacacgacgagacctcttctctcaagagattcagctggacatggccctggcctcctttgatgaccagtacgctggctgtgctgctgccatgacagctgctctcccggatctcaaccacacggagttccaggccaaccaggtgtatgcagacagctggacactggcaagcagccaatggcaggagcgtcaggccaggtggccagagtggagtctcagccccacccgtccatccccgccacccctgggcttccgcgatgagcatggggtggccctcctggcctacacagccaacagccccctgcacaaggagttcaatgcagccgtgcgtgaggcgggccgctcccgggcccactacctccaccacttctccttcaagacactccatttcctgctgactgaggccctgcagctcctgggcagcggccagcgtccaccccggtgccaccaggtgttccgaggtgtgcacggcctgcgcttccggccagcagggccccgggccaccgtgaggctggggggctttgcttctgcctccctgaagcatgttgcagcccagcagtttggtgaggacaccttcttcggcatctggacctgccttggggcccctatcaagggctactccttcttccctggagaggaagaggtgctgatccccccctttgagaccttccaagtgatcaatgccagcagactggcccagggccccgcccgcatctacctccgagccctgggcaagcacagcacctacaactgcgagtacatcaaagacaagaagtgcaagtctgggccttgccatctggataattcagccatgggtcagagccccctctctgcagtctggtctttgctgctgctgctctggttcctcgtggtgagggcctttccagatggtccaggcctcctttgatgcatgagacacgggacagcctcgcctgctgcctctgcccatcctgaggatgttggccatgtgtgctttcagtgtaaccaagattcctgtcaatcccatctgcagggaactctgggaccttctctggtagctgccagaccggctggtggagaaacaggagacaatctggggactgaaccttacccagggctgtaggagtgagactctgaataaagggttgggccggc

SEQ ID NO: 1370 - DNA, 1517 bp, Homo sapiens
  source 1..1517: mol_type = unassigned DNA
agtgaggaggttatacccggaggtctcgacgctcgctcgtgctgctcgtgttgccgctgggtacgtttgctgccagtgctgatccagccggaggcgaagagaagcactttgggggcaaaagaagagaaaaatgaagacgggacattttgaaatagtcaccatgctgctggcaaccatgattctagtggacattttccaggtgaaggctgaagtgttagacatggcagataatgcatttgatgatgaatacctgaaatgtacggacaggatggaaattaaatacgttccccaactgctaaaggaggaaaaagcaagccaccagcaattagatactgtgtgggaaaatgcaaaagccaaatgggcagcccgaaagactcaaatctttctccctatgaattttaaggataaccatggaatagccctgatggcatatatttccgaagctcaagagcaaactcccttttaccatctgttcagtgaagctgtgaagatggctggccaatctcgagaagattatatctatggcttccagttcaaagctttccacttttacctcacaagagccctgcagttgctgagaaaaccttgtgaggccagttccaaaactgtggtatatagaacaagccagggcacttcatttacatttggagggctaaaccaagccaggtttggccattttaccttggcatattcagccaaacctcaggctgctaatgaccagctcactgtgttatccatctacacatgccttggagttgacattgaaaattttcttgataaagaaagtgaaagaattactttaatacctctgaatgaggtttttcaagtgtcacaggagggggctggcaataaccttatccttcaaagcataaacaagacctgcagccattatgagtgtgcatttctaggtggactaaaaaccgaaaactgtattgagaacctagaatattttcaacccatctatgtctacaaccctggtgagaaaaaccagaagcttgaagaccatagtgagaaaaactggaagcttgaagaccatggtgagaaaaaccagaagcttgaagaccatggtgtgaaaatccttgaacccacccaaatacctgctccaggtccagttcctgttccaggtcccaaaagccatccttctgcatcctcgggcaaactgctgcttccacagtttgggatggtcatcattttaatcagtgtttctgctataaatctctttgttgctctgtagtttgatgcattgtttatctttcttattctttacttgaaataactatagggatccacaggagatcaaaaggaatgatgtattttttacgtgttggccaaagtcactggataaaatgagaattgtatatttgttattcattttgcaaattcagaaagttggtccagatatatgtcacagaacttttcacttgtatactactcttacaatggaaaaaaatcccgaaaactgtatacttctgattaaattcaataaaagattttgattagatatttcagaattgcca

SEQ ID NO: 1371 - DNA, 1528 bp, Homo sapiens
  source 1..1528: mol_type = unassigned DNA
ctcactgtcaacaacatcccatcctgaagacttgcttaccacaactgagagtggggagtcagtttgaggcctagcatcacttaaacttcctccaaaggcacaaaagccagaagagaaaaatgaagacgggacattttgaaatagtcaccatgctgctggcaaccatgattctagtggacattttccaggtgaaggctgaagtgttagacatggcagataatgcatttgatgatgaatacctgaaatgtacggacaggatggaaattaaatacgttccccaactgctaaaggaggaaaaagcaagccaccagcaattagatactgtgtgggaaaatgcaaaagccaaatgggcagcccgaaagactcaaatctttctccctatgaattttaaggataaccatggaatagccctgatggcatatatttccgaagctcaagagcaaactcccttttaccatctgttcagtgaagctgtgaagatggctggccaatctcgagaagattatatctatggcttccagttcaaagctttccacttttacctcacaagagccctgcagttgctgagaaaaccttgtgaggccagttccaaaactgtggtatatagaacaagccagggcacttcatttacatttggagggctaaaccaagccaggtttggccattttaccttggcatattcagccaaacctcaggctgctaatgaccagctcactgtgttatccatctacacatgccttggagttgacattgaaaattttcttgataaagaaagtgaaagaattactttaatacctctgaatgaggtttttcaagtgtcacaggagggggctggcaataaccttatccttcaaagcataaacaagacctgcagccattatgagtgtgcatttctaggtggactaaaaaccgaaaactgtattgagaacctagaatattttcaacccatctatgtctacaaccctggtgagaaaaaccagaagcttgaagaccatagtgagaaaaactggaagcttgaagaccatggtgagaaaaaccagaagcttgaagaccatggtgtgaaaatccttgaacccacccaaatacctgaagataaaagtcaaggaaatatcaacaatcctactccaggtccagttcctgttccaggtcccaaaagccatccttctgcatcctcgggcaaactgctgcttccacagtttgggatggtcatcattttaatcagtgtttctgctataaatctctttgttgctctgtagtttgatgcattgtttatctttcttattctttacttgaaataactatagggatccacaggagatcaaaaggaatgatgtattttttacgtgttggccaaagtcactggataaaatgagaattgtatatttgttattcattttgcaaattcagaaagttggtccagatatatgtcacagaacttttcacttgtatactactcttacaatggaaaaaaatcccgaaaactgtatacttctgattaaattcaataaaagattttgattagatattt

SEQ ID NO: 1372 - DNA, 1561 bp, Homo sapiens
  source 1..1561: mol_type = unassigned DNA
ctcactgtcaacaacatcccatcctgaagacttgcttaccacaactgagagtggggagtcagtttgaggcctagcatcacttaaacttcctccaaaggcacaaaagccagaagagaaaaatgaagacgggacattttgaaatagtcaccatgctgctggcaaccatgattctagtggacattttccaggtgaaggctgaagtgttagacatggcagataatgcatttgatgatgaatacctgaaatgtacggacaggatggaaattaaatacgttccccaactgctaaaggaggaaaaagcaagccaccagcaattagatactgtgtgggaaaatgcaaaagccaaatgggcagcccgaaagactcaaatctttctccctatgaattttaaggataaccatggaatagccctgatggcatatatttccgaagctcaagagcaaactcccttttaccatctgttcagtgaagctgtgaagatggctggccaatctcgagaagattatatctatggcttccagttcaaagctttccacttttacctcacaagagccctgcagttgctgagaaaaccttgtgaggccagttccaaaactgtggtatatagaacaagccagggcacttcatttacatttggagggctaaaccaagccaggtttggccattttaccttggcatattcagccaaacctcaggctgctaatgaccagctcactgtgttatccatctacacatgccttggagttgacattgaaaattttcttgataaagaaagtgaaagaattactttaatacctctgaatgaggtttttcaagtgtcacaggagggggctggcaataaccttatccttcaaagcataaacaagacctgcagccattatgagtgtgcatttctaggtggactaaaaaccgaaaactgtattgagaacctagaatattttcaacccatctatgtctacaaccctggtgagaaaaaccagaagcttgaagaccatagtgagaaaaactggaagcttgaagaccatggtgagaaaaaccagaagcttgaagaccatggtgtgaaaatccttgaacccacccaaatacctggaatgaaaattccagaaccttttccactacctgaagataaaagtcaaggaaatatcaacaatcctactccaggtccagttcctgttccaggtcccaaaagccatccttctgcatcctcgggcaaactgctgcttccacagtttgggatggtcatcattttaatcagtgtttctgctataaatctctttgttgctctgtagtttgatgcattgtttatctttcttattctttacttgaaataactatagggatccacaggagatcaaaaggaatgatgtattttttacgtgttggccaaagtcactggataaaatgagaattgtatatttgttattcattttgcaaattcagaaagttggtccagatatatgtcacagaacttttcacttgtatactactcttacaatggaaaaaaatcccgaaaactgtatacttctgattaaattcaataaaagattttgattagatattt

SEQ ID NO: 1373 - DNA, 545 bp, Homo sapiens
  source 1..545: mol_type = unassigned DNA
aaatgctaatgtaaccccaaagaactttacaaagcggaattcttagttttcacaagtgtggcccagcctccctcttgaatctttttggttgtggaatcgaggtgttctgtttaattatccagtgtgactgactctgtggcagggacgaagagaaaaatgaagacgggacattttgaaatagtcaccatgctgctggcaaccatgattctagtggacattttccaggtgaaggctgaagtgttagacatggcagataatgcatttgatgatgaatacctgaaatgtacggacaggatggaaattaaatacgttccccaactgctaaaggaggaaaaagcaagccaccagcaattagatactgtgtgggaaaatgcaaaagccaaatgggcagcccgaaagactcaaatctttctccctatgaattttaaggataaccatggaatagccctgatggcatatatttccgaagctcaagagcaaactcccttttaccatctgttcagtgaagctgtgaagatggctggccaatctcgagaagattatat

SEQ ID NO: 1374 - DNA, 560 bp, Homo sapiens
  source 1..560: mol_type = unassigned DNA
ttcttgttcccgccttcagaaagttataagagaaaaatgaagacgggacattttgaaatagtcaccatgctgctggcaaccatgattctagtggacattttccaggtgaaggctgaagtgttagacatggcagataatgcatttgatgatgaatacctgaaatgtacggacaggatggaaattaaatacgttccccaactgctaaaggaggaaaaagcaagccaccagcaattagatactgtgtgggaaaatgcaaaagccaaatgggcagcccgaaagactcaaatctttctccctatgaattttaaggataaccatggaatagccctgatggcatatatttccgaagctcaagagcaaactcccttttaccatctgttcagtgaagctgtgaagatggctggccaatctcgagaagattatatctatggcttccagttcaaagctttccacttttacctcacaagagccctgcagttgctgagaaaaccttgtgaggccagttccaaaactgtggtatatagaacaagccagggcacttcatttacatttggagggct

SEQ ID NO: 1375 - DNA, 801 bp, Homo sapiens
  source 1..801: mol_type = unassigned DNA
gttgccgctgggtacgtttgctgccagtgctgatccagccggaggcgaagagaagcactttgggggcaaaagaatcttctgatggcatgctaacaattgtagatggcaactgtgttggaaactaggggatcccatctgagttggtcaaagtctgccaaaaagaaaaaagaaaaccaatatttaagagaagagaaaaatgaagacgggacattttgaaatagtcaccatgctgctggcaaccatgattctagtggacattttccaggtgaaggctgaagtgttagacatggcagataatgcatttgatgatgaatacctgaaatgtacggacaggatggaaattaaatacgttccccaactgctaaaggaggaaaaagcaagccaccagcaattagatactgtgtgggaaaatgcaaaagccaaatgggcagcccgaaagactcaaatctttctccctatgaattttaaggataaccatggaatagccctgatggcatatatttccgaagctcaagagcaaactcccttttaccatctgttcagtgaagctgtgaagatggctggccaatctcgagaagattatatctatggcttccagttcaaagctttccacttttacctcacaagagccctgcagttgctgagaaaaccttgtgaggccagttccaaaactgtggtatatagaacaagccagggcacttcatttacatttggagggctaaaccaagccaggtttggccattttaccttggcatattcagccaaacctcaggctgctaatgaccagctcactgtgttatc

SEQ ID NO: 1376 - DNA, 502 bp, Homo sapiens
  source 1..502: mol_type = unassigned DNA
ttccagaaccttcttcagtgaggaggttatacccggaggtctcgacgctcgctcgtgctgctcgtgttgccgctgggtacgtttgctgccagtgctgatccagccggaggcgaagagaagcactttgggggcaaaaggccaaaaagaaaaaagaaaaccaatatttaagagaagagaaaaatgaagacgggacattttgaaatagtcaccatgctgctggcaaccatgattctagtggacattttccaggtgaaggctgaagtgttagacatggcagataatgcatttgatgatgaatacctgaaatgtacggacaggatggaaattaaatacgttccccaactgctaaaggaggaaaaagcaagccaccagcaattagatactgtgtgggaaaatgcaaaagccaaatgggcagcccgaaagactcaaatctttctccctatgaattttaaggataaccatggaatagccctgatggcatatatttccgaagctcaagagc

SEQ ID NO: 1377 - DNA, 5129 bp, Homo sapiens
  source 1..5129: mol_type = unassigned DNA
gctttttcctgtttggctgggaaagggaaggctgaactgctgagtctgacacttaacaggacttcggcattcccctgaatacagactagatcagagattttatttttttaattgaaaagtaacttgggttctctttagaaacccttatttggtgtgcgcatctggctatttcacagagatttcagttttgcaaagaagtcggagttgatttcttccctcagacaagctattggttgttggtgggcaacagaagttgctcagcatagacaggggaaaaaacggttacggatgagactgaaagaaaacctcaaaggagaactctgagaattcatctcaggatgaagctgcaagggcaaaggagaagtacttgtgacacaagcaaatgggtccattgatcaacagatgcaagaagattcttctcccaactactgtacctcctgcaacgatgagaatctggctccttggaggcctgctgccattcctgctgctcctctctggcctgcagagacccacagagggttctgaggttgcaattaaaatcgacttcgacttcgcaccaggttcttttgatgatcagtaccaaggctgtagcaaacaggttatggagaaactaactcaaggggattatttcacaaaagacatagaagcccagaagaattattttaggatgtggcaaaaagcccacttagcctggcttaaccaaggaaaagttctaccccagaacatgactaccacacacgctgtggctattttgttttatacattgaacagcaatgttcattctgactttactagagccatggcctctgttgccaggactccacagcagtatgaacgttcattccacttcaaatatttacactactacctcacctcagcaatccagctgctgaggaaagacagcatcatggagaatggcactctgtgctatgaggtgcattataggacgaaggatgtccactttaatgcctacacaggggccaccattcgatttggccaattcctctccacatccctcctgaaagaagaggcacaggagtttgggaaccagacactatttaccatattcacctgcctgggtgcacctgtacagtacttctccctcaagaaggaagtcttgatccctccctatgagctgtttaaagttataaatatgagctaccacccaagaggagactggttgcagttgaggtcaactgggaacctgagcacatataactgtcagctgctaaaagcttccagcaagaaatgcatccctgatcctatagctattgcatctctctcctttttgaccagtgtcatcatcttttccaaaagcagagtataaagaaatcttgtggctccttttatttaaaaaaaatatttaaataaaatcttttttattggccttttggctagaaatggacatttattttccaggaaggatgatcccatcatacttctgctgaaaccagtgcatggcctcctctttgctaattctcttatgcctttccttgtacccctttgccttatttcaatctgggcaccctaagtactcttggggaaatcactctgcccagctagcaactgatgcagagctggctcagcccactgactgtgattggcctgtaactcaggccttagccaatcagtatatttcttcttcatggacacaaagattcatgctggaatagaaaatgatccaatcagagcctgtgagatacaatcagggtacttttgtggaattgcaattggaaatagaatgggagcttcttttctgaatggatattaatgaaagcagggtaggagcttatagctgccagcaaagatcccgccaccaggagaggagaccccatctccttgagaaaggatctaacacaacaaaggaagagctgataagtgaaaagaaactgagacctgatgagaatgtataagcctctggatccaactttgcctaaagctgaatactacaagatttttcattacataaatcaataatttatgtttttgcttgcataatttgaattagattttctatgtcaagcatcaagcagttgaagttccaacgaatacaagcactcttccttattttttttaatttagttattctaaataggaacaaatcaaagaagattaaattagaaagcaaaggacaaattcttcaccaaacagaaaagctttgaaccccagagattaaccaaggtgtgaattttcttcagagattttttatgagcattcaagattaagctagtatggcctcagatgagaagacacatggaaacttgagaaataaaagggaaagttaatgaaagatgttagtgaaatttcattcaccagcagtaatgggtgttcatgcatgttcctaagacattacaaaagttaaaatttaaactcatatgttaattcatagagaacttgatggcaaatttaagtcttcatagcaaatttaaatattaggaaaacatgagggtatgtgtgaaggttaacagagagtatgagagaaaaaaacactgattacaaacaaatatcagcaatatagcgaggtctcattacatgtaaactagtacatgcaaagaagtataaattgttgaattgtatagctggaaatgtcctctaacgcttccctcaggtagtaatttaggtagcgacataagggattatttaacccgatcacgatcactgaagaccctggtatcaggctaaatggagtaaagatgagggctagctctataattttggattttgaaagtccatgctccttatcccttttaagatttggataagaaacagcaaaactgaaaatcggtccatctatttactctccataggacttcctgaatggcctgtgtcatgatcaaagaaatggaatggggaataagctacataaaattacctggcagggagttcaggcatctctgtactatcattctttaaattgggatttgaaactaacagggccaaatcacctctgtcacctagttgcagtagcctctacagtcaataaaggaaagaatttctgccaggcatggtggctcacccctgtaatcccagcactttgggaggccgaggaggacggatcacgaggtcaggagttcaagaccagcctggccagcatggtgaaaccccgtctctactacaaatacaaaaattagccaggcatggtggcacgcacctgtaatcccagctacttgggaggctgaggcaggaaaattgcctaaacccaggaggcggaggtagtgcagtgagccaagttcacaccactgcactccagcctgggcaacagagtgagactcgatctcaaaaaaagaaaaaaagaaagaatttctacaaacagacaatttatgtgacttgcataggatagggtctttggcagtttggtggctacctagtagagagtcctggggacatggctctgggagcaagcttttccagtgagcatcgatgagtcagtaatgacatgctatgttggtaaaagccacccaacatcttaagtacatttttcctgtgccatataaatgcatgtattgagccatactgtgtacaaagcactttggggattaaaagttaagaacactaggccagatctctcatgagtttacaatctcttaggagaaattaagaacataaagcaagccacaagtgaaatgccaaaaaaaaaaaaggcaaaaatcaagttttctgttcataacaattcaaaagaaagatttcttccaactgaggcaagaagagacacccggaaggctttaagtaagaggctgcatttgaaccagccgttagggctctaggctgggagaaggggtgagcagaaggagaaaaaaacaagaaagagtatgtgccaagtgcgtagtgcccaaaacaaggccaaatattaaatgcttggagctgagagaaaaatgtgattcctctggcctatggttagataaagctttctatcagagatgatgttttacttagaggaaagcagaaaatagaagcgaatacggaatgatcgatgtatgtacagcataaggtcagggagcagataggtctggcagagagtgaggggtaatgtgggctggagaggaaattggaagccactcagtgaagctaaaaagtcagccaaaagcatttgatttccatgagaagtcataattttctgagtaagacaattctcctaaagcgttgactctctaggcacaagcagcaatagcatcctttaagaactcattagaaatgtgaattttagggcctgatcccagactacagactacagaaattgaacagtctgttttaataagtcctctagatgattctgctatacaccaacatttgagaacactgtgacttacacaattatgatccttaagggaatagccaagtttctaaaaaagataacttagttctaactcctgctgctgttttacagatcaaatctctggagacagaaactattctcttaaaattatgtagattcatgagtttggttaaggataaatgtacatagctcacatcccctcagtctctccctatagtccaaagttgttgagcaaggaatctgtagagtattgatttaaattgattaagttacatgtttatgaaactctaagagactagttttagaaatttcactgtaatttctgctgggataaatttgttagcctgggatatcttccaaagataaggcggatgctcaaatatgtgtaaattcatgcaactgttaacagagactgtgctgtaaggagtacttatgtcctatagtaattttattaaacaaatacatgtatgtctccttttgatgtgtacagaaatatactgtttaatctgaagaagctgattgaaacaggaaaaatttaaaaagtaaaaacactcaacccatgtaatactttatttttataacaaggtgttctctttaatacgcctattagattatcctgaagttctctatttactcttactttaaaaaaaatccaatgaaagaaaatttcagtaaagtttgttttgctagaagaatcaggattcttgtactgagttgtctaataatatgaatcaaattgatttacactgaatgaactagctcttgatttggtaaaattcaacaagcatttattaggtgctttcagaaataccaagatgcagcaaacactggcaactaataaaaaaaattacaagta

SEQ ID NO: 1378 - DNA, 393 bp, Homo sapiens
  source 1..393: mol_type = unassigned DNA
tacggatgagactgaaagaaaacctcaaaggagaactctgagaattcatctcaggatgaagctgcaagggcaaaggagaagtacttgtgacacaagcaaatgggtccattgatcaacagatgcaagaagattcttctcccaactactgtacctcctgcaacgatgagaatctggctccttggaggcctgctgccattcctgctgctcctctctggcctgcagagacccacagagggttctgagcttccagcaagaaatgcatccctgatcctatagctattgcatctctctcctttttgaccagtgtcatcatcttttccaaaagcagagtataaagaaatcttgtggctccttttatttaaaaaaaatatttaaataaaatcttttttattg

SEQ ID NO: 1379 - DNA, 1241 bp, Homo sapiens
  source 1..1241: mol_type = unassigned DNA
gtcgggttaccagcgcgggggctacagttagcctcgagaacctttgctttcagccggactccggactcctccggggacagcgcagcgcccgccagagccctcggcgctccctcccgctggcggcttccgcagccttcaaggatggcgctggcggctttgatgatcgccctcggcagcctcggcctccacacctggcaggcccaggctgttcccatcctgcccctgggcctggctccagacacctttgacgatacctatgtgggttgtgcagaggagatggaggagaaggcagcccccctgctaaaggaggaaatggcccaccatgccctgctgcgggaatcctgggaggcagcccaggagacctgggaggacaagcgtcgagggcttaccttgccccctggcttcaaagcccagaatggaatagccattatggtctacaccaactcatcgaacaccttgtactgggagttgaatcaggccgtgcggacgggcggaggctcccgggagctctacatgaggcactttcccttcaaggccctgcatttctacctgatccgggccctgcagctgctgcgaggcagtgggggctgcagcaggggacctggggaggtggtgttccgaggtgtgggcagccttcgctttgaacccaagaggctgggagactctgtccgcttgggccagtttgcctccagctccctggataaggcagtggcccacagatttggtaatgccaccctcttctctctaacaacttgctttggggcccctatacaggccttctctgtctttcccaaggagcgcgaggtgctgattcccccccatgaagtctttttggttaccagattctctcaggatggagcccagagcttggtgactctctggagctataatcagacctgtagccattttaactgcgcctatctgggtggggagaagaggcggggctgtgtgtctgcgccaggagccctgggaacgggtgaccttcatatgacgaagaggcacctccagcagccttgagaagcaagaacatggttccggacccagccctagcagccttctccccaaccaggatgttggcctggggaggccacagcagggctgagggaactctgctatgtgatggggacttcctgggacaagcaaggaaagtactgaggcagccacttgattgaacggtgttgcaatgtggagacatggagttttattgaggtagctacgtgattaaatggtattgcagtgtg

SEQ ID NO: 1380 - DNA, 1154 bp, Homo sapiens
  source 1..1154: mol_type = unassigned DNA
aatcctggacccgggatcccgtgcgcctggagacagggtccagatctgcctccagcccctcgaaaccaggactccagcacctctggtcccgccctcacccggacccctggccctcacgtctcctccagggatggcgctggcggctttgatgatcgccctcggcagcctcggcctccacacctggcaggcccaggctgttcccatcctgcccctgggcctggctccagacacctttgacgatacctatgtgggttgtgcagaggagatggaggagaaggcagcccccctgctaaaggaggaaatggcccaccatgccctgctgcgggaatcctgggaggcagcccaggagacctgggaggacaagcgtcgagggcttaccttgccccctggcttcaaagcccagaatggaatagccattatggtctacaccaactcatcgaacaccttgtactgggagttgaatcaggccgtgcggacgggcggaggctcccgggagctctacatgaggcactttcccttcaaggccctgcatttctacctgatccgggccctgcagctgctgcgaggcagtgggggctgcagcaggggacctggggaggtggtgttccgaggtgtgggcagccttcgctttgaacccaagaggctgggagactctgtccgcttgggccagtttgcctccagctccctggataaggcagtggcccacagatttggggagaagaggcggggctgtgtgtctgcgccaggggtgcagctagggtcacaatctgagggggcctcctctctgcccccctggaagactctgctcttggcccctggagagttccagctctcaggggttgggccctgaaagtccaacatctgccacttaggagccctgggaacgggtgaccttcatatgacgaagaggcacctccagcagccttgagaagcaagaacatggttccggacccagccctagcagccttctccccaaccaggatgttggcctggggaggccacagcagggctgagggaactctgctatgtgatggggacttcctgggacaagcaaggaaagtactgaggcagccacttgattgaacggtgttgcaatgtggagacatggagttttattgaggtagctacgtgattaaatggtattgcagtgtgga

SEQ ID NO: 1381 - DNA, 1504 bp, Homo sapiens
  source 1..1504: mol_type = unassigned DNA
cggactcctccggggacagcgcagcgcccgccagagccctcggcgctccctcccgctggcggcttccgcagccttcaagtgggtcctccgcccccggccctcccctctcaggcggagccaaactgcggccccgcctttacagtctcggaaaggtccccagactggaggctctgaggaaggggtgtggggagtcgggggcggagacttggggcggggggcgggcaataaactcccaggccccgcccacgccccgccggggccctaatcctggacccgggatcccgtgcgcctggagacagggtccagatctgcctccagcccctcgaaaccaggactccagcacctctggtcccgccctcacccggacccctggccctcacgtctcctccagggatggcgctggcggctttgatgatcgccctcggcagcctcggcctccacacctggcaggcccaggctgttcccatcctgcccctgggcctggctccagacacctttgacgatacctatgtgggttgtgcagaggagatggaggagaaggcagcccccctgctaaaggaggaaatggcccaccatgccctgctgcgggaatcctgggaggcagcccaggagacctgggaggacaagcgtcgagggcttaccttgccccctggcttcaaagcccagaatggaatagccattatggtctacaccaactcatcgaacaccttgtactgggagttgaatcaggccgtgcggacgggcggaggctcccgggagctctacatgaggcactttcccttcaaggccctgcatttctacctgatccgggccctgcagctgctgcgaggcagtgggggctgcagcaggggacctggggaggtggtgttccgaggtgtgggcagccttcgctttgaacccaagaggctgggagactctgtccgcttgggccagtttgcctccagctccctggataaggcagtggcccacagatttggtaatgccaccctcttctctctaacaacttgctttggggcccctatacaggccttctctgtctttcccaaggagcgcgaggtgctgattcccccccatgaagtctttttggttaccagattctctcaggatggagcccagagcttggtgactctctggagctataatcagacctgtagccattttaactgcgcctatctgggtggggagaagaggcggggctgtgtgtctgcgccaggagccctgggaacgggtgaccttcatatgacgaagaggcacctccagcagccttgagaagcaagaacatggttccggacccagccctagcagccttctccccaaccaggatgttggcctggggaggccacagcagggctgagggaactctgctatgtgatggggacttcctgggacaagcaaggaaagtactgaggcagccacttgattgaacggtgttgcaatgtggagacatggagttttattgaggtagctacgtgattaaatggtattgcagtgtggagacatggaa

SEQ ID NO: 1382 - DNA, 2281 bp, Homo sapiens
  source 1..2281: mol_type = unassigned DNA
gaattccgaatcatgtgcagaatgctgaatcttcccccagccaggacgaataagacagcgcggaaaagcagattctcgtaattctggaattgcatgttgcaaggagtctcctggatcttcgcacccagcttcgggtagggagggagtccgggtcccgggctaggccagcccggcaggtggagagggtccccggcagccccgcgcgcccctggccatgtctttaatgccctgccccttcatgtggccttctgagggttcccagggctggccagggttgtttcccacccgcgcgcgcgctctcacccccagccaaacccacctggcagggctccctccagccgagaccttttgattcccggctcccgcgctcccgcctccgcgccagcccgggaggtggccctggacagccggacctcgcccggccccggctgggaccatggtgtttctctcgggaaatgcttccgacagctccaactgcacccaaccgccggcaccggtgaacatttccaaggccattctgctcggggtgatcttggggggcctcattcttttcggggtgctgggtaacatcctagtgatcctctccgtagcctgtcaccgacacctgcactcagtcacgcactactacatcgtcaacctggcggtggccgacctcctgctcacctccacggtgctgcccttctccgccatcttcgaggtcctaggctactgggccttcggcagggtcttctgcaacatctgggcggcagtggatgtgctgtgctgcaccgcgtccatcatgggcctctgcatcatctccatcgaccgctacatcggcgtgagctacccgctgcgctacccaaccatcgtcacccagaggaggggtctcatggctctgctctgcgtctgggcactctccctggtcatatccattggacccctgttcggctggaggcagccggcccccgaggacgagaccatctgccagatcaacgaggagccgggctacgtgctcttctcagcgctgggctccttctacctgcctctggccatcatcctggtcatgtactgccgcgtctacgtggtggccaagagggagagccggggcctcaagtctggcctcaagaccgacaagtcggactcggagcaagtgacgctccgcatccatcggaaaaacgccccggcaggaggcagcgggatggccagcgccaagaccaagacgcacttctcagtgaggctcctcaagttctcccgggagaagaaagcggccaaaacgctgggcatcgtggtcggctgcttcgtcctctgctggctgccttttttcttagtcatgcccattgggtctttcttccctgatttcaagccctctgaaacagtttttaaaatagtattttggctcggatatctaaacagctgcatcaaccccatcatatacccatgctccagccaagagttcaaaaaggcctttcagaatgtcttgagaatccagtgtctctgcagaaagcagtcttccaaacatgccctgggctacaccctgcacccgcccagccaggccgtggaagggcaacacaaggacatggtgcgcatccccgtgggatcaagagagaccttctacaggatctccaagacggatggcgtttgtgaatggaaatttttctcttccatgccccgtggatctgccaggattacagtgtccaaagaccaatcctcctgtaccacagcccgggtgagaagtaaaagctttttgcaggtctgctgctgtgtagggccctcaacccccagccttgacaagaaccatcaagttccaaccattaaggtccacaccatctccctcagtgagaacggggaggaagtctaggacaggaaagatgcagaggaaaggggaataatcttaggtacccaccccacttccttctcggaaggccagctcttcttggaggacaagacaggaccaatcaaagaggggacctgctgggaatggggtgggtggtagacccaactcatcaggcagcgggtagggcacagggaagagggagggtgtctcacaaccaaccagttcagaatgatacggaacagcatttccctgcagctaatgctttcttggtcactctgtgcccacttcaacgaaaaccaccatgggaaacagaatttcatgcacaatccaaaagactataaatataggattatgatttcatcatgaatattttgagcacacactctaagtttggagctatttcttgatggaagtgaggggattttattttcaggctcaacctactgacagccacatttgacatttatg

SEQ ID NO: 1383 - DNA, 1765 bp, Homo sapiens
  source 1..1765: mol_type = unassigned DNA
tcatgtggccttctgagggttcccagggctggccagggttgtttcccacccgcgcgcgcgctctcacccccagccaaacccacctggcagggctccctccagccgagaccttttgattcccggctcccgcgctcccgcctccgcgccagcccgggaggtggccctggacagccggacctcgcccggccccggctgggaccatggtgtttctctcgggaaatgcttccgacagctccaactgcacccaaccgccggcaccggtgaacatttccaaggccattctgctcggggtgatcttggggggcctcattcttttcggggtgctgggtaacatcctagtgatcctctccgtagcctgtcaccgacacctgcactcagtcacgcactactacatcgtcaacctggcggtggccgacctcctgctcacctccacggtgctgcccttctccgccatcttcgaggtcctaggctactgggccttcggcagggtcttctgcaacatctgggcggcagtggatgtgctgtgctgcaccgcgtccatcatgggcctctgcatcatctccatcgaccgctacatcggcgtgagctacccgctgcgctacccaaccatcgtcacccagaggaggggtctcatggctctgctctgcgtctgggcactctccctggtcatatccattggacccctgttcggctggaggcagccggcccccgaggacgagaccatctgccagatcaacgaggagccgggctacgtgctcttctcagcgctgggctccttctacctgcctctggccatcatcctggtcatgtactgccgcgtctacgtggtggccaagagggagagccggggcctcaagtctggcctcaagaccgacaagtcggactcggagcaagtgacgctccgcatccatcggaaaaacgccccggcaggaggcagcgggatggccagcgccaagaccaagacgcacttctcagtgaggctcctcaagttctcccgggagaagaaagcggccaaaacgctgggcatcgtggtcggctgcttcgtcctctgctggctgccttttttcttagtcatgcccattgggtctttcttccctgatttcaagccctctgaaacagtttttaaaatagtattttggctcggatatctaaacagctgcatcaaccccatcatatacccatgctccagccaagagttcaaaaaggcctttcagaatgtcttgagaatccagtgtctctgcagaaagcagtcttccaaacatgccctgggctacaccctgcacccgcccagccaggccgtggaagggcaacacaaggacatggtgcgcatccccgtgggatcaagagagaccttctacaggatctccaagacggatggcgtttgtgaatggaaatttttctcttccatgccccgtggatctgccaggattacagtgtccaaagaccaatcctcctgtaccacagcccggaggggaatggattgtagatatttcaccaagaattgcagagagcatatcaagcatgtgaattttatgatgccaccgtggagaaagggttcagaatgctgatctccaggtagctggagacctaggcagtctgcaaatgaggagtcagctggaagctatggctatgtattatgtgacatcgcttgttcctaagtgaaaactggatatcccaaccttctggcccagtaggtttcatggttaagacctggtagtgagaacattttaggaactatttgcttgggcaggcaatttttcactct

SEQ ID NO: 1384 - DNA, 1411 bp, Homo sapiens
  source 1..1411: mol_type = unassigned DNA
gaattccgaatcatgtgcagaatgctgaatcttcccccagccaggacgaataagacagcgcggaaaagcagattctcgtaattctggaattgcatgttgcaaggagtctcctggatcttcgcacccagcttcgggtagggagggagtccgggtcccgggctaggccagcccggcaggtggagagggtccccggcagccccgcgcgcccctggccatgtctttaatgccctgccccttcatgtggccttctgagggttcccagggctggccagggttgtttcccacccgcgcgcgcgctctcacccccagccaaacccacctggcagggctccctccagccgagaccttttgattcccggctcccgcgctcccgcctccgcgccagcccgggaggtggccctggacagccggacctcgcccggccccggctgggaccatggtgtttctctcgggaaatgcttccgacagctccaactgcacccaaccgccggcaccggtgaacatttccaaggccattctgctcggggtgatcttggggggcctcattcttttcggggtgctgggtaacatcctagtgatcctctccgtagcctgtcaccgacacctgcactcagtcacgcactactacatcgtcaacctggcggtggccgacctcctgctcacctccacggtgctgcccttctccgccatcttcgaggtcctaggctactgggccttcggcagggtcttctgcaacatctgggcggcagtggatgtgctgtgctgcaccgcgtccatcatgggcctctgcatcatctccatcgaccgctacatcggcgtgagctacccgctgcgctacccaaccatcgtcacccagaggaggggtctcatggctctgctctgcgtctgggcactctccctggtcatatccattggacccctgttcggctggaggcagccggcccccgaggacgagaccatctgccagatcaacgaggagccgggctacgtgctcttctcagcgctgggctccttctacctgcctctggccatcatcctggtcatgtactgccgcgtctacgtggtggccaagagggagagccggggcctcaagtctggcctcaagaccgacaagtcggactcggagcaagtgacgctccgcatccatcggaaaaacgccccggcaggaggcagcgggatggccagcgccaagaccaagacgcacttctcagtgaggctcctcaagttctcccgggagaagaaagcggccaaaacgctgggcatcgtggtcggctgcttcgtcctctgctggctgccttttttcttagtcatgcccattgggacatacattcttaaatatgacgtgctgttttggagaaaagggctgtcggtctgcactaggctgcgggagaggaaagagattaaaaactga

SEQ ID NO: 1385 - DNA, 1697 bp, Homo sapiens
  source 1..1697: mol_type = unassigned DNA
gaattccgaatcatgtgcagaatgctgaatcttcccccagccaggacgaataagacagcgcggaaaagcagattctcgtaattctggaattgcatgttgcaaggagtctcctggatcttcgcacccagcttcgggtagggagggagtccgggtcccgggctaggccagcccggcaggtggagagggtccccggcagccccgcgcgcccctggccatgtctttaatgccctgccccttcatgtggccttctgagggttcccagggctggccagggttgtttcccacccgcgcgcgcgctctcacccccagccaaacccacctggcagggctccctccagccgagaccttttgattcccggctcccgcgctcccgcctccgcgccagcccgggaggtggccctggacagccggacctcgcccggccccggctgggaccatggtgtttctctcgggaaatgcttccgacagctccaactgcacccaaccgccggcaccggtgaacatttccaaggccattctgctcggggtgatcttggggggcctcattcttttcggggtgctgggtaacatcctagtgatcctctccgtagcctgtcaccgacacctgcactcagtcacgcactactacatcgtcaacctggcggtggccgacctcctgctcacctccacggtgctgcccttctccgccatcttcgaggtcctaggctactgggccttcggcagggtcttctgcaacatctgggcggcagtggatgtgctgtgctgcaccgcgtccatcatgggcctctgcatcatctccatcgaccgctacatcggcgtgagctacccgctgcgctacccaaccatcgtcacccagaggaggggtctcatggctctgctctgcgtctgggcactctccctggtcatatccattggacccctgttcggctggaggcagccggcccccgaggacgagaccatctgccagatcaacgaggagccgggctacgtgctcttctcagcgctgggctccttctacctgcctctggccatcatcctggtcatgtactgccgcgtctacgtggtggccaagagggagagccggggcctcaagtctggcctcaagaccgacaagtcggactcggagcaagtgacgctccgcatccatcggaaaaacgccccggcaggaggcagcgggatggccagcgccaagaccaagacgcacttctcagtgaggctcctcaagttctcccgggagaagaaagcggccaaaacgctgggcatcgtggtcggctgcttcgtcctctgctggctgccttttttcttagtcatgcccattgatgaggaaactgaggcccaagaaggaaaaaatgactcacccagctttaaacaaccagttcaccatgcagcagtgctggggttggaggtgatggagaaggaaaatttggaaggtgtttcaaggaaagacacctgtggggtttggtgaccagttggaatgtaagaggcaaaaaaaagggagaaggaactagatacatattcttctggcaggaactgttaattgggttcctgctcccatcttgcactacagtgagagagataacctggtctcctaccattggaaagcatatcatctgtgctctggaggatgagacaatcaaagaaaacaagtaaataagaaaacttaaaaactgtgatatgtaccgtgaaataaataagcc

SEQ ID NO: 1386 - DNA, 2548 bp, Homo sapiens
  source 1..2548: mol_type = unassigned DNA
acgtcagcgagagctgcaaagttccttgctattcttttctggtgtcggggagctgaatattaaaagggtgattgtggagttaccggttatctgcatttttttttcttttcttattttgactctttttaaaaaatgcaggtaaagtgacagcggttcaggagcttaaagacatcagtggtggaggggtgagtcagcgggtgcaaaaggacaaggatttggtgcctcggagacacggtcccctctccgcctccagagaagagcaggcaggcagctcccgggaccgaagccgggtccacatcccccgcgcgcgagctggtggctcagcagcggcgcttcaggtggacgcggtcaaacgatgccccgcagcctcctgggtctcagcacatattccacacctacgtcccctgacctgtgctcctagaagctggagagagcaggagccttcggtggggcagctcaaaatgtaggtaactgcgggccaggagcagcgcccaacctgtagcgctgcgctacccaaccatcggtccctgcctttgagcgtcgacggctgatcttttggtttgagggagagactggcgctggagttttgaattccgaatcatgtgcagaatgctgaatcttcccccagccaggacgaataagacagcgcggaaaagcagattctcgtaattctggaattgcatgttgcaaggagtctcctggatcttcgcacccagcttcgggtagggagggagtccgggtcccgggctaggccagcccggcaggtggagagggtccccggcagccccgcgcgcccctggccatgtctttaatgccctgccccttcatgtggccttctgagggttcccagggctggccagggttgtttcccacccgcgcgcgcgctctcacccccagccaaacccacctggcagggctccctccagccgagaccttttgattcccggctcccgcgctcccgcctccgcgccagcccgggaggtggccctggacagccggacctcgcccggccccggctgggaccatggtgtttctctcgggaaatgcttccgacagctccaactgcacccaaccgccggcaccggtgaacatttccaaggccattctgctcggggtgatcttggggggcctcattcttttcggggtgctgggtaacatcctagtgatcctctccgtagcctgtcaccgacacctgcactcagtcacgcactactacatcgtcaacctggcggtggccgacctcctgctcacctccacggtgctgcccttctccgccatcttcgaggtcctaggctactgggccttcggcagggtcttctgcaacatctgggcggcagtggatgtgctgtgctgcaccgcgtccatcatgggcctctgcatcatctccatcgaccgctacatcggcgtgagctacccgctgcgctacccaaccatcgtcacccagaggaggggtctcatggctctgctctgcgtctgggcactctccctggtcatatccattggacccctgttcggctggaggcagccggcccccgaggacgagaccatctgccagatcaacgaggagccgggctacgtgctcttctcagcgctgggctccttctacctgcctctggccatcatcctggtcatgtactgccgcgtctacgtggtggccaagagggagagccggggcctcaagtctggcctcaagaccgacaagtcggactcggagcaagtgacgctccgcatccatcggaaaaacgccccggcaggaggcagcgggatggccagcgccaagaccaagacgcacttctcagtgaggctcctcaagttctcccgggagaagaaagcggccaaaacgctgggcatcgtggtcggctgcttcgtcctctgctggctgccttttttcttagtcatgcccattgggtctttcttccctgatttcaagccctctgaaacagtttttaaaatagtattttggctcggatatctaaacagctgcatcaaccccatcatatacccatgctccagccaagagttcaaaaaggcctttcagaatgtcttgagaatccagtgtctctgcagaaagcagtcttccaaacatgccctgggctacaccctgcacccgcccagccaggccgtggaagggcaacacaaggacatggtgcgcatccccgtgggatcaagagagaccttctacaggatctccaagacggatggcgtttgtgaatggaaatttttctcttccatgccccgtggatctgccaggattacagtgtccaaagaccaatcctcctgtaccacagcccgggtgagaagtaaaagctttttgcaggtctgctgctgtgtagggccctcaacccccagccttgacaagaaccatcaagttccaaccattaaggtccacaccatctccctcagtgagaacggggaggaagtctaggacaggaaagatgcagaggaaaggggaataatcttaggtacccaccccacttccttctcggaaggccagctcttcttggaggacaagacaggaccaatcaaagaggggacctgctgggaatgg

SEQ ID NO: 1387 - DNA, 1555 bp, Homo sapiens
  source 1..1555: mol_type = unassigned DNA
gaattccgaatcatgtgcagaatgctgaatcttcccccagccaggacgaataagacagcgcggaaaagcagattctcgtaattctggaattgcatgttgcaaggagtctcctggatcttcgcacccagcttcgggtagggagggagtccgggtcccgggctaggccagcccggcaggtggagagggtccccggcagccccgcgcgcccctggccatgtctttaatgccctgccccttcatgtggccttctgagggttcccagggctggccagggttgtttcccacccgcgcgcgcgctctcacccccagccaaacccacctggcagggctccctccagccgagaccttttgattcccggctcccgcgctcccgcctccgcgccagcccgggaggtggccctggacagccggacctcgcccggccccggctgggaccatggtgtttctctcgggaaatgcttccgacagctccaactgcacccaaccgccggcaccggtgaacatttccaaggccattctgctcggggtgatcttggggggcctcattcttttcggggtgctgggtaacatcctagtgatcctctccgtagcctgtcaccgacacctgcactcagtcacgcactactacatcgtcaacctggcggtggccgacctcctgctcacctccacggtgctgcccttctccgccatcttcgaggtcctaggctactgggccttcggcagggtcttctgcaacatctgggcggcagtggatgtgctgtgctgcaccgcgtccatcatgggcctctgcatcatctccatcgaccgctacatcggcgtgagctacccgctgcgctacccaaccatcgtcacccagaggaggggtctcatggctctgctctgcgtctgggcactctccctggtcatatccattggacccctgttcggctggaggcagccggcccccgaggacgagaccatctgccagatcaacgaggagccgggctacgtgctcttctcagcgctgggctccttctacctgcctctggccatcatcctggtcatgtactgccgcgtctacgtggtggccaagagggagagccggggcctcaagtctggcctcaagaccgacaagtcggactcggagcaagtgacgctccgcatccatcggaaaaacgccccggcaggaggcagcgggatggccagcgccaagaccaagacgcacttctcagtgaggctcctcaagttctcccgggagaagaaagcggccaaaacgctgggcatcgtggtcggctgcttcgtcctctgctggctgccttttttcttagtcatgcccattgggacacacacccatgacatgaagccagcttcccgtccacgactgttgtccttactgcccaaggaaggggagcatgaaacccaccactggtcctgcgacccactgtctttggaatccaccccaggagcccaggagccttgcctgacacttggatttacttctttatcaagcatccatctgactaaggcacaaatccaacatgttactgttactgatacaggaaaaacagtaacttaa

SEQ ID NO: 1388 - DNA, 2089 bp, Homo sapiens
  source 1..2089: mol_type = unassigned DNA
gaattccgaatcatgtgcagaatgctgaatcttcccccagccaggacgaataagacagcgcggaaaagcagattctcgtaattctggaattgcatgttgcaaggagtctcctggatcttcgcacccagcttcgggtagggagggagtccgggtcccgggctaggccagcccggcaggtggagagggtccccggcagccccgcgcgcccctggccatgtctttaatgccctgccccttcatgtggccttctgagggttcccagggctggccagggttgtttcccacccgcgcgcgcgctctcacccccagccaaacccacctggcagggctccctccagccgagaccttttgattcccggctcccgcgctcccgcctccgcgccagcccgggaggtggccctggacagccggacctcgcccggccccggctgggaccatggtgtttctctcgggaaatgcttccgacagctccaactgcacccaaccgccggcaccggtgaacatttccaaggccattctgctcggggtgatcttggggggcctcattcttttcggggtgctgggtaacatcctagtgatcctctccgtagcctgtcaccgacacctgcactcagtcacgcactactacatcgtcaacctggcggtggccgacctcctgctcacctccacggtgctgcccttctccgccatcttcgaggtcctaggctactgggccttcggcagggtcttctgcaacatctgggcggcagtggatgtgctgtgctgcaccgcgtccatcatgggcctctgcatcatctccatcgaccgctacatcggcgtgagctacccgctgcgctacccaaccatcgtcacccagaggaggggtctcatggctctgctctgcgtctgggcactctccctggtcatatccattggacccctgttcggctggaggcagccggcccccgaggacgagaccatctgccagatcaacgaggagccgggctacgtgctcttctcagcgctgggctccttctacctgcctctggccatcatcctggtcatgtactgccgcgtctacgtggtggccaagagggagagccggggcctcaagtctggcctcaagaccgacaagtcggactcggagcaagtgacgctccgcatccatcggaaaaacgccccggcaggaggcagcgggatggccagcgccaagaccaagacgcacttctcagtgaggctcctcaagttctcccgggagaagaaagcggccaaaacgctgggcatcgtggtcggctgcttcgtcctctgctggctgccttttttcttagtcatgcccattgggtctttcttccctgatttcaagccctctgaaacagtttttaaaatagtattttggctcggatatctaaacagctgcatcaaccccatcatatacccatgctccagccaagagttcaaaaaggcctttcagaatgtcttgagaatccagtgtctctgcagaaagcagtcttccaaacatgccctgggctacaccctgcacccgcccagccaggccgtggaagggcaacacaaggacatggtgcgcatccccgtgggatcaagagagaccttctacaggatctccaagacggatggcgtttgtgaatggaaatttttctcttccatgccccgtggatctgccaggattacagtgtccaaagaccaatcctcctgtaccacagcccggggacacacacccatgacatgaagccagcttcccgtccacgactgttgtccttactgcccaaggaaggggagcatgaaacccaccactggtcctgcgacccactgtctttggaatccaccccaggagcccaggagccttgcctgacacttggatttacttctttatcaagcatccatctgactaaggcacaaatccaacatgttactgttactgatacaggaaaaacagtaacttaaggaatgatcatgaatgcaaagggaaagaggaaaagagccttcagggacaaatagctcgattttttgtaaatcagtttcatacaacctccctcccccatttcattcttaaaagttaattgagaatcatcagccacgtgtagggtgtgag

SEQ ID NO: 1389 - DNA, 2304 bp, Homo sapiens
  source 1..2304: mol_type = unassigned DNA
gaattccgaatcatgtgcagaatgctgaatcttcccccagccaggacgaataagacagcgcggaaaagcagattctcgtaattctggaattgcatgttgcaaggagtctcctggatcttcgcacccagcttcgggtagggagggagtccgggtcccgggctaggccagcccggcaggtggagagggtccccggcagccccgcgcgcccctggccatgtctttaatgccctgccccttcatgtggccttctgagggttcccagggctggccagggttgtttcccacccgcgcgcgcgctctcacccccagccaaacccacctggcagggctccctccagccgagaccttttgattcccggctcccgcgctcccgcctccgcgccagcccgggaggtggccctggacagccggacctcgcccggccccggctgggaccatggtgtttctctcgggaaatgcttccgacagctccaactgcacccaaccgccggcaccggtgaacatttccaaggccattctgctcggggtgatcttggggggcctcattcttttcggggtgctgggtaacatcctagtgatcctctccgtagcctgtcaccgacacctgcactcagtcacgcactactacatcgtcaacctggcggtggccgacctcctgctcacctccacggtgctgcccttctccgccatcttcgaggtcctaggctactgggccttcggcagggtcttctgcaacatctgggcggcagtggatgtgctgtgctgcaccgcgtccatcatgggcctctgcatcatctccatcgaccgctacatcggcgtgagctacccgctgcgctacccaaccatcgtcacccagaggaggggtctcatggctctgctctgcgtctgggcactctccctggtcatatccattggacccctgttcggctggaggcagccggcccccgaggacgagaccatctgccagatcaacgaggagccgggctacgtgctcttctcagcgctgggctccttctacctgcctctggccatcatcctggtcatgtactgccgcgtctacgtggtggccaagagggagagccggggcctcaagtctggcctcaagaccgacaagtcggactcggagcaagtgacgctccgcatccatcggaaaaacgccccggcaggaggcagcgggatggccagcgccaagaccaagacgcacttctcagtgaggctcctcaagttctcccgggagaagaaagcggccaaaacgctgggcatcgtggtcggctgcttcgtcctctgctggctgccttttttcttagtcatgcccattgggtctttcttccctgatttcaagccctctgaaacagtttttaaaatagtattttggctcggatatctaaacagctgcatcaaccccatcatatacccatgctccagccaagagttcaaaaaggcctttcagaatgtcttgagaatccagtgtctctgcagaaagcagtcttccaaacatgccctgggctacaccctgcacccgcccagccaggccgtggaagggcaacacaaggacatggtgcgcatccccgtgggatcaagagagaccttctacaggatctccaagacggatggcgtttgtgaatggaaatttttctcttccatgccccgtggatctgccaggattacagtgtccaaagaccaatcctcctgtaccacagcccggacgaagtctcgctctgtcaccaggctggagtgcagtggcatgatcttggctcactgcaacctccgcctcccgggttcaagagattctcctgcctcagcctcccaagcagctgggactacagggatgtgccaccaggccgacgccaccaggcccagctaatttttgtatttttagtagagacggggtttcaccatgttggccaggatgatctcgatctcttgacctcatgatctgcctgcctcagcctcccaaagtgctgggattacaggcgtgagccaccgtgcccggcccaactattttttttttttatcttttttaacagtgcaatcctttctgtggatgaaatcttgctcagaagctcaatatgcaaaagaaagaaaaacagcagggctggacggatgttgggagtggggtaagaccccaaccactcagaaccacccccccaacacacacacacattctctccatggtgactggtgaggggcctctagagggtacatagtacaccatggagcacggtttaagcaccactggactacacattcttctgtggcagttatcttaccttcccatagacacccagcccatagccattggtt

SEQ ID NO: 1390 - DNA, 1918 bp, Homo sapiens
  source 1..1918: mol_type = unassigned DNA
gaattccgaatcatgtgcagaatgctgaatcttcccccagccaggacgaataagacagcgcggaaaagcagattctcgtaattctggaattgcatgttgcaaggagtctcctggatcttcgcacccagcttcgggtagggagggagtccgggtcccgggctaggccagcccggcaggtggagagggtccccggcagccccgcgcgcccctggccatgtctttaatgccctgccccttcatgtggccttctgagggttcccagggctggccagggttgtttcccacccgcgcgcgcgctctcacccccagccaaacccacctggcagggctccctccagccgagaccttttgattcccggctcccgcgctcccgcctccgcgccagcccgggaggtggccctggacagccggacctcgcccggccccggctgggaccatggtgtttctctcgggaaatgcttccgacagctccaactgcacccaaccgccggcaccggtgaacatttccaaggccattctgctcggggtgatcttggggggcctcattcttttcggggtgctgggtaacatcctagtgatcctctccgtagcctgtcaccgacacctgcactcagtcacgcactactacatcgtcaacctggcggtggccgacctcctgctcacctccacggtgctgcccttctccgccatcttcgaggtcctaggctactgggccttcggcagggtcttctgcaacatctgggcggcagtggatgtgctgtgctgcaccgcgtccatcatgggcctctgcatcatctccatcgaccgctacatcggcgtgagctacccgctgcgctacccaaccatcgtcacccagaggaggggtctcatggctctgctctgcgtctgggcactctccctggtcatatccattggacccctgttcggctggaggcagccggcccccgaggacgagaccatctgccagatcaacgaggagccgggctacgtgctcttctcagcgctgggctccttctacctgcctctggccatcatcctggtcatgtactgccgcgtctacgtggtggccaagagggagagccggggcctcaagtctggcctcaagaccgacaagtcggactcggagcaagtgacgctccgcatccatcggaaaaacgccccggcaggaggcagcgggatggccagcgccaagaccaagacgcacttctcagtgaggctcctcaagttctcccgggagaagaaagcggccaaaacgctgggcatcgtggtcggctgcttcgtcctctgctggctgccttttttcttagtcatgcccattgacgaagtctcgctctgtcaccaggctggagtgcagtggcatgatcttggctcactgcaacctccgcctcccgggttcaagagattctcctgcctcagcctcccaagcagctgggactacagggatgtgccaccaggccgacgccaccaggcccagctaatttttgtatttttagtagagacggggtttcaccatgttggccaggatgatctcgatctcttgacctcatgatctgcctgcctcagcctcccaaagtgctgggattacaggcgtgagccaccgtgcccggcccaactattttttttttttatcttttttaacagtgcaatcctttctgtggatgaaatcttgctcagaagctcaatatgcaaaagaaagaaaaacagcagggctggacggatgttgggagtggggtaagaccccaaccactcagaaccacccccccaacacacacacacattctctccatggtgactggtgaggggcctctagagggtacatagtacaccatggagcacggtttaagcaccactggactacacattcttctgtggcagttatcttaccttcccatagacacccagcccatagccattggtt

SEQ ID NO: 1391 - DNA, 1838 bp, Homo sapiens
  source 1..1838: mol_type = unassigned DNA
tgggaccatggtgtttctctcgggaaatgcttccgacagctccaactgcacccaaccgccggcaccggtgaacatttccaaggccattctgctcggggtgatcttggggggcctcattcttttcggggtgctgggtaacatcctagtgatcctctccgtagcctgtcaccgacacctgcactcagtcacgcactactacatcgtcaacctggcggtggccgacctcctgctcacctccacggtgctgcccttctccgccatcttcgaggtcctaggctactgggccttcggcagggtcttctgcaacatctgggcggcagtggatgtgctgtgctgcaccgcgtccatcatgggcctctgcatcatctccatcgaccgctacatcggcgtgagctacccgctgcgctacccaaccatcgtcacccagaggaggggtctcatggctctgctctgcgtctgggcactctccctggtcatatccattggacccctgttcggctggaggcagccggcccccgaggacgagaccatctgccagatcaacgaggagccgggctacgtgctcttctcagcgctgggctccttctacctgcctctggccatcatcctggtcatgtactgccgcgtctacgtggtggccaagagggagagccggggcctcaagtctggcctcaagaccgacaagtcggactcggagcaagtgacgctccgcatccatcggaaaaacgccccggcaggaggcagcgggatggccagcgccaagaccaagacgcacttctcagtgaggctcctcaagttctcccgggagaagaaagcggccaaaacgctgggcatcgtggtcggctgcttcgtcctctgctggctgccttttttcttagtcatgcccattgggtctttcttccctgatttcaagccctctgaaacagtttttaaaatagtattttggctcggatatctaaacagctgcatcaaccccatcatatacccatgctccagccaagagttcaaaaaggcctttcagaatgtcttgagaatccagtgtctctgcagaaagcagtcttccaaacatgccctgggctacaccctgcacccgcccagccaggccgtggaagggcaacacaaggacatggtgcgcatccccgtgggatcaagagagaccttctacaggatctccaagacggatggcgtttgtgaatggaaatttttctcttccatgccccgtggatctgccaggattacagtgtccaaagaccaatcctcctgtaccacagcccggtcttctggattttgagaagcagctgcaaggatgaacggattggtgttggcccaaattaaaaagaagagtattcagttctttcagtgtttggagaaagaagaccaaaagcatcatctcacagggagcagaatgtgaccagcctggctaatgaggaaatgagagggatcctcaacttgagaacccgctctactgaagtctgaacttggaaaaatggacacattgggtttggagtaagaattcttactctacaaaaggataaaattgtgatcacattgatgcatgatgcctaggatattaaaaatgcatgattaattaaatgttagtctaccttgtgttttaaagggacacacacccatgacatgaagccagcttcccgtccacgactgttgtccttactgcccaaggaaggggagcatgaaacccaccactggtcctgcgacccactgtctttggaatccaccccaggagcccaggagccttgcctgacacttggatttacttctttatcaagcatccatctgactaaggcacaaatccaacatgttactgttactgatacagg

SEQ ID NO: 1392 - DNA, 1738 bp, Homo sapiens
  source 1..1738: mol_type = unassigned DNA
gccaggagggcgcctctgggaagaagaccacgggggaagcaaagtttcagggcagctgaggagccttcgccgcagcccttccgagcccaatcatccccctggctatggagggcggactctaagatgaatcccgacctggacaccggccacaacacatcagcacctgcccactggggagagttgaaaaatgccaacttcactggccccaaccagacctcgagcaactccacactgccccagctggacatcaccagggccatctctgtgggcctggtgctgggcgccttcatcctctttgccatcgtgggcaacatcctagtcatcttgtctgtggcctgcaaccggcacctgcggacgcccaccaactacttcattgtcaacctggccatggccgacctgctgttgagcttcaccgtcctgcccttctcagcggccctagaggtgctcggctactgggtgctggggcggatcttctgtgacatctgggcagccgtggatgtcctgtgctgcacagcgtccattctgagcctgtgcgccatctccatcgatcgctacatcggggtgcgctactctctgcagtatcccacgctggtcacccggaggaaggccatcttggcgctgctcagtgtctgggtcttgtccaccgtcatctccatcgggcctctccttgggtggaaggagccggcacccaacgatgacaaggagtgcggggtcaccgaagaacccttctatgccctcttctcctctctgggctccttctacatccctctggcggtcattctagtcatgtactgccgtgtctatatagtggccaagagaaccaccaagaacctagaggcaggagtcatgaaggagatgtccaactccaaggagctgaccctgaggatccattccaagaactttcacgaggacacccttagcagtaccaaggccaagggccacaaccccaggagttccatagctgtcaaactttttaagttctccagggaaaagaaagcagctaagacgttgggcattgtggtcggtatgttcatcttgtgctggctacccttcttcatcgctctaccgcttggctccttgttctccaccctgaagccccccgacgccgtgttcaaggtggtgttctggctgggctacttcaacagctgcctcaaccccatcatctacccatgctccagcaaggagttcaagcgcgctttcgtgcgcatcctcgggtgccagtgccgcggccgcggccgccgccgacgccgccgccgccgtcgcctgggcggctgcgcctacacctaccggccgtggacgcgcggcggctcgctggagcgctcgcagtcgcgcaaggactcgctggacgacagcggcagctgcctgagcggcagccagcggaccctgccctcggcctcgccgagcccgggctacctgggccgcggcgcgccaccgccagtcgagctgtgcgccttccccgagtggaaggcgcccggcgccctcctgagcctgcccgcgcctgagccccccggccgccgcggccgccacgactcgggcccgctcttcaccttcaagctcctgaccgagcccgagagccccgggaccgacggcggcgccagcaacggaggctgcgaggccgcggccgacgtggccaacgggcagccgggcttcaaaagcaacatgcccctggcgcccgggcagttttagggcccccgtgcgcagctttctttccctggggaggaaaacatcgtggggggga

SEQ ID NO: 1393 - DNA, 2677 bp, Homo sapiens
  source 1..2677: mol_type = unassigned DNA
ccgacgggacccgtgcgcggagctgcatctggagccccgcggctatgccctgtgctcccctccctgccggccgctcgttctgtgccccggcccggccaccgacggccgcgcgttgagatgactttccgcgatctcctgagcgtcagtttcgagggaccccgcccggacagcagcgcagggggctccagcgcgggcggcggcgggggcagcgcgggcggcgcggccccctcggagggcccggcggtgggcggcgtgccggggggcgcgggcggcggcggcggcgtggtgggcgcaggcagcggcgaggacaaccggagctccgcgggggagccggggagcgcgggcgcgggcggcgacgtgaatggcacggcggccgtcgggggactggtggtgagcgcgcagggcgtgggcgtgggcgtcttcctggcagccttcatccttatggccgtggcaggtaacctgcttgtcatcctctcagtggcctgcaaccgccacctgcagaccgtcaccaactatttcatcgtgaacctggccgtggccgacctgctgctgagcgccaccgtactgcccttctcggccaccatggaggttctgggcttctgggcctttggccgcgccttctgcgacgtatgggccgccgtggacgtgctgtgctgcacggcctccatcctcagcctctgcaccatctccgtggaccggtacgtgggcgtgcgccactcactcaagtacccagccatcatgaccgagcgcaaggcggccgccatcctggccctgctctgggtcgtagccctggtggtgtccgtagggcccctgctgggctggaaggagcccgtgccccctgacgagcgcttctgcggtatcaccgaggaggcgggctacgctgtcttctcctccgtgtgctccttctacctgcccatggcggtcatcgtggtcatgtactgccgcgtgtacgtggtcgcgcgcagcaccacgcgcagcctcgaggcgggcgtcaagcgcgagcgaggcaaggcctccgaggtggtgctgcgcatccactgtcgcggcgcggccacgggcgccgacggggcgcacggcatgcgcagcgccaagggccacaccttccgcagctcgctctccgtgcgcctgctcaagttctcccgtgagaagaaagcggccaagactctggccatcgtcgtgggtgtcttcgtgctctgctggttccctttcttctttgtcctgccgctcggctccttgttcccgcagctgaagccatcggagggcgtcttcaaggtcatcttctggctcggctacttcaacagctgcgtgaacccgctcatctacccctgttccagccgcgagttcaagcgcgccttcctccgtctcctgcgctgccagtgccgtcgtcgccggcgccgccgccctctctggcgtgtctacggccaccactggcgggcctccaccagcggcctgcgccaggactgcgccccgagttcgggcgacgcgccccccggagcgccgctggccctcaccgcgctccccgaccccgaccccgaacccccaggcacgcccgagatgcaggctccggtcgccagccgtcgaaagccacccagcgccttccgcgagtggaggctgctggggccgttccggagacccacgacccagctgcgcgccaaagtctccagcctgtcgcacaagatccgcgccgggggcgcgcagcgcgcagaggcagcgtgcgcccagcgctcagaggtggaggctgtgtccctaggcgtcccacacgaggtggccgagggcgccacctgccaggcctacgaattggccgactacagcaacctacgggagaccgatatttaaggaccccagagctaggccgcggagtgtgctgggcttgggggtaagggggaccagagaggcgggctggtgttctaagagcccccgtgcaaatcggagacccggaaactgatcagggcagctgctctgtgacatccctgaggaactgggcagagcttgaggctggagcccttgaaaggtgaaaagtagtggggccccctgctggactcaggtgcccagaactcttttcttagaagggagaggctgcgggctccgtggggccttttgctcccaatccctatttgagaaacactgccccatcctccatgccctgaaccctgagtagacagccccaagcatggccaggaaggcctgcccctcctcttctgggaaataggcacagaagctttggccggctaccccagtgcctcccttagggaaaaagtcagtgggaccagggctcctcagtggacaaatttctccttcttactgccaactggaggaacccagtggacctaccaccacccacaagctttggtggcagattgtatagccgtcatacaagcctgctgtatttatccatgggcccgctgtccgccacccaggctcctccgtgcacaccccatcacctggcccctaccccttattacttcccctcaagggccttactgtttacactctgtacatagctcatcgtgcctgtgcccatcacttcttgctgggattccaagccaccaattggagagctttatttgtcattttgagacatatttattggtaagagtacttctattttgtccaagctgtgcaaactgtccctctttagcccataacccattaaaaaaaaaatactttttcccctaaa

SEQ ID NO: 1394 - DNA, 3278 bp, Homo sapiens
  source 1..3278: mol_type = unassigned DNA
aggggcgacgctcttgtctagccgagccgggcagcgctgtcgtccacggtgcgcactgggcgggcagcgctccctctgcccacctcccgccccgtcatggaccaccaggacccctactccgtgcaggccacagcggccatagcggcggccatcaccttcctcattctctttaccatcttcggcaacgctctggtcatcctggctgtgttgaccagccgctcgctgcgcgcccctcagaacctgttcctggtgtcgctggccgccgccgacatcctggtggccacgctcatcatccctttctcgctggccaacgagctgctgggctactggtacttccggcgcacgtggtgcgaggtgtacctggcgctcgacgtgctcttctgcacctcgtccatcgtgcacctgtgcgccatcagcctggaccgctactgggccgtgagccgcgcgctggagtacaactccaagcgcaccccgcgccgcatcaagtgcatcatcctcactgtgtggctcatcgccgccgtcatctcgctgccgcccctcatctacaagggcgaccagggcccccagccgcgcgggcgcccccagtgcaagctcaaccaggaggcctggtacatcctggcctccagcatcggatctttctttgctccttgcctcatcatgatccttgtctacctgcgcatctacctgatcgccaaacgcagcaaccgcagaggtcccagggccaagggggggcctgggcagggtgagtccaagcagccccgacccgaccatggtggggctttggcctcagccaaactgccagccctggcctctgtggcttctgccagagaggtcaacggacactcgaagtccactggggagaaggaggagggggagacccctgaagatactgggacccgggccttgccacccagttgggctgcccttcccaactcaggccagggccagaaggagggtgtttgtggggcatctccagaggatgaagctgaagaggaggaggaggaggaggaagagtgtgaaccccaggcagtgccagtgtctccggcctcagcttgcagccccccgctgcagcagccacagggctcccgggtgctggccaccctacgtggccaggtgctcctgggcaggggcgtgggtgctataggtgggcagtggtggcgtcgacgggcgcagctgacccgggagaagcgcttcaccttcgtgctggctgtggtcattggcgtttttgtgctctgctggttccccttcttcttcagctacagcctgggagccatctgcccgaagcactgcaaggtgccccatggcctcttccagttcttcttctggatcggctactgcaacagctcactgaaccctgttatctacaccatcttcaaccaggacttccgccgtgccttccggaggatcctgtgccgcccgtggacccagacggcctggtgagcccgcctgcgctgcccctgtggggttggtgcggtggcgccggggtcaccctgcttcttgccctgctgtgtgtggctgcctcccctgggctttctgctccctgcccagatcctgtaggcctcatcttaggaaccccttgggaggggtgggcaggggggctgctagcaagggtcccagtgaagcttccccttgccggcttagctgtgggggaccccttctccaccctctccctgagcacaggccgatggaggtggttcaaatcctctggaacatagccaagaccaggagaagagagagcactttcttcccagagccccatgctctccagaccaatgtctgggcttccctttcttgaggaccttgtgttcctggcaggtcacttgcttgtggtgttttcgtttctttttcatctcccccccacccacaaagagcacggagccagccttccacttttcccagtggggcctgctgctgagggggaggaagaaacgaagactgatcacccacgctaggcactcgcggtccctggcaggcgctgggatgggggcttatggggtggcatcgtctctgggccctcctttccccctttgcctgttttcggatctgtggttcctttgaaagccagaacaatggatcggcttccttacccagcacccctccggtaggtgggtggccacgtggatgcctcgctggggcggtcttggaggcctggtctctgcctcgacgggagatccccgatcactggcattcaccccctgcaaaaatcggggcgacaatagctcactgcctacttgctgcagggagatgaaaggctttgcagaaagctttgagctctgtgggggaacacactagagaaccaaaaatgtgattatatggtgatataaaaatccctttcctctgtgtttaccaccacctgtcttcctgtagacttttgttctgtccctggggtgtgtgaattcctaccccgaactggaagccgggagtggcagacagaatcactatttcaagttaaaggatctctttgagaatgtgttcttctggctgcaaaggtctgagttattacgctacatgacaacgtttcgacatttcaccggcaacaccaagagggtttttagtggcttgggtctccccagtgggggataagtcttttgtcatcaaggaggcaaattgtctccccaagacagctcaaaatatccacacctcggcaacagtctaagatgagagcctgtgacaggtggcagcgcccccaggtggggtactggcatcagagcctggtgcgcccctaggggagcctcccactggagtgcccggccaggtctccaagccccaaatgagtccttgtgaaccacaactgatccccccaggtgggtgcttgtggactgcctcggacccagccacgctgctccccgcaatgctgatggggctgtgcattgaggacccctgcttcctggttctcagtcccaccccaaaacctggcacccagaacagttggaagtgtggaaaggaggtttatcggccttcccttggagagggcctggcttcaacattgggccagtaggcatcttagcttggcaggtgtcgggggaatgggccagatggacctgctagatttggaagggcaccgagggagttttctgggtgtagagagaatggaggggaccaaaaagagtccttcctggggtgtgggaggcttcccagcttggtcctcagtgggttgttgaggccagagtatcgccctgggatgtggtggggagctgggccaggagagggactgactgtgaccctctgctggccggtcttgtgtgcgccccatgggacccccagtgttcttgcctgtg

SEQ ID NO: 1395 - DNA, 2127 bp, Homo sapiens
  source 1..2127: mol_type = unassigned DNA
gcagctgcggggagcccggcagccacgctctccggcgcgccgcccgcggagccaccacggccgagggccggctgctgggcgccgcggtccccggcgggcgcgcccgagcagcaggcggcgatgcgggcgccgaccccggctggggggcgcccgagctgccgcggctgcgccccggctccaggagggacggcgtagctcgcgggaggaccatggcgtccccggcgctggcggcggcgctggcggtggcggcagcggcgggccccaatgcgagcggcgcgggcgagaggggcagcggcggggttgccaatgcctcgggggcttcctgggggccgccgcgcggccagtactcggcgggcgcggtggcagggctggctgccgtggtgggcttcctcatcgtcttcaccgtggtgggcaacgtgctggtggtgatcgccgtgctgaccagccgggcgctgcgcgcgccacagaacctcttcctggtgtcgctggcctcggccgacatcctggtggccacgctggtcatgcccttctcgttggccaacgagctcatggcctactggtacttcgggcaggtgtggtgcggcgtgtacctggcgctcgatgtgctgttttgcacctcgtcgatcgtgcatctgtgtgccatcagcctggaccgctactggtcggtgacgcaggccgtcgagtacaacctgaagcgcacaccacgccgcgtcaaggccaccatcgtggccgtgtggctcatctcggccgtcatctccttcccgccgctggtctcgctctaccgccagcccgacggcgccgcctacccgcagtgcggcctcaacgacgagacctggtacatcctgtcctcctgcatcggctccttcttcgcgccctgcctcatcatgggcctggtctacgcgcgcatctaccgagtggccaagctgcgcacgcgcacgctcagcgagaagcgcgcccccgtgggccccgacggtgcgtccccgactaccgaaaacgggctgggcgcggcggcaggcgcaggcgagaacgggcactgcgcgcccccgcccgccgacgtggagccggacgagagcagcgcagcggccgagaggcggcggcgccggggcgcgttgcggcggggcgggcggcggcgagcgggcgcggaggggggcgcgggcggtgcggacgggcagggggcggggccgggggcggctgagtcgggggcgctgaccgcctccaggtccccggggcccggtggccgcctgtcgcgcgccagctcgcgctccgtcgagttcttcctgtcgcgccggcgccgggcgcgcagcagcgtgtgccgccgcaaggtggcccaggcgcgcgagaagcgcttcacctttgtgctggctgtggtcatgggcgtgttcgtgctctgctggttccccttcttcttcagctacagcctgtacggcatctgccgcgaggcctgccaggtgcccggcccgctcttcaagttcttcttctggatcggctactgcaacagctcgctcaacccggtcatctacacggtcttcaaccaggatttccggcgatcctttaagcacatcctcttccgacggaggagaaggggcttcaggcagtgactcgcacccgtctgggaatcctggacagctccgcgctcggggctgggcagaaggggcggcccggacgggggagctttcccagagacccggggatggattggcctccagggcgcaggggagggtgcggcagggcaggagcttggcagagagatagccgggctccagggagtggggaggagagagggggagacccctttgccttcccccctcagcaaggggctgcttctggggctccctgcctggatccagctctgggagccctgccgaggtgtggctgtgaggtcagggttttagagagcagtggcagaggtagccccctaaatgggcaagcaaggagccccccaaagacactaccactccccatccccgtctgaccaagggctgacttctccaggacctagtcggggggtggctgccagggggcaaggagaaagcaccgacaatctttgattactgaaagtatttaaatgtttgccaaaaacaacagccaaaacaaccaaactattttctaaataaacctttgtaatct

SEQ ID NO: 1396 - DNA, 3466 bp, Homo sapiens
  source 1..3466: mol_type = unassigned DNA
ggaggcggcggcggctccggggcgcgggcgcgcgggcggcggcggcggcggcgccccgactgcagtcccggcgggagcggagcgcgagccggggccgggcccgagccggcgccatggggcggcgccgcctgtgagcggcggcgagcggagccgcgggcgccgagcagggccaggcgggaggcgtcggcgcccgaggccgagcgagccgcggccgggccgggccgagcgccgagcgagcaggagcggcggcggcggcggcggcggcgggaggaggcagcgccgccgccaagatggcggacctggaggcggtgctggccgacgtgagctacctgatggccatggagaagagcaaggccacgccggccgcgcgcgccagcaagaagatcctgctgcccgagcccagcatccgcagtgtcatgcagaagtacctggaggaccggggcgaggtgacctttgagaagatcttttcccagaagctggggtacctgctcttccgagacttctgcctgaaccacctggaggaggccaggcccttggtggaattctatgaggagatcaagaagtacgagaagctggagacggaggaggagcgtgtggcccgcagccgggagatcttcgactcatacatcatgaaggagctgctggcctgctcgcatcccttctcgaagagtgccactgagcatgtccaaggccacctggggaagaagcaggtgcctccggatctcttccagccatacatcgaagagatttgtcaaaacctccgaggggacgtgttccagaaattcattgagagcgataagttcacacggttttgccagtggaagaatgtggagctcaacatccacctgaccatgaatgacttcagcgtgcatcgcatcattgggcgcgggggctttggcgaggtctatgggtgccggaaggctgacacaggcaagatgtacgccatgaagtgcctggacaaaaagcgcatcaagatgaagcagggggagaccctggccctgaacgagcgcatcatgctctcgctcgtcagcactggggactgcccattcattgtctgcatgtcatacgcgttccacacgccagacaagctcagcttcatcctggacctcatgaacggtggggacctgcactaccacctctcccagcacggggtcttctcagaggctgacatgcgcttctatgcggccgagatcatcctgggcctggagcacatgcacaaccgcttcgtggtctaccgggacctgaagccagccaacatccttctggacgagcatggccacgtgcggatctcggacctgggcctggcctgtgacttctccaagaagaagccccatgccagcgtgggcacccacgggtacatggctccggaggtcctgcagaagggcgtggcctacgacagcagtgccgactggttctctctggggtgcatgctcttcaagttgctgcgggggcacagccccttccggcagcacaagaccaaagacaagcatgagatcgaccgcatgacgctgacgatggccgtggagctgcccgactccttctcccctgaactacgctccctgctggaggggttgctgcagagggatgtcaaccggagattgggctgcctgggccgaggggctcaggaggtgaaagagagcccctttttccgctccctggactggcagatggtcttcttgcagaagtaccctcccccgctgatccccccacgaggggaggtgaacgcggccgacgccttcgacattggctccttcgatgaggaggacacaaaaggaatcaagttactggacagtgatcaggagctctaccgcaacttccccctcaccatctcggagcggtggcagcaggaggtggcagagactgtcttcgacaccatcaacgctgagacagaccggctggaggctcgcaagaaagccaagaacaagcagctgggccatgaggaagactacgccctgggcaaggactgcatcatgcatggctacatgtccaagatgggcaaccccttcctgacccagtggcagcggcggtacttctacctgttccccaaccgcctcgagtggcggggcgagggcgaggccccgcagagcctgctgaccatggaggagatccagtcggtggaggagacgcagatcaaggagcgcaagtgcctgctcctcaagatccgcggtgggaaacagttcattttgcagtgcgatagcgaccctgagctggtgcagtggaagaaggagctgcgcgacgcctaccgcgaggcccagcagctggtgcagcgggtgcccaagatgaagaacaagccgcgctcgcccgtggtggagctgagcaaggtgccgctggtccagcgcggcagtgccaacggcctctgacccgcccacccgccttttataaacctctaatttattttgtcgaatttttattatttgttttcccgccaagcggaaaaggttttattttgtaattattgtgatttcccgtggccccagcctggcccagctcccccgggaggggcccgcttgcctcggctcctgctgcaccaacccagccgctgcccggcgccctctgtcctgacttcaggggctgcccgctcccagtgtcttcctgtgggggaagagcacagccctcccgccccttccccgagggatgatgccacaccaagctgtgccaccctgggctctgtgggctgcactctgtgcccatgggcactgctgggtggcccatcccccctcaccaggggcaggcacagcacagggatccgacttgaattttcccactgcaccccctcctgctgcagaggggcaggccctgcactgtcctgctccacagtgttggcgagaggaggggcccgttgtctccctggccctcaaggcctcccacagtgactcgggctcctgtgcccttattcaggaaaagcctctgtgtcactggctgcctccactcccacttccctgacactgcggggcttggctgagagagtggcattggcagcaggtgctgctaccctccctgctgtcccctcttgccccaacccccagcacccgggctcagggaccacagcaaggcacctgcaggttgggccatactggcctcgcctggcctgaggtctcgctgatgctgggctgggtgcgaccccatctgcccaggacggggccggccaggtgggcgggcagcacagcaaggaggctggctggggcctatcagtgtgccccccatcctggcccatcagtgtacccccgcccaggctggccagccccacagcccacgtcctgtcagtgccgccgcctcgcccaccgcatgccccctcgtgccagtcgcgctgcctgtgtggtgtcgcgccttctcccccccggggctgggttggcgcaccctcccctcccgtctactcattccccggggcgtttctttgccgatttttgaatgtgattttaaagagtgaaaaatgagactatgcgtttttataaaaaatggtgcctga

SEQ ID NO: 1397 - DNA, 2443 bp, Homo sapiens
  source 1..2443: mol_type = unassigned DNA
ggccggctacagcctgcggcgcgcgcagagcgctagtggggcgcgcggcgcgcgcgcggggcgggggcgcgcggaggggggggctgccccggggcggcccccccaggtcggggcgcggcgggcggcggcggcgggcgcgcgtcccgtccaggtccggagtaaccgccgccgccgccgccaaagctcgccaacatggcggacctggaggctgtgctggccgatgtcagttacctgatggccatggagaagagcaaggcgaccccggccgcccgcgccagcaagaggatcgtcctgccggagcccagtatccggagtgtgatgcagaagtaccttgcagagagaaatgaaataacctttgacaagattttcaatcagaaaattggtttcttgctatttaaagatttttgtttgaatgaaattaatgaagctgtacctcaggtgaagttttatgaagagataaaggaatatgaaaaacttgataatgaggaagaccgcctttgcagaagtcgacaaatttatgatgcctacatcatgaaggaacttctttcctgttcacatcctttctcaaagcaagctgtagaacacgtacaaagtcatttatccaagaaacaagtgacatcaactctttttcagccatacatagaagaaatttgtgaaagccttcgaggtgacatttttcaaaaatttatggaaagtgacaagttcactagattttgtcagtggaaaaacgttgaattaaatatccatttgaccatgaatgagttcagtgtgcataggattattggacgaggaggattcggggaagtttatggttgcaggaaagcagacactggaaaaatgtatgcaatgaaatgcttagataagaagaggatcaaaatgaaacaaggagaaacattagccttaaatgaaagaatcatgttgtctcttgtcagcacaggagactgtcctttcattgtatgtatgacctatgccttccataccccagataaactctgcttcatcctggatctgatgaacgggggcgatttgcactaccacctttcacaacacggtgtgttctctgagaaggagatgcggttttatgccactgaaatcattctgggtctggaacacatgcacaatcggtttgttgtctacagagatttgaagccagcaaatattctcttggatgaacatggacacgcaagaatatcagatcttggtcttgcctgcgatttttccaaaaagaagcctcatgcgagtgttggcacccatgggtacatggctcccgaggtgctgcagaaggggacggcctatgacagcagtgccgactggttctccctgggctgcatgcttttcaaacttctgagaggtcacagccctttcagacaacataaaaccaaagacaagcatgaaattgaccgaatgacactcaccgtgaatgtggaacttccagacaccttctctcctgaactgaagtcccttttggagggcttgcttcagcgagacgttagcaagcggctgggctgtcacggaggcggctcacaggaagtaaaagagcacagctttttcaaaggtgttgactggcagcatgtctacttacaaaagtacccaccacccttgattcctccccggggagaagtcaatgctgctgatgcctttgatattggctcatttgatgaagaggataccaaagggattaagctacttgattgcgaccaagaactctacaagaacttccctttggtcatctctgaacgctggcagcaagaagtaacggaaacagtttatgaagcagtaaatgcagacacagataaaatcgaggccaggaagagagctaaaaataagcaacttggccacgaagaagattacgctctggggaaggactgtattatgcacgggtacatgctgaaactgggaaacccatttctgactcagtggcagcgtcgctatttttacctctttccaaatagacttgaatggagaggagagggagagtcccggcaaaatttactgacaatggaacagattctctctgtggaagaaactcaaattaaagacaaaaaatgcattttgttcagaataaaaggagggaaacaatttgtcttgcaatgtgagagtgatccagagtttgtgcagtggaagaaagagttgaacgaaaccttcaaggaggcccagcggctattgcgtcgtgccccgaagttcctcaacaaacctcggtcaggtactgtggagctcccaaagccatccctctgtcacagaaacagcaacggcctctagcacccagaaacagggagggtcctcgaggaggacacaccagggtctcagccttttggggtgaacgaggatgaggcatctgatctattcgctaccgggactcctccaggctcccgagaggagtcgggacccttcggcttggggtcagctcagctccctgccttgtcacatttgtctgcattagaaa

SEQ ID NO: 1398 - DNA, 2873 bp, Homo sapiens
  source 1..2873: mol_type = unassigned DNA
ggggcgcgcggaggggggggctgccccggggcggcccccccaggtcggggcgcggcgggcggcggcgccgccgccaaagctcgccaacatggcggacctggaggctgtgctggccgatgtcagttacctgatggccatggagaagagcaaggcgaccccggccgcccgcgccagcaagaggatcgtcctgccggagcccagtatccggagtgtgatgcagaagtaccttgcagagagaaatgaaataacctttgacaagattttcaatcagaaaattggtttcttgctatttaaagatttttgtttgaatgaaattaatgaagctgtacctcaggtgaagttttatgaagagataaaggaatatgaaaaacttgataatgaggaagaccgcctttgcagaagtcgacaaatttatgatgcctacatcatgaaggaacttctttcctgttcacatcctttctcaaagcaagctgtagaacacgtacaaagtcatttatccaagaaacaagtgacatcaactctttttcagccatacatagaagaaatttgtgaaagccttcgaggtgacatttttcaaaaatttatggaaagtgacaagttcactagattttgtcagtggaaaaacgttgaattaaatatccatttgaccatgaatgagttcagtgtgcataggattattggacgaggaggattcggggaagtttatggttgcaggaaagcagacactggaaaaatgtatgcaatgaaatgcttagataagaagaggatcaaaatgaaacaaggagaaacattagccttaaatgaaagaatcatgttgtctcttgtcagcacaggagactgtcctttcattgtatgtatgacctatgccttccataccccagataaactctgcttcatcctggatctgatgaacgggggcgatttgcactaccacctttcacaacacggtgtgttctctgagaaggagatgcggttttatgccactgaaatcattctgggtctggaacacatgcacaatcggtttgttgtctacagagatttgaagccagcaaatattctcttggatgaacatggacacgcaagaatatcagatcttggtcttgcctgcgatttttccaaaaagaagcctcatgcgagtgttggcacccatgggtacatggctcccgaggtgctgcagaaggggacggcctatgacagcagtgccgactggttctccctgggctgcatgcttttcaaacttctgagaggatgaagaattgatactgaaggtttctatgtggctgacagtcactaaaccaacaagtcacaacttgaacccagcttttctgactctggagtcgggttctgcacagggaaaacaggaagcgctcagagctgtggagaatctgctggtgcacgtcacagccctttcagacaacataaaaccaaagacaagcatgaaattgaccgaatgacactcaccgtgaatgtggaacttccagacaccttctctcctgaactgaagtcccttttggagggcttgcttcagcgagacgttagcaagcggctgggctgtcacggaggcggctcacaggaagtaaaagagcacagctttttcaaaggtgttgactggcagcatgtctacttacaaaagtacccaccacccttgattcctccccggggagaagtcaatgctgctgatgcctttgatattggctcatttgatgaagaggataccaaagggattaagctacttgattgcgaccaagaactctacaagaacttccctttggtcatctctgaacgctggcagcaagaagtaacggaaacagtttatgaagcagtaaatgcagacacagataaaatcgaggccaggaagagagctaaaaataagcaacttggccacgaagaagattacgctctggggaaggactgtattatgcacgggtacatgctgaaactgggaaacccatttctgactcagtggcagcgtcgctatttttacctctttccaaatagacttgaatggagaggagagggagagtcccggcaaaatttactgacaatggaacagattctctctgtggaagaaactcaaattaaagacaaaaaatgcattttgttcagaataaaaggagggaaacaatttgtcttgcaatgtgagagtgatccagagtttgtgcagtggaagaaagagttgaacgaaaccttcaaggaggcccagcggctattgcgtcgtgccccgaagttcctcaacaaacctcggtcaggtactgtggagctcccaaagccatccctctgtcacagaaacagcaacggcctctagcacccagaaacagggagggtcctcgaggaggacacaccagggtctcagccttttggggtgaacgaggatgaggcatctgatctattcgctaccgggactcctccaggctcccgagaggagtcgggacccttcggcttggggtcagctcagctccctgccttgtcacatttgtctgcattagaaactactgaagaaataaaagttctttttctttgctacacactttggtacctatgaacctagaacttgaagtgactcctacttatcacgtaaatttttatgtctgatatcaaacacatcttagactccccagaatggaatttaaagatgttcagtgttgggtaacagattgccctaagcattgccacatattctgtctagtcactgctgattttctatgtctttgctccatactgctgggggatgggagagccacagtgtgtttcttttgtgcacttcgcaactgacttcttgtcctggggttaaaagttgaagatattttctgatgatattaaaagttgaagatatttctgcacttgggccctcctctgggagccgcacccacatg

SEQ ID NO: 1399 - DNA, 2862 bp, Homo sapiens
  source 1..2862: mol_type = unassigned DNA
gcaccacgccgcccgggcttctggggtgttccccaaccacggcccagccctgccacaccccccgcccccggcctccgcagctcggcatgggcgcgggggtgctcgtcctgggcgcctccgagcccggtaacctgtcgtcggccgcaccgctccccgacggcgcggccaccgcggcgcggctgctggtgcccgcgtcgccgcccgcctcgttgctgcctcccgccagcgaaagccccgagccgctgtctcagcagtggacagcgggcatgggtctgctgatggcgctcatcgtgctgctcatcgtggcgggcaatgtgctggtgatcgtggccatcgccaagacgccgcggctgcagacgctcaccaacctcttcatcatgtccctggccagcgccgacctggtcatggggctgctggtggtgccgttcggggccaccatcgtggtgtggggccgctgggagtacggctccttcttctgcgagctgtggacctcagtggacgtgctgtgcgtgacggccagcatcgagaccctgtgtgtcattgccctggaccgctacctcgccatcacctcgcccttccgctaccagagcctgctgacgcgcgcgcgggcgcggggcctcgtgtgcaccgtgtgggccatctcggccctggtgtccttcctgcccatcctcatgcactggtggcgggcggagagcgacgaggcgcgccgctgctacaacgaccccaagtgctgcgacttcgtcaccaaccgggcctacgccatcgcctcgtccgtagtctccttctacgtgcccctgtgcatcatggccttcgtgtacctgcgggtgttccgcgaggcccagaagcaggtgaagaagatcgacagctgcgagcgccgtttcctcggcggcccagcgcggccgccctcgccctcgccctcgcccgtccccgcgcccgcgccgccgcccggacccccgcgccccgccgccgccgccgccaccgccccgctggccaacgggcgtgcgggtaagcggcggccctcgcgcctcgtggccctgcgcgagcagaaggcgctcaagacgctgggcatcatcatgggcgtcttcacgctctgctggctgcccttcttcctggccaacgtggtgaaggccttccaccgcgagctggtgcccgaccgcctcttcgtcttcttcaactggctgggctacgccaactcggccttcaaccccatcatctactgccgcagccccgacttccgcaaggccttccagggactgctctgctgcgcgcgcagggctgcccgccggcgccacgcgacccacggagaccggccgcgcgcctcgggctgtctggcccggcccggacccccgccatcgcccggggccgcctcggacgacgacgacgacgatgtcgtcggggccacgccgcccgcgcgcctgctggagccctgggccggctgcaacggcggggcggcggcggacagcgactcgagcctggacgagccgtgccgccccggcttcgcctcggaatccaaggtgtagggcccggcgcggggcgcggactccgggcacggcttcccaggggaacgaggagatctgtgtttacttaagaccgatagcaggtgaactcgaagcccacaatcctcgtctgaatcatccgaggcaaagagaaaagccacggaccgttgcacaaaaaggaaagtttgggaagggatgggagagtggcttgctgatgttccttgttgttttttttttcttttcttttctttcttcttcttttttttttttttttttttttctgtttgtggtccggccttcttttgtgtgtgcgtgtgatgcatctttagatttttttcccccaccaggtggtttttgacactctctgagaggaccggagtggaagatgggtgggttaggggaagggagaagcattaggaggggattaaaatcgatcatcgtggctcccatccctttcccgggaacaggaacacactaccagccagagagaggagaatgacagtttgtcaagacatatttccttttgctttccagagaaatttcattttaatttctaagtaatgatttctgctgttatgaaagcaaagagaaaggatggaggcaaaataaaaaaaaatcacgtttcaagaaatgttaagctcttcttggaacaagccccaccttgctttccttgtgtagggcaaacccgctgtcccccgcgcgcctgggtggtcaggctgagggatttctacctcacactgtgcatttgcacagcagatagaaagacttgtttatattaaacagcttatttatgtatcaatattagttggaaggaccaggcgcagagcctctctctgtgacatgtgactctgtcaattgaagacaggacattaaaagagagcgagagagagaaacagttcagattactgcacatgtggataaaaacaaaaacaaaaaaaaggagtggttcaaaatgccatttttgcacagtgttaggaattacaaaatccacagaagatgttacttgcacaaaaagaaattaaatattttttaaagggagaggggctgggcagatcttaaataaaattcaaactctacttctgttgtctagtatgttattgagctaatgattcattgggaaaatacctttttatactcctttatcatggtactgtaactgtatccatattataaatataattatcttaaggattttttatttttttttatgtccaagtgcccacgtgaatttgctggtgaaagttagcacttgtgtgtaaattctacttcctcttgtgtgttttaccaagtatttatactctggtgcaactaactactgtgtgaggaattggtccatgtgcaataaataccaatgaagcacaatcaa

SEQ ID NO: 1400 - DNA, 2041 bp, Homo sapiens
  source 1..2041: mol_type = unassigned DNA
gcacataacgggcagaacgcactgcgaagcggcttcttcagagcacgggctggaactggcaggcaccgcgagcccctagcacccgacaagctgagtgtgcaggacgagtccccaccacacccacaccacagccgctgaatgaggcttccaggcgtccgctcgcggcccgcagagccccgccgtgggtccgcccgctgaggcgcccccagccagtgcgctcacctgccagactgcgcgccatggggcaacccgggaacggcagcgccttcttgctggcacccaatggaagccatgcgccggaccacgacgtcacgcaggaaagggacgaggtgtgggtggtgggcatgggcatcgtcatgtctctcatcgtcctggccatcgtgtttggcaatgtgctggtcatcacagccattgccaagttcgagcgtctgcagacggtcaccaactacttcatcacttcactggcctgtgctgatctggtcatgggcctggcagtggtgccctttggggccgcccatattcttatgaaaatgtggacttttggcaacttctggtgcgagttttggacttccattgatgtgctgtgcgtcacggccagcattgagaccctgtgcgtgatcgcagtggatcgctactttgccattacttcacctttcaagtaccagagcctgctgaccaagaataaggcccgggtgatcattctgatggtgtggattgtgtcaggccttacctccttcttgcccattcagatgcactggtaccgggccacccaccaggaagccatcaactgctatgccaatgagacctgctgtgacttcttcacgaaccaagcctatgccattgcctcttccatcgtgtccttctacgttcccctggtgatcatggtcttcgtctactccagggtctttcaggaggccaaaaggcagctccagaagattgacaaatctgagggccgcttccatgtccagaaccttagccaggtggagcaggatgggcggacggggcatggactccgcagatcttccaagttctgcttgaaggagcacaaagccctcaagacgttaggcatcatcatgggcactttcaccctctgctggctgcccttcttcatcgttaacattgtgcatgtgatccaggataacctcatccgtaaggaagtttacatcctcctaaattggataggctatgtcaattctggtttcaatccccttatctactgccggagcccagatttcaggattgccttccaggagcttctgtgcctgcgcaggtcttctttgaaggcctatgggaatggctactccagcaacggcaacacaggggagcagagtggatatcacgtggaacaggagaaagaaaataaactgctgtgtgaagacctcccaggcacggaagactttgtgggccatcaaggtactgtgcctagcgataacattgattcacaagggaggaattgtagtacaaatgactcactgctgtaaagcagtttttctacttttaaagacccccccccccaacagaacactaaacagactatttaacttgagggtaataaacttagaataaaattgtaaaattgtatagagatatgcagaaggaagggcatccttctgccttttttatttttttaagctgtaaaaagagagaaaacttatttgagtgattatttgttatttgtacagttcagttcctctttgcatggaatttgtaagtttatgtctaaagagctttagtcctagaggacctgagtctgctatattttcatgacttttccatgtatctacctcactattcaagtattaggggtaatatattgctgctggtaatttgtatctgaaggagattttccttcctacacccttggacttgaggattttgagtatctcggacctttcagctgtgaacatggactcttcccccactcctcttatttgctcacacggggtattttaggcagggatttgaggagcagcttcagttgttttcccgagcaaagtctaaagtttacagtaaataaattgtttgaccatgccttcattgc

SEQ ID NO: 1401 - DNA, 2943 bp, Homo sapiens
  source 1..2943: mol_type = unassigned DNA
ctctgatacataaagggtggggatgggagcgctctcctctctccttcccctgccttgctgtgggaacttctgggaaaggaggtgcagggctccaggaagccagtgcccagggagtgctatgctgagtccaggagcctggccacggcaggggtggacagatggtggcagaggaaccacggtgtcccttcctccagatttagctaaaggaaacgtggagcatcccattggccatcctccccactctccaattcggctccagaggcccctccagactataggcagctgcccctttaagcgtcgctactcctcccccaagagcggtggcaccgagggagttggggtggggggaggctgagcgctctggctgggacagctagagaagatggcccaggctggggaagtcgctctcatgccttgctgtcccctcccctgagccaggtgatttgggagaccccctccttccttctttccctaccgccccacgcgcgacccggggatggctccgtggcctcacgagaacagctctcttgccccatggccggacctccccaccctggcgcccaataccgccaacaccagtgggctgccaggggttccgtgggaggcggccctagccggggccctgctggcgctggcggtgctggccaccgtgggaggcaacctgctggtcatcgtggccatcgcctggactccgagactccagaccatgaccaacgtgttcgtgacttcgctggccgcagccgacctggtgatgggactcctggtggtgccgccggcggccaccttggcgctgactggccactggccgttgggcgccactggctgcgagctgtggacctcggtggacgtgctgtgtgtgaccgccagcatcgaaaccctgtgcgccctggccgtggaccgctacctggctgtgaccaacccgctgcgttacggcgcactggtcaccaagcgctgcgcccggacagctgtggtcctggtgtgggtcgtgtcggccgcggtgtcgtttgcgcccatcatgagccagtggtggcgcgtaggggccgacgccgaggcgcagcgctgccactccaacccgcgctgctgtgccttcgcctccaacatgccctacgtgctgctgtcctcctccgtctccttctaccttcctcttctcgtgatgctcttcgtctacgcgcgggttttcgtggtggctacgcgccagctgcgcttgctgcgcggggagctgggccgctttccgcccgaggagtctccgccggcgccgtcgcgctctctggccccggccccggtggggacgtgcgctccgcccgaaggggtgcccgcctgcggccggcggcccgcgcgcctcctgcctctccgggaacaccgggccctgtgcaccttgggtctcatcatgggcaccttcactctctgctggttgcccttctttctggccaacgtgctgcgcgccctggggggcccctctctagtcccgggcccggctttccttgccctgaactggctaggttatgccaattctgccttcaacccgctcatctactgccgcagcccggactttcgcagcgccttccgccgtcttctgtgccgctgcggccgtcgcctgcctccggagccctgcgccgccgcccgcccggccctcttcccctcgggcgttcctgcggcccggagcagcccagcgcagcccaggctttgccaacggctcgacggggcttcttggggagtttcttaggcctgaaggacaagaagcaacaactctgttgatcagaacctgtggaaaacctctggcctctgttcagaatgagtcccatgggattccccggctgtgacactctaccctccagaacctgacgactgggccatgtgacccaaggagggatccttaccaagtgggttttcaccatcctcttgctctctgtctgagagatgttttctaaaccccagccttgaacttcactcctccctcagtggtagtgtccaggtgccgtggagcagcaggctggctttggtaggggcacccatcacccggcttgcctgtgcagtcagtgagtgcttagggcaaagagagctcccctggttccattccttctgccacccaaaccctgatgagaccttagtgttctccaggctctgtggcccaggctgagagcagcagggtagaaaagaccaagatttggggttttatctctggttcccttattactgctctcaagcagtggcctctctcactttagccatggaatggctccgatctacctcacagcagtgtcagaaggacttcgccagggttttgggagctccagggttcataagaaggtgaaccattagaacagatcccttcttttccttttgcaatcagataaataaatatcactgaatgcagttcatcctcggccccctttccctccgtttgttttcttttcataatccacttactcccttcccttctactctgcgctggcttttgacagaggcagtaaattaggcctaatcctcactcttttcttcctaatcttcatcaaacaaaaaatgaaaagtctgtctggacgaaggggagtgagcttgagcctttgatatcttgctcccccacccttcctgaaactcttgaaatccagttgccattgagtagcaaagccacgctccccacaggacttggacagagggcccacagggggatgggctggctgtggccaggtttagggcagggggcatttgtcccctccatgctataatccagtggtgccttacatggtgtgtgtgtgtgtgtgtgcgtgtgtgtgtgtgtgtgtgtgtctggaggcacaggcacaaagcattgcttgggttggtcaaatgtcttgtgtcataaatatattctgatgtttcccagcctttccacaacctctaccttcccactcaccttccccagctacaaaaatctgtattatcctcttaaagtaaaactggagttac

SEQ ID NO: 1402 - DNA, 1369 bp, Homo sapiens
  source 1..1369: mol_type = unassigned DNA
gccaggaccctggaaggaagcaggatggctgccggaacagcagttggagcctgggtgctggtcctcagtctgtggggggcagtagtaggtgctcaaaacatcacagcccggattggcgagccactggtgctgaagtgtaagggggcccccaagaaaccaccccagcggctggaatggaaactgaacacaggccggacagaagcttggaaggtcctgtctccccagggaggaggcccctgggacagtgtggctcgtgtccttcccaacggctccctcttccttccggctgtcgggatccaggatgaggggattttccggtgccaggcaatgaacaggaatggaaaggagaccaagtccaactaccgagtccgtgtctaccagattcctgggaagccagaaattgtagattctgcctctgaactcacggctggtgttcccaataaggtggggacatgtgtgtcagagggaagctaccctgcagggactcttagctggcacttggatgggaagcccctggtgcctaatgagaagggagtatctgtgaaggaacagaccaggagacaccctgagacagggctcttcacactgcagtcggagctaatggtgaccccagcccggggaggagatccccgtcccaccttctcctgtagcttcagcccaggccttccccgacaccgggccttgcgcacagcccccatccagccccgtgtctgggagcctgtgcctctggaggaggtccaattggtggtggagccagaaggtggagcagtagctcctggtggaaccgtaaccctgacctgtgaagtccctgcccagccctctcctcaaatccactggatgaaggatggtgtgcccttgccccttccccccagccctgtgctgatcctccctgagatagggcctcaggaccagggaacctacagctgtgtggccacccattccagccacgggccccaggaaagccgtgctgtcagcatcagcatcatcgaaccaggcgaggaggggccaactgcaggtgaggggtttgataaagtcagggaagcagaagatagcccccaacacatgtgactggggggatggtcaacaagaaaggaatggaaggccccagaaaaccaggaggaagaggaggagcgtgcagaactgaatcagtcggaggaacctgaggcaggcgagagtagtactggagggccttgaggggcccacagacagatcccatccatcagctcccttttctttttcccttgaactgttctggcctcagaccaactctctcctgtataatctctctcctgtataaccccaccttgccaagctttcttctacaaccagagccccccacaatgatgattaaacacctgacacatcttgc

SEQ ID NO: 1403 - DNA, 715 bp, Homo sapiens
  source 1..715: mol_type = unassigned DNA
ctggaaggaagcaggatggctgccggaacagcagttggagcctgggtgctggtcctcagtctgtggggggcagtagtaggtgctcaaaacatcacagcccggattggcgagccactggtgctgaagtgtaagggggcccccaagaaaccaccccagcggctggaatggaaactgaacacaggccggacagaagcttggaaggtcctgtctccccagggaggaggcccctgggacagtgtggctcgtgtccttcccaacggctccctcttccttccggctgtcgggatccaggatgaggggattttccggtgccaggcaatgaacaggaatggaaaggagaccaagtccaactaccgagtccgtgtctaccagattcctgggaagccagaaattgtagattctgcctctgaactcacggctggtgttcccaataaggtagtggaagaaagcaggagaagtagaaaacggccctgtgaacaggaggtggggacatgtgtgtcagagggaagctaccctgcagggactcttagctggcacttggatgggaagcccctggtgcctaatgagaagggagtatctgtgaaggaacagaccaggagacaccctgagacagggctcttcacactgcagtcggagctaatggtgaccccagcccggggaggagatccccgtcccaccttctcctgtagcttcagcccaggccttccccgacacc

SEQ ID NO: 1404 - DNA, 665 bp, Homo sapiens
  source 1..665: mol_type = unassigned DNA
atggctgccggaacagcagttggagcctgggtgctggtcctcagtctgtggggggcagtagtaggtgctcaaaacatcacagcccaggccttccccgacaccgggccttgcgcacagcccccatccagccccgtgtctgggagcctgtgcctctggaggaggtccaattggtggtggagccagaaggtggagcagtagctcctggtggaaccgtaaccctgacctgtgaagtccctgcccagccctctcctcaaatccactggatgaaggatggtgtgcccttgccccttccccccagccctgtgctgatcctccctgagatagggcctcaggaccagggaacctacagctgtgtggccacccattccagccacgggccccaggaaagccgtgctgtcagcatcagcatcatcgaaccaggcgaggaggggccaactgcaggctctgtgggaggatcagggctgggaactctagccctggccctggggatcctgggaggcctggggacagccgccctgctcattggggtcatcttgtggcaaaggcggcaacgccgaggagaggagaggaaggccccagaaaaccaggaggaagaggaggagcgtgcagaactgaatcagtcggaggaacctgaggcaggcgagagtagtactggagggccttga

SEQ ID NO: 1405 - DNA, 864 bp, Homo sapiens
  source 1..864: mol_type = unassigned DNA
aggaagcaggatggctgccggaacagcagttggagcctgggtgctggtcctcagtctgtggggggcagtagtaggtgctcaaaacatcacagcccggattggcgagccactggtgctgaagtgtaagggggcccccaagaaaccaccccagcggctggaatggaaactgaacacaggccggacagaagcttggaaggtcctgtctccccagggaggaggcccctgggacagtgtggctcgtgtccttcccaacggctccctcttccttccggctgtcgggatccaggatgaggggattttccggtgccaggcaatgaacaggaatggaaaggagaccaagtccaattggtggtggagccagaaggtggagcagtagctcctggtggaaccgtaaccctgacctgtgaagtccctgcccagccctctcctcaaatccactggatgaaggatggtgtgcccttgccccttccccccagccctgtgctgatcctccctgagatagggcctcaggaccagggaacctacagctgtgtggccacccattccagccacgggccccaggaaagccgtgctgtcagcatcagcatcatcgaaccaggcgaggaggggccaactgcaggctctgtgggaggatcagggctgggaactctagccctggccctggggatcctgggaggcctggggacagccgccctgctcattggggtcatcttgtggcaaaggcggcaacgccgaggagaggagaggaaggccccagaaaaccaggaggaagaggaggagcgtgcagaactgaatcagtcggaggaacctgaggcaggcgagagtagtactggagggccttgaggggcccacagacagatccca

SEQ ID NO: 1406 - DNA, 1250 bp, Homo sapiens
  source 1..1250: mol_type = unassigned DNA
ctggaaggaagcaggatggctgccggaacagcagttggagcctgggtgctggtcctcagtctgtggggggcagtagtaggtgctcaaaacatcacagcccggattggcgagccactggtgctgaagtgtaagggggcccccaagaaaccaccccagcggctggaatggaaactgggaggaggcccctgggacagtgtggctcgtgtccttcccaacggctccctcttccttccggctgtcgggatccaggatgaggggattttccggtgccaggcaatgaacaggaatggaaaggagaccaagtccaactaccgagtccgtgtctaccagattcctgggaagccagaaattgtagattctgcctctgaactcacggctggtgttcccaataaggtggggacatgtgtgtcagagggaagctaccctgcagggactcttagctggcacttggatgggaagcccctggtgcctaatgagaagggagtatctgtgaaggaacagaccaggagacaccctgagacagggctcttcacactgcagtcggagctaatggtgaccccagcccggggaggagatccccgtcccaccttctcctgtagcttcagcccaggccttccccgacaccgggccttgcgcacagcccccatccagccccgtgtctgggagcctgtgcctctggaggaggtccaattggtggtggagccagaaggtggagcagtagctcctggtggaaccgtaaccctgacctgtgaagtccctgcccagccctctcctcaaatccactggatgaaggatgtgagtgacctggagagaggggctgggagaaccaggcgaggaggggccaactgcaggctctgtgggaggatcagggctgggaactctagccctggccctggggatcctgggaggcctggggacagccgccctgctcattggggtcatcttgtggcaaaggcggcaacgccgaggagaggagaggaaggccccagaaaaccaggaggaagaggaggagcgtgcagaactgaatcagtcggaggaacctgaggcaggcgagagtagtactggagggccttgaggggcccacagacagatcccatccatcagctcccttttctttttcccttgaactgttctggcctcagaccaactctctcctgtataatctctctcctgtataaccccaccttgccaagctttcttctacaaccagagccccccacaatgatgattaaacacctgacacatcttgc

SEQ ID NO: 1407 - DNA, 1371 bp, Homo sapiens
  source 1..1371: mol_type = unassigned DNA
atggctgccggaacagcagttggagcctgggtgctggtcctcagtctgtggggtgagccactccctcaaccccactgaccctccctgcagaaagcactttaaccccacaccccagtcgtcctagaacttttcccagaacccgaggaagtgcctttcaaggtccctcacccaccctgtccaaattttgttagccctcattcccttcctacccctctaccatggtgctatctcccaggggcagtagtaggtgctcaaaacatcacagcccggattggcgagccactggtgctgaagtgtaagggggcccccaagaaaccaccccagcggctggaatggaaactgaacacaggccggacagaagcttggaaggtcctgtctccccagggaggaggcccctgggacagtgtggctcgtgtccttcccaacggctccctcttccttccggctgtcgggatccaggatgaggggattttccggtgccaggcaatgaacaggaatggaaaggagaccaagtccaactaccgagtccgtgtctaccagattcctgggaagccagaaattgtagattctgcctctgaactcacggctggtgttcccaataaggtggggacatgtgtgtcagagggaagctaccctgcagggactcttagctggcacttggatgggaagcccctggtgcctaatgagaagggagtatctgtgaaggaacagaccaggagacaccctgagacagggctcttcacactgcagtcggagctaatggtgaccccagcccggggaggagatccccgtcccaccttctcctgtagcttcagcccaggccttccccgacaccgggccttgcgcacagcccccatccagccccgtgtctgggagcctgtgcctctggaggaggtccaattggtggtggagccagaaggtggagcagtagctcctggtggaaccgtaaccctgacctgtgaagtccctgcccagccctctcctcaaatccactggatgaaggatggtgtgcccttgccccttccccccagccctgtgctgatcctccctgagatagggcctcaggaccagggaacctacagctgtgtggccacccattccagccacgggccccaggaaagccgtgctgtcagcatcagcatcatcggctctgtgggaggatcagggctgggaactctagccctggccctggggatcctgggaggcctggggacagccgccctgctcattggggtcatcttgtggcaaaggcggcaacgccgaggagaggagaggaaggccccagaaaaccaggaggaagaggaggagcgtgcagaactgaatcagtcggaggaacctgaggcaggcgagagtagtactggagggccttga

SEQ ID NO: 1408 - DNA, 1490 bp, Homo sapiens
  source 1..1490: mol_type = unassigned DNA
gactgaaagatgggggctggagagagggtgcaggccccacctagggcggaggccacagcagggagaggggcagacagagccaggaccctggaaggaagcaggatggctgccggaacagcagttggagcctgggtgctggtcctcagtctgtggggggcagtagtaggtgctcaaaacatcacagcccggattggcgagccactggtgctgaagtgtaagggggcccccaagaaaccaccccagcggctggaatggaaactgaacacaggccggacagaagcttggaaggtcctgtctccccagggaggaggcccctgggacagtgtggctcgtgtccttcccaacggctccctcttccttccggctgtcgggatccaggatgaggggattttccggtgccaggcaatgaacaggaatggaaaggagaccaagtccaactaccgagtccgtgtctaccagattcctgggaagccagaaattgtagattctgcctctgaactcacggctggtgttcccaataaggtggggacatgtgtgtcagagggaagctaccctgcagggactcttagctggcacttggatgggaagcccctggtgcctaatgagaagggagtatctgtgaaggaacagaccaggagacaccctgagacagggctcttcacactgcagtcggagctaatggtgaccccagcccggggaggagatccccgtcccaccttctcctgtagcttcagcccaggccttccccgacaccgggccttgcgcacagcccccatccagccccgtgtctgggagcctgtgcctctggaggaggtccaattggtggtggagccagaaggtggagcagtagctcctggtggaaccgtaaccctgacctgtgaagtccctgcccagccctctcctcaaatccactggatgaaggatggtgtgcccttgccccttccccccagccctgtgctgatcctccctgagatagggcctcaggaccagggaacctacagctgtgtggccacccattccagccacgggccccaggaaagccgtgctgtcagcatcagcatcatcgaaccaggcgaggaggggccaactgcaggctctgtgggaggatcagggctgggaactctagccctggccctggggatcctgggaggcctggggacagccgccctgctcattggggtcatcttgtggcaaaggcggcaacgccgaggagaggagaggaaggccccagaaaaccaggaggaagaggaggagcgtgcagaactgaatcagtcggaggaacctgaggcaggcgagagtagtactggagggccttgaggggcccacagacagatcccatccatcagctcccttttctttttcccttgaactgttctggcctcagaccaactctctcctgtataatctctctcctgtataaccccaccttgccaagctttcttctacaaccagagccccccacaatgatgattaaacacctgacacatctt

SEQ ID NO: 1409 - DNA, 1492 bp, Homo sapiens
  source 1..1492: mol_type = unassigned DNA
gactgaaagatgggggctggagagagggtgcaggccccacctagggcggaggccacagcagggagaggggcagacagagccaggaccctggaaggaagcaggatggctgccggaacagcagttggagcctgggtgctggtcctcagtctgtggggggcagtagtaggtgctcaaaacatcacagcccggattggcgagccactggtgctgaagtgtaagggggcccccaagaaaccaccccagcggctggaatggaaactgaacacaggccggacagaagcttggaaggtcctgtctccccagggaggaggcccctgggacagtgtggctcgtgtccttcccaacggctccctcttccttccggctgtcgggatccaggatgaggggattttccggtgccaggcaatgaacaggaatggaaaggagaccaagtccaactaccgagtccgtgtctaccagattcctgggaagccagaaattgtagattctgcctctgaactcacggctggtgttcccaataaggtggggacatgtgtgtcagagggaagctaccctgcagggactcttagctggcacttggatgggaagcccctggtgcctaatgagaagggagtatctgtgaaggaacagaccaggagacaccctgagacagggctcttcacactgcagtcggagctaatggtgaccccagcccggggaggagatccccgtcccaccttctcctgtagcttcagcccaggccttccccgacaccgggccttgcgcacagcccccatccagccccgtgtctgggagcctgtgcctctggaggaggtccaattggtggtggagccagaaggtggagcagtagctcctggtggaaccgtaaccctgacctgtgaagtccctgcccagccctctcctcaaatccactggatgaaggatggtgtgcccttgccccttccccccagccctgtgctgatcctccctgagatagggcctcaggaccagggaacctacagctgtgtggccacccattccagccacgggccccaggaaagccgtgctgtcagcatcagcatcatcgaaccaggcgaggaggggccaactgcaggctctgtgggaggatcagggctgggaactctagccctggccctggggatcctgggaggcctggggacagccgccctgctcattggggtcatcttgtggcaaaggcggcaacgccgaggagaggagaggaaggccccagaaaaccaggaggaagaggaggagcgtgcagaactgaatcagtcggaggaacctgaggcaggcgagagtagtactggagggccttgaggggcccacagacagatcccatccatcagctcccttttctttttcccttgaactgttctggcctcagaccaactctctcctgtataatctctctcctgtataaccccaccttgccaagctttcttctacaaccagagccccccacaatgatgattaaacacctgacacatcttgc

SEQ ID NO: 1410 - DNA, 1369 bp, Homo sapiens
  source 1..1369: mol_type = unassigned DNA
gccaggaccctggaaggaagcaggatggcagccggaacagcagttggagcctgggtgctggtcctcagtctgtggggggcagtagtaggtgctcaaaacatcacagcccggattggcgagccactggtgctgaagtgtaagggggcccccaagaaaccaccccagcggctggaatggaaactgaacacaggccggacagaagcttggaaggtcctgtctccccagggaggaggcccctgggacagtgtggctcgtgtccttcccaacggctccctcttccttccggctgtcgggatccaggatgaggggattttccggtgccaggcaatgaacaggaatggaaaggagaccaagtccaactaccgagtccgtgtctaccagattcctgggaagccagaaattgtagattctgcctctgaactcacggctggtgttcccaataaggtggggacatgtgtgtcagagggaagctaccctgcagggactcttagctggcacttggatgggaagcccctggtgcctaatgagaagggagtatctgtgaaggaacagaccaggagacaccctgagacagggctcttcacactgcagtcggagctaatggtgaccccagcccggggaggagatccccgtcccaccttctcctgtagcttcagcccaggccttccccgacaccgggccttgcgcacagcccccatccagccccgtgtctgggagcctgtgcctctggaggaggtccaattggtggtggagccagaaggtggagcagtagctcctggtggaaccgtaaccctgacctgtgaagtccctgcccagccctctcctcaaatccactggatgaaggatggtgtgcccttgccccttccccccagccctgtgctgatcctccctgagatagggcctcaggaccagggaacctacagctgtgtggccacccattccagccacgggccccaggaaagccgtgctgtcagcatcagcatcatcgaaccaggcgaggaggggccaactgcaggtgaggggtttgataaagtcagggaagcagaagatagcccccaacacatgtgactggggggatggtcaacaagaaaggaatggaaggccccagaaaaccaggaggaagaggaggagcgtgcagaactgaatcagtcggaggaacctgaggcaggcgagagtagtactggagggccttgaggggcccacagacagatcccatccatcagctcccttttctttttcccttgaactgttctggcctcagaccaactctctcctgtataatctctctcctgtataaccccaccttgccaagctttcttctacaaccagagccccccacaatgatgattaaacacctgacacatcttgc

SEQ ID NO: 1411 - DNA, 1250 bp, Homo sapiens
  source 1..1250: mol_type = unassigned DNA
ctggaaggaagcaggatggcagccggaacagcagttggagcctgggtgctggtcctcagtctgtggggggcagtagtaggtgctcaaaacatcacagcccggattggcgagccactggtgctgaagtgtaagggggcccccaagaaaccaccccagcggctggaatggaaactgggaggaggcccctgggacagtgtggctcgtgtccttcccaacggctccctcttccttccggctgtcgggatccaggatgaggggattttccggtgccaggcaatgaacaggaatggaaaggagaccaagtccaactaccgagtccgtgtctaccagattcctgggaagccagaaattgtagattctgcctctgaactcacggctggtgttcccaataaggtggggacatgtgtgtcagagggaagctaccctgcagggactcttagctggcacttggatgggaagcccctggtgcctaatgagaagggagtatctgtgaaggaacagaccaggagacaccctgagacagggctcttcacactgcagtcggagctaatggtgaccccagcccggggaggagatccccgtcccaccttctcctgtagcttcagcccaggccttccccgacaccgggccttgcgcacagcccccatccagccccgtgtctgggagcctgtgcctctggaggaggtccaattggtggtggagccagaaggtggagcagtagctcctggtggaaccgtaaccctgacctgtgaagtccctgcccagccctctcctcaaatccactggatgaaggatgtgagtgacctggagagaggggctgggagaaccaggcgaggaggggccaactgcaggctctgtgggaggatcagggctgggaactctagccctggccctggggatcctgggaggcctggggacagccgccctgctcattggggtcatcttgtggcaaaggcggcaacgccgaggagaggagaggaaggccccagaaaaccaggaggaagaggaggagcgtgcagaactgaatcagtcggaggaacctgaggcaggcgagagtagtactggagggccttgaggggcccacagacagatcccatccatcagctcccttttctttttcccttgaactgttctggcctcagaccaactctctcctgtataatctctctcctgtataaccccaccttgccaagctttcttctacaaccagagccccccacaatgatgattaaacacctgacacatcttgc

SEQ ID NO: 1412 - DNA, 1250 bp, Homo sapiens; identical to SEQ ID NO: 1411
  source 1..1250: mol_type = unassigned DNA

SEQ ID NO: 1413 - DNA, 715 bp, Homo sapiens
  source 1..715: mol_type = unassigned DNA
ctggaaggaagcaggatggcagccggaacagcagttggagcctgggtgctggtcctcagtctgtggggggcagtagtaggtgctcaaaacatcacagcccggattggcgagccactggtgctgaagtgtaagggggcccccaagaaaccaccccagcggctggaatggaaactgaacacaggccggacagaagcttggaaggtcctgtctccccagggaggaggcccctgggacagtgtggctcgtgtccttcccaacagctccctcttccttccggctgtcgggatccaggatgaggggattttccggtgccaggcaatgaacaggaatggaaaggagaccaagtccaactaccgagtccgtgtctaccagattcctgggaagccagaaattgtagattctgcctctgaactcacggctggtgttcccaataaggtagtggaagaaagcaggagaagtagaaaacggccctgtgaacaggaggtggggacatgtgtgtcagagggaagctaccctgcagggactcttagctggcacttggatgggaagcccctggtgcctaatgagaagggagtatctgtgaaggaacagaccaggagacaccctgagacagggctcttcacactgcagtcggagctaatggtgaccccagcccggggaggagatccccgtcccaccttctcctgtagcttcagcccaggccttccccgacacc

SEQ ID NO: 1414 - DNA, 716 bp, Homo sapiens
  source 1..716: mol_type = unassigned DNA
ggaaggaagcaggatggcagccggaacagcagttggagcctgggtgctggtcctcagtctgtggggggcagtagtaggtgctcaaaacatcacagcccggattggcgagccactggtgctgaagtgtaagggggcccccaagaaaccaccccagcggctggaatggaaactgaacacaggccggacagaagcttggaaggtcctgtctccccagggaggaggcccctgggacagtgtggctcgtgtccttcccaacggctccctcttccttccggctgtcgggatccaggatgaggggattttccggtgccaggcaatgaacaggaatggaaaggagaccaagtccaactaccgaagtttgagaaccttcacaattacagcctctgactggatttttcctccttcagagattcctgggaagccagaaattgtagattctgcctctgaactcacggctggtgttcccaataaggtggggacatgtgtgtcagagggaagctaccctgcagggactcttagctggcacttggatgggaagcccctggtgcctaatgagaagggagtatctgtgaaggaacagaccaggagacaccctgagacagggctcttcacactgcagtcggagctaatggtgaccccagcccggggaggagatccccgtcccaccttctcctgtagcttcagcccaggccttccccgacaccgggccttgcgca

SEQ ID NO: 1415 - DNA, 716 bp, Homo sapiens; identical to SEQ ID NO: 1414
  source 1..716: mol_type = unassigned DNA

SEQ ID NO: 1416 - DNA, 715 bp, Homo sapiens
  source 1..715: mol_type = unassigned DNA
ctggaaggaagcaggatggcagccggaacagcagttggagcctgggtgctggtcctcagtctgtggggggcagtagtaggtgctcaaaacatcacagcccggattggcgagccactggtgctgaagtgtaagggggcccccaagaaaccaccccagcggctggaatggaaactgaacacaggccggacagaagcttggaaggtcctgtctccccagggaggaggcccctgggacagtgtggctcgtgtccttcccaacggctccctcttccttccggctgtcgggatccaggatgaggggattttccggtgccaggcaatgaacaggaatggaaaggagaccaagtccaactaccgagtccgtgtctaccagattcctgggaagccagaaattgtagattctgcctctgaactcacggctggtgttcccaataaggtagtggaagaaagcaggagaagtagaaaacggccctgtgaacaggaggtggggacatgtgtgtcagagggaagctaccctgcagggactcttagctggcacttggatgggaagcccctggtgcctaatgagaagggagtatctgtgaaggaacagaccaggagacaccctgagacagggctcttcacactgcagtcggagctaatggtgaccccagcccggggaggagatccccgtcccaccttctcctgtagcttcagcccaggccttccccgacacc

SEQ ID NO: 1417 - DNA, 1492 bp, Homo sapiens
  source 1..1492: mol_type = unassigned DNA
gactgaaagatgggggctggagagagggtgcaggccccacctagggcggaggccacagcagggagaggggcagacagagccaggaccctggaaggaagcaggatggcagccggaacagcagttggagcctgggtgctggtcctcagtctgtggggggcagtagtaggtgctcaaaacatcacagcccggattggcgagccactggtgctgaagtgtaagggggcccccaagaaaccaccccagcggctggaatggaaactgaacacaggccggacagaagcttggaaggtcctgtctccccagggaggaggcccctgggacagtgtggctcgtgtccttcccaacagctccctcttccttccggctgtcgggatccaggatgaggggattttccggtgccaggcaatgaacaggaatggaaaggagaccaagtccaactaccgagtccgtgtctaccagattcctgggaagccagaaattgtagattctgcctctgaactcacggctggtgttcccaataaggtggggacatgtgtgtcagagggaagctaccctgcagggactcttagctggcacttggatgggaagcccctggtgcctaatgagaagggagtatctgtgaaggaacagaccaggagacaccctgagacagggctcttcacactgcagtcggagctaatggtgaccccagcccggggaggagatccccgtcccaccttctcctgtagcttcagcccaggccttccccgacaccgggccttgcgcacagcccccatccagccccgtgtctgggagcctgtgcctctggaggaggtccaattggtggtggagccagaaggtggagcagtagctcctggtggaaccgtaaccctgacctgtgaagtccctgcccagccctctcctcaaatccactggatgaaggatggtgtgcccttgccccttccccccagccctgtgctgatcctccctgagatagggcctcaggaccagggaacctacagctgtgtggccacccattccagccacgggccccaggaaagccgtgctgtcagcatcagcatcatcgaaccaggcgaggaggggccaactgcaggctctgtgggaggatcagggctgggaactctagccctggccctggggatcctgggaggcctggggacagccgccctgctcattggggtcatcttgtggcaaaggcggcaacgccgaggagaggagaggaaggccccagaaaaccaggaggaagaggaggagcgtgcagaactgaatcagtcggaggaacctgaggcaggcgagagtagtactggagggccttgaggggcccacagacagatcccatccatcagctcccttttctttttcccttgaactgttctggcctcagaccaactctctcctgtataatctctctcctgtataaccccaccttgccaagctttcttctacaaccagagccccccacaatgatgattaaacacctgacacatcttgc

SEQ ID NO: 1418 - DNA, 1369 bp, Homo sapiens; identical to SEQ ID NO: 1410
  source 1..1369: mol_type = unassigned DNA

SEQ ID NO: 1419 - DNA, 715 bp, Homo sapiens; identical to SEQ ID NO: 1416
  source 1..715: mol_type = unassigned DNA

SEQ ID NO: 1420 - DNA, 1492 bp, Homo sapiens
  source 1..1492: mol_type = unassigned DNA
gactgaaagatgggggctggagagagggtgcaggccccacctagggcggaggccacagcagggagaggggcagacagagccaggaccctggaaggaagcaggatggcagccggaacagcagttggagcctgggtgctggtcctcagtctgtggggggcagtagtaggtgctcaaaacatcacagcccggattggcgagccactggtgctgaagtgtaagggggcccccaagaaaccaccccagcggctggaatggaaactgaacacaggccggacagaagcttggaaggtcctgtctccccagggaggaggcccctgggacagtgtggctcgtgtccttcccaacggctccctcttccttccggctgtcgggatccaggatgaggggattttccggtgccaggcaatgaacaggaatggaaaggagaccaagtccaactaccgagtccgtgtctaccagattcctgggaagccagaaattgtagattctgcctctgaactcacggctggtgttcccaataaggtggggacatgtgtgtcagagggaagctaccctgcagggactcttagctggcacttggatgggaagcccctggtgcctaatgagaagggagtatctgtgaaggaacagaccaggagacaccctgagacagggctcttcacactgcagtcggagctaatggtgaccccagcccggggaggagatccccgtcccaccttctcctgtagcttcagcccaggccttccccgacaccgggccttgcgcacagcccccatccagccccgtgtctgggagcctgtgcctctggaggaggtccaattggtggtggagccagaaggtggagcagtagctcctggtggaaccgtaaccctgacctgtgaagtccctgcccagccctctcctcaaatccactggatgaaggatggtgtgcccttgccccttccccccagccctgtgctgatcctccctgagatagggcctcaggaccagggaacctacagctgtgtggccacccattccagccacgggccccaggaaagccgtgctgtcagcatcagcatcatcgaaccaggcgaggaggggccaactgcaggctctgtgggaggatcagggctgggaactctagccctggccctggggatcctgggaggcctggggacagccgccctgctcattggggtcatcttgtggcaaaggcggcaacgccgaggagaggagaggaaggccccagaaaaccaggaggaagaggaggagcgtgcagaactgaatcagtcggaggaacctgaggcaggcgagagtagtactggagggccttgaggggcccacagacagatcccatccatcagctcccttttctttttcccttgaactgttctggcctcagaccaactctctcctgtataatctctctcctgtataaccccaccttgccaagctttcttctacaaccagagccccccacaatgatgattaaacacctgacacatcttgc

SEQ ID NO: 1421 - DNA, 716 bp, Homo sapiens
  source 1..716: mol_type = unassigned DNA
ggaaggaagcaggatggcagccggaacagcagttggagcctgggtgctggtcctcagtctgtggggggcagtagtaggtgctcaaaacatcacagcccggattggcgagccactggtgctgaagtgtaagggggcccccaagaaaccaccccagcggctggaatggaaactgaacacaggccggacagaagcttggaaggtcctgtctccccagggaggaggcccctgggacagtgtggctcgtgtccttcccaacagctccctcttccttccggctgtcgggatccaggatgaggggattttccggtgccaggcaatgaacaggaatggaaaggagaccaagtccaactaccgaagtttgagaaccttcacaattacagcctctgactggatttttcctccttcagagattcctgggaagccagaaattgtagattctgcctctgaactcacggctggtgttcccaataaggtggggacatgtgtgtcagagggaagctaccctgcagggactcttagctggcacttggatgggaagcccctggtgcctaatgagaagggagtatctgtgaaggaacagaccaggagacaccctgagacagggctcttcacactgcagtcggagctaatggtgaccccagcccggggaggagatccccgtcccaccttctcctgtagcttcagcccaggccttccccgacaccgggccttgcgca

SEQ ID NO: 1422 - DNA, 1249 bp, Homo sapiens
  source 1..1249: mol_type = unassigned DNA
aggaagcaggatggctgccggaacagcagttggagcctgggtgctggtcctcagtctgtggggggcagtagtaggtgctcaaaacatcacagcccggattggcgagccactggtgctgaagtgtaagggggcccccaagaaaccaccccagcggctggaatggaaactgaacacaggccggacagaagcttggaaggtcctgtctccccagggaggaggcccctgggacagtgtggctcgtgtccttcccaacggctccctcttccttccggctgtcgggatccaggatgaggggattttccggtgccaggcaatgaacaggaatggaaaggagaccaagtccaactaccgagtccgtgtctaccagattcctgggaagccagaaattgtagattctgcctctgaactcacggctggtgttcccaataaggtagtggaagaaagcaggagaagtagaaaacggccctgtgaacaggaggtggggacatgtgtgtcagagggaagctaccctgcagggactcttagctggcacttggatgggaagcccctggtgcctaatgagaagggagtatctgtgaaggaacagaccaggagacaccctgagacagggctcttcacactgcagtcggagctaatggtgaccccagcccggggaggagatccccgtcccaccttctcctgtagcttcagcccaggccttccccgacaccgggccttgcgcacagcccccatccagccccgtgtctgggagcctgtgcctctggaggaggtccaattggtggtggagccagaaggtggagcagtagctcctggtggaaccgtaaccctgacctgtgaagtccctgcccagccctctcctcaaatccactggatgaaggatggtgtgcccttgccccttccccccagccctgtgctgatcctccctgagatagggcctcaggaccagggaacctacagctgtgtggccacccattccagccacgggccccaggaaagccgtgctgtcagcatcagcatcatcgaaccaggcgaggaggggccaactgcaggtgaggggtttgataaagtcagggaagcagaagatagcccccaacacatgtgactggggggatggtcaacaagaaaggaatggaaggccccagaaaaccaggaggaagaggaggagcgtgcagaactgaatcagtcggaggaacctgaggcaggcgagagtagtactggagggccttgaggggcccacagacagatccca

SEQ ID NO: 1423 - DNA, 1250 bp, Homo sapiens; identical to SEQ ID NO: 1411
  source 1..1250: mol_type = unassigned DNA

SEQ ID NO: 1424 - DNA, 715 bp, Homo sapiens; identical to SEQ ID NO: 1416
  source 1..715: mol_type = unassigned DNA

SEQ ID NO: 1425 - DNA, 1250 bp, Homo sapiens; identical to SEQ ID NO: 1411
  source 1..1250: mol_type = unassigned DNA

SEQ ID NO: 1426 - DNA, 716 bp, Homo sapiens; identical to SEQ ID NO: 1414
  source 1..716: mol_type = unassigned DNA

SEQ ID NO: 1427 - DNA, 1492 bp, Homo sapiens; identical to SEQ ID NO: 1420
  source 1..1492: mol_type = unassigned DNA

SEQ ID NO: 1428 - DNA, 1250 bp, Homo sapiens
  source 1..1250: mol_type = unassigned DNA
ctggaaggaagcaggatggcagccggaacagcagttggagcctgggtgctggtcctcagtctgtggggggcagtagtaggtgctcaaaacatcacagcccggattggcgagccactggtgctgaagtgtaagggggcccccaagaaaccaccccagcggctggaatggaaactgggaggaggcccctgggacagtgtggctcgtgtccttcccaacagctccctcttccttccggctgtcgggatccaggatgaggggattttccggtgccaggcaatgaacaggaatggaaaggagaccaagtccaactaccgagtccgtgtctaccagattcctgggaagccagaaattgtagattctgcctctgaactcacggctggtgttcccaataaggtggggacatgtgtgtcagagggaagctaccctgcagggactcttagctggcacttggatgggaagcccctggtgcctaatgagaagggagtatctgtgaaggaacagaccaggagacaccctgagacagggctcttcacactgcagtcggagctaatggtgaccccagcccggggaggagatccccgtcccaccttctcctgtagcttcagcccaggccttccccgacaccgggccttgcgcacagcccccatccagccccgtgtctgggagcctgtgcctctggaggaggtccaattggtggtggagccagaaggtggagcagtagctcctggtggaaccgtaaccctgacctgtgaagtccctgcccagccctctcctcaaatccactggatgaaggatgtgagtgacctggagagaggggctgggagaaccaggcgaggaggggccaactgcaggctctgtgggaggatcagggctgggaactctagccctggccctggggatcctgggaggcctggggacagccgccctgctcattggggtcatcttgtggcaaaggcggcaacgccgaggagaggagaggaaggccccagaaaaccaggaggaagaggaggagcgtgcagaactgaatcagtcggaggaacctgaggcaggcgagagtagtactggagggccttgaggggcccacagacagatcccatccatcagctcccttttctttttcccttgaactgttctggcctcagaccaactctctcctgtataatctctctcctgtataaccccaccttgccaagctttcttctacaaccagagccccccacaatgatgattaaacacctgacacatcttgc

SEQ ID NO: 1429 - DNA, 1369 bp, Homo sapiens; identical to SEQ ID NO: 1410
  source 1..1369: mol_type = unassigned DNA

SEQ ID NO: 1430 - DNA, 716 bp, Homo sapiens
  source 1..716: mol_type = unassigned DNA
ggaaggaagcaggatggctgccggaacagcagttggagcctgggtgctggtcctcagtctgtggggggcagtagtaggtgctcaaaacatcacagcccggattggcgagccactggtgctgaagtgtaagggggcccccaagaaaccaccccagcggctggaatggaaactgaacacaggccggacagaagcttggaaggtcctgtctccccagggaggaggcccctgggacagtgtggctcgtgtccttcccaacggctccctcttccttccggctgtcgggatccaggatgaggggattttccggtgccaggcaatgaacaggaatggaaaggagaccaagtccaactaccgaagtttgagaaccttcacaattacagcctctgactggatttttcctccttcagagattcctgggaagccagaaattgtagattctgcctctgaactcacggctggtgttcccaataaggtggggacatgtgtgtcagagggaagctaccctgcagggactcttagctggcacttggatgggaagcccctggtgcctaatgagaagggagtatctgtgaaggaacagaccaggagacaccctgagacagggctcttcacactgcagtcggagctaatggtgaccccagcccggggaggagatccccgtcccaccttctcctgtagcttcagcccaggccttccccgacaccgggccttgcgca

SEQ ID NO: 1431 - DNA, 1492 bp, Homo sapiens; identical to SEQ ID NO: 1420
  source 1..1492: mol_type = unassigned DNA

SEQ ID NO: 1432 - DNA, 1369 bp, Homo sapiens
  source 1..1369: mol_type = unassigned DNA
gccaggaccctggaaggaagcaggatggcagccggaacagcagttggagcctgggtgctggtcctcagtctgtggggggcagtagtaggtgctcaaaacatcacagcccggattggcgagccactggtgctgaagtgtaagggggcccccaagaaaccaccccagcggctggaatggaaactgaacacaggccggacagaagcttggaaggtcctgtctccccagggaggaggcccctgggacagtgtggctcgtgtccttcccaacagctccctcttccttccggctgtcgggatccaggatgaggggattttccggtgccaggcaatgaacaggaatggaaaggagaccaagtccaactaccgagtccgtgtctaccagattcctgggaagccagaaattgtagattctgcctctgaactcacggctggtgttcccaataaggtggggacatgtgtgtcagagggaagctaccctgcagggactcttagctggcacttggatgggaagcccctggtgcctaatgagaagggagtatctgtgaaggaacagaccaggagacaccctgagacagggctcttcacactgcagtcggagctaatggtgaccccagcccggggaggagatccccgtcccaccttctcctgtagcttcagcccaggccttccccgacaccgggccttgcgcacagcccccatccagccccgtgtctgggagcctgtgcctctggaggaggtccaattggtggtggagccagaaggtggagcagtagctcctggtggaaccgtaaccctgacctgtgaagtccctgcccagccctctcctcaaatccactggatgaaggatggtgtgcccttgccccttccccccagccctgtgctgatcctccctgagatagggcctcaggaccagggaacctacagctgtgtggccacccattccagccacgggccccaggaaagccgtgctgtcagcatcagcatcatcgaaccaggcgaggaggggccaactgcaggtgaggggtttgataaagtcagggaagcagaagatagcccccaacacatgtgactggggggatggtcaacaagaaaggaatggaaggccccagaaaaccaggaggaagaggaggagcgtgcagaactgaatcagtcggaggaacctgaggcaggcgagagtagtactggagggccttgaggggcccacagacagatcccatccatcagctcccttttctttttcccttgaactgttctggcctcagaccaactctctcctgtataatctctctcctgtataaccccaccttgccaagctttcttctacaaccagagccccccacaatgatgattaaacacctgacacatcttgc

SEQ ID NO: 1433 - DNA, 715 bp, Homo sapiens; identical to SEQ ID NO: 1416
  source 1..715: mol_type = unassigned DNA

SEQ ID NO: 1434 - DNA, 1369 bp, Homo sapiens; identical to SEQ ID NO: 1410
  source 1..1369: mol_type = unassigned DNA

SEQ ID NO: 1435 - DNA, 716 bp, Homo sapiens; identical to SEQ ID NO: 1414
  source 1..716: mol_type = unassigned DNA

SEQ ID NO: 1436 - DNA, 1492 bp, Homo sapiens; identical to SEQ ID NO: 1420
  source 1..1492: mol_type = unassigned DNA

SEQ ID NO: 1437 - DNA, 387 bp, Homo sapiens
  source 1..387: mol_type = unassigned DNA
atggctgccggaacagcagttggagcctgggtgctggtcctcagtctgtggggggcagtagtaggtgctcaaaacatcacagcccggattggcgagccactggtgctgaagtgtaagggggcccccaagaaaccaccccagcggctggaatggaaactgaacacaggccggacagaagcttggaaggtcctgtctccccagggaggaggcccctgggacagtgtggctcgtgtccttcccaacggctccctcttccttccggctgtcgggatccaggatgaggggattttccggtgccaggcaatgaacaggaatggaaaggagaccaagtccaactaccgagtccgtgtctaccagtttgagaaccttcacaattacagcctctga

SEQ ID NO: 1438 - DNA, 493 bp, Homo sapiens
  source 1..493: mol_type = unassigned DNA
aggaagcaggatggctgccggaacagcagttggagcctgggtgctggtcctcagtctgtggggggcagtagtaggtgctcaaaacatcacagcccggattggcgagccactggtgctgaagtgtaagggggcccccaagaaaccaccccagcggctggaatggaaactgaacacaggccggacagaagcttggaaggtcctgtctccccagggaggaggcccctgggacagtgtggctcgtgtccttcccaacggctccctcttccttccggctgtcgggatccaggatgaggggatcctgggaggcctggggacagccgccctgctcattggggtcatcttgtggcaaaggcggcaacgccgaggagaggagaggaaggccccagaaaaccaggaggaagaggaggagcgtgcagaactgaatcagtcggaggaacctgaggcaggcgagagtagtactggagggccttgaggggcccacagacagatccca

SEQ ID NO: 1439 - DNA, 1371 bp, Homo sapiens
  source 1..1371: mol_type = unassigned DNA
atggcagccggaacagcagttggagcctgggtgctggtcctcagtctgtggggtgagccactccctcaaccccactgaccctccctgcagaaagcactttaaccccacaccccagtcgtcctagaacttttcccagaacccgaggaagtgcctttcaaggtccctcacccaccctgtccaaattttgttagccctcattcccttcctacccctctaccatggtgctatctcccaggggcagtagtaggtgctcaaaacatcacagcccggattggcgagccactggtgctgaagtgtaagggggcccccaagaaaccaccccagcggctggaatggaaactgaacacaggccggacagaagcttggaaggtcctgtctccccagggaggaggcccctgggacagtgtggctcgtgtccttcccaacagctccctcttccttccggctgtcgggatccaggatgaggggattttccggtgccaggcaatgaacaggaatggaaaggagaccaagtccaactaccgagtccgtgtctaccagattcctgggaagccagaaattgtagattctgcctctgaactcacggctggtgttcccaataaggtggggacatgtgtgtcagagggaagctaccctgcagggactcttagctggcacttggatgggaagcccctggtgcctaatgagaagggagtatctgtgaaggaacagaccaggagacaccctgagacagggctcttcacactgcagtcggagctaatggtgaccccagcccggggaggagatccccgtcccaccttctcctgtagcttcagcccaggccttccccgacaccgggccttgcgcacagcccccatccagccccgtgtctgggagcctgtgcctctggaggaggtccaattggtggtggagccagaaggtggagcagtagctcctggtggaaccgtaaccctgacctgtgaagtccctgcccagccctctcctcaaatccactggatgaaggatggtgtgcccttgccccttccccccagccctgtgctgatcctccctgagatagggcctcaggaccagggaacctacagctgtgtggccacccattccagccacgggccccaggaaagccgtgctgtcagcatcagcatcatcggctctgtgggaggatcagggctgggaactctagccctggccctggggatcctgggaggcctggggacagccgccctgctcattggggtcatcttgtggcaaaggcggcaacgccgaggagaggagaggaaggccccagaaaaccaggaggaagaggaggagcgtgcagaactgaatcagtcggaggaacctgaggcaggcgagagtagtactggagggccttga

SEQ ID NO: 1440 - DNA, 1371 bp, Homo sapiens
  source 1..1371: mol_type = unassigned DNA
atggcagccggaacagcagttggagcctgggtgctggtcctcagtctgtggggtgagccactccctcaaccccactgaccctccctgcagaaagcactttaaccccacaccccagtcgtcctagaacttttcccagaacccgaggaagtgcctttcaaggtccctcacccaccctgtccaaattttgttagccctcattcccttcctacccctctaccatggtgctatctcccaggggcagtagtaggtgctcaaaacatcacagcccggattggcgagccactggtgctgaagtgtaagggggcccccaagaaaccaccccagcggctggaatggaaactgaacacaggccggacagaagcttggaaggtcctgtctccccagggaggaggcccctgggacagtgtggctcgtgtccttcccaacggctccctcttccttccggctgtcgggatccaggatgaggggattttccggtgccaggcaatgaacaggaatggaaaggagaccaagtccaactaccgagtccgtgtctaccagattcctgggaagccagaaattgtagattctgcctctgaactcacggctggtgttcccaataaggtggggacatgtgtgtcagagggaagctaccctgcagggactcttagctggcacttggatgggaagcccctggtgcctaatgagaagggagtatctgtgaaggaacagaccaggagacaccctgagacagggctcttcacactgcagtcggagctaatggtgaccccagcccggggaggagatccccgtcccaccttctcctgtagcttcagcccaggccttccccgacaccgggccttgcgcacagcccccatccagccccgtgtctgggagcctgtgcctctggaggaggtccaattggtggtggagccagaaggtggagcagtagctcctggtggaaccgtaaccctgacctgtgaagtccctgcccagccctctcctcaaatccactggatgaaggatggtgtgcccttgccccttccccccagccctgtgctgatcctccctgagatagggcctcaggaccagggaacctacagctgtgtggccacccattccagccacgggccccaggaaagccgtgctgtcagcatcagcatcatcggctctgtgggaggatcagggctgggaactctagccctggccctggggatcctgggaggcctggggacagccgccctgctcattggggtcatcttgtggcaaaggcggcaacgccgaggagaggagaggaaggccccagaaaaccaggaggaagaggaggagcgtgcagaactgaatcagtcggaggaacctgaggcaggcgagagtagtactggagggccttga

SEQ ID NO: 1441 - DNA, 864 bp, Homo sapiens
  source 1..864: mol_type = unassigned DNA
aggaagcaggatggcagccggaacagcagttggagcctgggtgctggtcctcagtctgtggggggcagtagtaggtgctcaaaacatcacagcccggattggcgagccactggtgctgaagtgtaagggggcccccaagaaaccaccccagcggctggaatggaaactgaacacaggccggacagaagcttggaaggtcctgtctccccagggaggaggcccctgggacagtgtggctcgtgtccttcccaacggctccctcttccttccggctgtcgggatccaggatgaggggattttccggtgccaggcaatgaacaggaatggaaaggagaccaagtccaattggtggtggagccagaaggtggagcagtagctcctggtggaaccgtaaccctgacctgtgaagtccctgcccagccctctcctcaaatccactggatgaaggatggtgtgcccttgccccttccccccagccctgtgctgatcctccctgagatagggcctcaggaccagggaacctacagctgtgtggccacccattccagccacgggccccaggaaagccgtgctgtcagcatcagcatcatcgaaccaggcgaggaggggccaactgcaggctctgtgggaggatcagggctgggaactctagccctggccctggggatcctgggaggcctggggacagccgccctgctcattggggtcatcttgtggcaaaggcggcaacgccgaggagaggagaggaaggccccagaaaaccaggaggaagaggaggagcgtgcagaactgaatcagtcggaggaacctgaggcaggcgagagtagtactggagggccttgaggggcccacagacagatccca

SEQ ID NO: 1442 - DNA, 1490 bp, Homo sapiens
  source 1..1490: mol_type = unassigned DNA
gactgaaagatgggggctggagagagggtgcaggccccacctagggcggaggccacagcagggagaggggcagacagagccaggaccctggaaggaagcaggatggcagccggaacagcagttggagcctgggtgctggtcctcagtctgtggggggcagtagtaggtgctcaaaacatcacagcccggattggcgagccactggtgctgaagtgtaagggggcccccaagaaaccaccccagcggctggaatggaaactgaacacaggccggacagaagcttggaaggtcctgtctccccagggaggaggcccctgggacagtgtggctcgtgtccttcccaacggctccctcttccttccggctgtcgggatccaggatgaggggattttccggtgccaggcaatgaacaggaatggaaaggagaccaagtccaactaccgagtccgtgtctaccagattcctgggaagccagaaattgtagattctgcctctgaactcacggctggtgttcccaataaggtggggacatgtgtgtcagagggaagctaccctgcagggactcttagctggcacttggatgggaagcccctggtgcctaatgagaagggagtatctgtgaaggaacagaccaggagacaccctgagacagggctcttcacactgcagtcggagctaatggtgaccccagcccggggaggagatccccgtcccaccttctcctgtagcttcagcccaggccttccccgacaccgggccttgcgcacagcccccatccagccccgtgtctgggagcctgtgcctctggaggaggtccaattggtggtggagccagaaggtggagcagtagctcctggtggaaccgtaaccctgacctgtgaagtccctgcccagccctctcctcaaatccactggatgaaggatggtgtgcccttgccccttccccccagccctgtgctgatcctccctgagatagggcctcaggaccagggaacctacagctgtgtggccacccattccagccacgggccccaggaaagccgtgctgtcagcatcagcatcatcgaaccaggcgaggaggggccaactgcaggctctgtgggaggatcagggctgggaactctagccctggccctggggatcctgggaggcctggggacagccgccctgctcattggggtcatcttgtggcaaaggcggcaacgccgaggagaggagaggaaggccccagaaaaccaggaggaagaggaggagcgtgcagaactgaatcagtcggaggaacctgaggcaggcgagagtagtactggagggccttgaggggcccacagacagatcccatccatcagctcccttttctttttcccttgaactgttctggcctcagaccaactctctcctgtataatctctctcctgtataaccccaccttgccaagctttcttctacaaccagagccccccacaatgatgattaaacacctgacacatctt

SEQ ID NO: 1443 - DNA, 1249 bp, Homo sapiens
  source 1..1249: mol_type = unassigned DNA
aggaagcaggatggcagccggaacagcagttggagcctgggtgctggtcctcagtctgtggggggcagtagtaggtgctcaaaacatcacagcccggattggcgagccactggtgctgaagtgtaagggggcccccaagaaaccaccccagcggctggaatggaaactgaacacaggccggacagaagcttggaaggtcctgtctccccagggaggaggcccctgggacagtgtggctcgtgtccttcccaacggctccctcttccttccggctgtcgggatccaggatgaggggattttccggtgccaggcaatgaacaggaatggaaaggagaccaagtccaactaccgagtccgtgtctaccagattcctgggaagccagaaattgtagattctgcctctgaactcacggctggtgttcccaataaggtagtggaagaaagcaggagaagtagaaaacggccctgtgaacaggaggtggggacatgtgtgtcagagggaagctaccctgcagggactcttagctggcacttggatgggaagcccctggtgcctaatgagaagggagtatctgtgaaggaacagaccaggagacaccctgagacagggctcttcacactgcagtcggagctaatggtgaccccagcccggggaggagatccccgtcccaccttctcctgtagcttcagcccaggccttccccgacaccgggccttgcgcacagcccccatccagccccgtgtctgggagcctgtgcctctggaggaggtccaattggtggtggagccagaaggtggagcagtagctcctggtggaaccgtaaccctgacctgtgaagtccctgcccagccctctcctcaaatccactggatgaaggatggtgtgcccttgccccttccccccagccctgtgctgatcctccctgagatagggcctcaggaccagggaacctacagctgtgtggccacccattccagccacgggccccaggaaagccgtgctgtcagcatcagcatcatcgaaccaggcgaggaggggccaactgcaggtgaggggtttgataaagtcagggaagcagaagatagcccccaacacatgtgactggggggatggtcaacaagaaaggaatggaaggccccagaaaaccaggaggaagaggaggagcgtgcagaactgaatcagtcggaggaacctgaggcaggcgagagtagtactggagggccttgaggggcccacagacagatccca

SEQ ID NO: 1444 - DNA, 665 bp, Homo sapiens
  source 1..665: mol_type = unassigned DNA
atggcagccggaacagcagttggagcctgggtgctggtcctcagtctgtggggggcagtagtaggtgctcaaaacatcacagcccaggccttccccgacaccgggccttgcgcacagcccccatccagccccgtgtctgggagcctgtgcctctggaggaggtccaattggtggtggagccagaaggtggagcagtagctcctggtggaaccgtaaccctgacctgtgaagtccctgcccagccctctcctcaaatccactggatgaaggatggtgtgcccttgccccttccccccagccctgtgctgatcctccctgagatagggcctcaggaccagggaacctacagctgtgtggccacccattccagccacgggccccaggaaagccgtgctgtcagcatcagcatcatcgaaccaggcgaggaggggccaactgcaggctctgtgggaggatcagggctgggaactctagccctggccctggggatcctgggaggcctggggacagccgccctgctcattggggtcatcttgtggcaaaggcggcaacgccgaggagaggagaggaaggccccagaaaaccaggaggaagaggaggagcgtgcagaactgaatcagtcggaggaacctgaggcaggcgagagtagtactggagggccttga

SEQ ID NO: 1445 - DNA, 387 bp, Homo sapiens
  source 1..387: mol_type = unassigned DNA
atggcagccggaacagcagttggagcctgggtgctggtcctcagtctgtggggggcagtagtaggtgctcaaaacatcacagcccggattggcgagccactggtgctgaagtgtaagggggcccccaagaaaccaccccagcggctggaatggaaactgaacacaggccggacagaagcttggaaggtcctgtctccccagggaggaggcccctgggacagtgtggctcgtgtccttcccaacagctccctcttccttccggctgtcgggatccaggatgaggggattttccggtgccaggcaatgaacaggaatggaaaggagaccaagtccaactaccgagtccgtgtctaccagtttgagaaccttcacaattacagcctctga

SEQ ID NO: 1446 - DNA, 493 bp, Homo sapiens
  source 1..493: mol_type = unassigned DNA
aggaagcaggatggcagccggaacagcagttggagcctgggtgctggtcctcagtctgtggggggcagtagtaggtgctcaaaacatcacagcccggattggcgagccactggtgctgaagtgtaagggggcccccaagaaaccaccccagcggctggaatggaaactgaacacaggccggacagaagcttggaaggtcctgtctccccagggaggaggcccctgggacagtgtggctcgtgtccttcccaacggctccctcttccttccggctgtcgggatccaggatgaggggatcctgggaggcctggggacagccgccctgctcattggggtcatcttgtggcaaaggcggcaacgccgaggagaggagaggaaggccccagaaaaccaggaggaagaggaggagcgtgcagaactgaatcagtcggaggaacctgaggcaggcgagagtagtactggagggccttgaggggcccacagacagatccca

SEQ ID NO: 1447 - DNA, 1490 bp, Homo sapiens; identical to SEQ ID NO: 1442
  source 1..1490: mol_type = unassigned DNA

SEQ ID NO: 1448 - DNA, 864 bp, Homo sapiens; identical to SEQ ID NO: 1441
  source 1..864: mol_type = unassigned DNA

SEQ ID NO: 1449 - DNA, 387 bp, Homo sapiens
  source 1..387: mol_type = unassigned DNA
atggcagccggaacagcagttggagcctgggtgctggtcctcagtctgtggggggcagtagtaggtgctcaaaacatcacagcccggattggcgagccactggtgctgaagtgtaagggggcccccaagaaaccaccccagcggctggaatggaaactgaacacaggccggacagaagcttggaaggtcctgtctccccagggaggaggcccctgggacagtgtggctcgtgtccttcccaacggctccctcttccttccggctgtcgggatccaggatgaggggattttccggtgccaggcaatgaacaggaatggaaaggagaccaagtccaactaccgagtccgtgtctaccagtttgagaaccttcacaattacagcctctga

SEQ ID NO: 1450 - DNA, 1371 bp, Homo sapiens; identical to SEQ ID NO: 1440
  source 1..1371: mol_type = unassigned DNA

SEQ ID NO: 1451 - DNA, 864 bp, Homo sapiens
  source 1..864: mol_type = unassigned DNA
aggaagcaggatggcagccggaacagcagttggagcctgggtgctggtcctcagtctgtggggggcagtagtaggtgctcaaaacatcacagcccggattggcgagccactggtgctgaagtgtaagggggcccccaagaaaccaccccagcggctggaatggaaactgaacacaggccggacagaagcttggaaggtcctgtctccccagggaggaggcccctgggacagtgtggctcgtgtccttcccaacagctccctcttccttccggctgtcgggatccaggatgaggggattttccggtgccaggcaatgaacaggaatggaaaggagaccaagtccaattggtggtggagccagaaggtggagcagtagctcctggtggaaccgtaaccctgacctgtgaagtccctgcccagccctctcctcaaatccactggatgaaggatggtgtgcccttgccccttccccccagccctgtgctgatcctccctgagatagggcctcaggaccagggaacctacagctgtgtggccacccattccagccacgggccccaggaaagccgtgctgtcagcatcagcatcatcgaaccaggcgaggaggggccaactgcaggctctgtgggaggatcagggctgggaactctagccctggccctggggatcctgggaggcctggggacagccgccctgctcattggggtcatcttgtggcaaaggcggcaacgccgaggagaggagaggaaggccccagaaaaccaggaggaagaggaggagcgtgcagaactgaatcagtcggaggaacctgaggcaggcgagagtagtactggagggccttgaggggcccacagacagatccca

SEQ ID NO: 1452 - DNA, 493 bp, Homo sapiens; identical to SEQ ID NO: 1446
  source 1..493: mol_type = unassigned DNA

SEQ ID NO: 1453 - DNA, 1490 bp, Homo sapiens; identical to SEQ ID NO: 1442
  source 1..1490: mol_type = unassigned DNA

SEQ ID NO: 1454 - DNA, 864 bp, Homo sapiens; identical to SEQ ID NO: 1441
  source 1..864: mol_type = unassigned DNA

SEQ ID NO: 1455 - DNA, 665 bp, Homo sapiens; identical to SEQ ID NO: 1444
  source 1..665: mol_type = unassigned DNA

SEQ ID NO: 1456 - DNA, 1371 bp, Homo sapiens; identical to SEQ ID NO: 1440
  source 1..1371: mol_type = unassigned DNA

SEQ ID NO: 1457 - DNA, 665 bp, Homo sapiens; identical to SEQ ID NO: 1444
  source 1..665: mol_type = unassigned DNA

SEQ ID NO: 1458 - DNA, 1249 bp, Homo sapiens; identical to SEQ ID NO: 1443
  source 1..1249: mol_type = unassigned DNA

SEQ ID NO: 1459 - DNA, 1490 bp, Homo sapiens
  source 1..1490: mol_type = unassigned DNA
gactgaaagatgggggctggagagagggtgcaggccccacctagggcggaggccacagcagggagaggggcagacagagccaggaccctggaaggaagcaggatggcagccggaacagcagttggagcctgggtgctggtcctcagtctgtggggggcagtagtaggtgctcaaaacatcacagcccggattggcgagccactggtgctgaagtgtaagggggcccccaagaaaccaccccagcggctggaatggaaactgaacacaggccggacagaagcttggaaggtcctgtctccccagggaggaggcccctgggacagtgtggctcgtgtccttcccaacagctccctcttccttccggctgtcgggatccaggatgaggggattttccggtgccaggcaatgaacaggaatggaaaggagaccaagtccaactaccgagtccgtgtctaccagattcctgggaagccagaaattgtagattctgcctctgaactcacggctggtgttcccaataaggtggggacatgtgtgtcagagggaagctaccctgcagggactcttagctggcacttggatgggaagcccctggtgcctaatgagaagggagtatctgtgaaggaacagaccaggagacaccctgagacagggctcttcacactgcagtcggagctaatggtgaccccagcccggggaggagatccccgtcccaccttctcctgtagcttcagcccaggccttccccgacaccgggccttgcgcacagcccccatccagccccgtgtctgggagcctgtgcctctggaggaggtccaattggtggtggagccagaaggtggagcagtagctcctggtggaaccgtaaccctgacctgtgaagtccctgcccagccctctcctcaaatccactggatgaaggatggtgtgcccttgccccttccccccagccctgtgctgatcctccctgagatagggcctcaggaccagggaacctacagctgtgtggccacccattccagccacgggccccaggaaagccgtgctgtcagcatcagcatcatcgaaccaggcgaggaggggccaactgcaggctctgtgggaggatcagggctgggaactctagccctggccctggggatcctgggaggcctggggacagccgccctgctcattggggtcatcttgtggcaaaggcggcaacgccgaggagaggagaggaaggccccagaaaaccaggaggaagaggaggagcgtgcagaactgaatcagtcggaggaacctgaggcaggcgagagtagtactggagggccttgaggggcccacagacagatcccatccatcagctcccttttctttttcccttgaactgttctggcctcagaccaactctctcctgtataatctctctcctgtataaccccaccttgccaagctttcttctacaaccagagccccccacaatgatgattaaacacctgacacatctt

SEQ ID NO: 1460 - DNA, 387 bp, Homo sapiens; identical to SEQ ID NO: 1449
  source 1..387: mol_type = unassigned DNA

SEQ ID NO: 1461 - DNA, 493 bp, Homo sapiens; identical to SEQ ID NO: 1446
  source 1..493: mol_type = unassigned DNA

SEQ ID NO: 1462 - DNA, 1249 bp, Homo sapiens; identical to SEQ ID NO: 1443
  source 1..1249: mol_type = unassigned DNA

SEQ ID NO: 1463 - DNA, 864 bp, Homo sapiens; identical to SEQ ID NO: 1441
  source 1..864: mol_type = unassigned DNA

SEQ ID NO: 1464 - DNA, 665 bp, Homo sapiens; identical to SEQ ID NO: 1444
  source 1..665: mol_type = unassigned DNA

SEQ ID NO: 1465 - DNA, 387 bp, Homo sapiens; identical to SEQ ID NO: 1449
  source 1..387: mol_type = unassigned DNA

SEQ ID NO: 1466 - DNA, 1249 bp, Homo sapiens; identical to SEQ ID NO: 1443
  source 1..1249: mol_type = unassigned DNA

SEQ ID NO: 1467 - DNA, 1490 bp, Homo sapiens; identical to SEQ ID NO: 1442
  source 1..1490: mol_type = unassigned DNA

SEQ ID NO: 1468 - DNA, 493 bp, Homo sapiens
  source 1..493: mol_type = unassigned DNA
aggaagcaggatggcagccggaacagcagttggagcctgggtgctggtcctcagtctgtggggggcagtagtaggtgctcaaaacatcacagcccggattggcgagccactggtgctgaagtgtaagggggcccccaagaaaccaccccagcggctggaatggaaactgaacacaggccggacagaagcttggaaggtcctgtctccccagggaggaggcccctgggacagtgtggctcgtgtccttcccaacagctccctcttccttccggctgtcgggatccaggatgaggggatcctgggaggcctggggacagccgccctgctcattggggtcatcttgtggcaaaggcggcaacgccgaggagaggagaggaaggccccagaaaaccaggaggaagaggaggagcgtgcagaactgaatcagtcggaggaacctgaggcaggcgagagtagtactggagggccttgaggggcccacagacagatccca

SEQ ID NO: 1469 - DNA, 665 bp, Homo sapiens; identical to SEQ ID NO: 1444
  source 1..665: mol_type = unassigned DNA

SEQ ID NO: 1470 - DNA, 1371 bp, Homo sapiens
  source 1..1371: mol_type = unassigned DNA
atggcagccggaacagcagttggagcctgggtgctggtcctcagtctgtggggtgagccactcccccaaccccactgaccctccctgcagaaagcactttaaccccacaccccagtcgtcctagaacttttcccagaacccgaggaagtgcctttcaaggtccctcacccaccctgtccaaattttgttagccctcattcccttcctacccctctaccatggtgctatctcccaggggcagtagtaggtgctcaaaacatcacagcccggattggcgagccactggtgctgaagtgtaagggggcccccaagaaaccaccccagcggctggaatggaaactgaacacaggccggacagaagcttggaaggtcctgtctccccagggaggaggcccctgggacagtgtggctcgtgtccttcccaacggctccctcttccttccggctgtcgggatccaggatgaggggattttccggtgccaggcaatgaacaggaatggaaaggagaccaagtccaactaccgagtccgtgtctaccagattcctgggaagccagaaattgtagattctgcctctgaactcacggctggtgttcccaataaggtggggacatgtgtgtcagagggaagctaccctgcagggactcttagctggcacttggatgggaagcccctggtgcctaatgagaagggagtatctgtgaaggaacagaccaggagacaccctgagacagggctcttcacactgcagtcggagctaatggtgaccccagcccggggaggagatccccgtcccaccttctcctgtagcttcagcccaggccttccccgacaccgggccttgcgcacagcccccatccagccccgtgtctgggagcctgtgcctctggaggaggtccaattggtggtggagccagaaggtggagcagtagctcctggtggaaccgtaaccctgacctgtgaagtccctgcccagccctctcctcaaatccactggatgaaggatggtgtgcccttgccccttccccccagccctgtgctgatcctccctgagatagggcctcaggaccagggaacctacagctgtgtggccacccattccagccacgggccccaggaaagccgtgctgtcagcatcagcatcatcggctctgtgggaggatcagggctgggaactctagccctggccctggggatcctgggaggcctggggacagccgccctgctcattggggtcatcttgtggcaaaggcggcaacgccgaggagaggagaggaaggccccagaaaaccaggaggaagaggaggagcgtgcagaactgaatcagtcggaggaacctgaggcaggcgagagtagtactggagggccttga

SEQ ID NO: 1471 - DNA, 1249 bp, Homo sapiens
  source 1..1249: mol_type = unassigned DNA
aggaagcaggatggcagccggaacagcagttggagcctgggtgctggtcctcagtctgtggggggcagtagtaggtgctcaaaacatcacagcccggattggcgagccactggtgctgaagtgtaagggggcccccaagaaaccaccccagcggctggaatggaaactgaacacaggccggacagaagcttggaaggtcctgtctccccagggaggaggcccctgggacagtgtggctcgtgtccttcccaacagctccctcttccttccggctgtcgggatccaggatgaggggattttccggtgccaggcaatgaacaggaatggaaaggagaccaagtccaactaccgagtccgtgtctaccagattcctgggaagccagaaattgtagattctgcctctgaactcacggctggtgttcccaataaggtagtggaagaaagcaggagaagtagaaaacggccctgtgaacaggaggtggggacatgtgtgtcagagggaagctaccctgcagggactcttagctggcacttggatgggaagcccctggtgcctaatgagaagggagtatctgtgaaggaacagaccaggagacaccctgagacagggctcttcacactgcagtcggagctaatggtgaccccagcccggggaggagatccccgtcccaccttctcctgtagcttcagcccaggccttccccgacaccgggccttgcgcacagcccccatccagccccgtgtctgggagcctgtgcctctggaggaggtccaattggtggtggagccagaaggtggagcagtagctcctggtggaaccgtaaccctgacctgtgaagtccctgcccagccctctcctcaaatccactggatgaaggatggtgtgcccttgccccttccccccagccctgtgctgatcctccctgagatagggcctcaggaccagggaacctacagctgtgtggccacccattccagccacgggccccaggaaagccgtgctgtcagcatcagcatcatcgaaccaggcgaggaggggccaactgcaggtgaggggtttgataaagtcagggaagcagaagatagcccccaacacatgtgactggggggatggtcaacaagaaaggaatggaaggccccagaaaaccaggaggaagaggaggagcgtgcagaactgaatcagtcggaggaacctgaggcaggcgagagtagtactggagggccttgaggggcccacagacagatccca

SEQ ID NO: 1472 - DNA, 493 bp, Homo sapiens; identical to SEQ ID NO: 1446
  source 1..493: mol_type = unassigned DNA

SEQ ID NO: 1473 - DNA, 387 bp, Homo sapiens; identical to SEQ ID NO: 1449
  source 1..387: mol_type = unassigned DNA

SEQ ID NO: 1474 - DNA, 2891 bp, Homo sapiens
  source 1..2891: mol_type = unassigned DNA
agagtgtgatcttgtacaagttattcagcctttgcaaacctcagattcacacaatgtaagatgaagaaactcaccttctgaaaattagagataacatatgcaaagtgaatcaatacagggcttaacatatttatcacccctttggtaaataaccatgacgattaccagagctcttaagggcaatggcaggtgggaagcagaactcatgggtggtaatccccaggccagccaggctcaccatgtgcacttggacaagtccttgcccccatcattgtgaaatggtgcagggatgcaccatgagggtgtggcaggatggctgacaacagactgggaagcagctcggcagaaaaactggattgatgcccactatggcaagagatatcatctcccctcttgttctgtgatgtttcagtcctggaaagacaagcatcatgcctctgaccagtgccttcagggctgtggacaacgaccctgggatcattgtctggagaatagagaaaatggagctggcgctggtgcctgtgagcgcccacggcaacttctatgagggggactgctacgtcatcctctcgacccggagagtggccagtctcctatcccaggacatccacttctggatcgggaaggactcctcccaggatgagcaaagctgcgcagccatatataccacacagctggacgactacctgggaggcagccctgtgcagcaccgagaggtccagtaccatgagtcagacactttccgtggctacttcaagcagggcatcatctacaagcaggggggtgtcgcctctgggatgaagcacgtggagaccaatacctacgacgtgaagcggctgctacatgtgaaagggaaaagaaacatcagggctaccgaggtggaaatgagctgggacagtttcaaccgaggtgatgtcttcttgctggaccttgggaaagtcatcatccaatggaatggcccagagagcaacagtggggagcgcctgaaggctatgcttctggcaaaggatattcgagacagggagcgagggggccgtgctaaaataggagtgatcgagggagacaaggaggcagccagcccagagctgatgaaggtccttcaggacacccttggccgacgctccattatcaagcctacagtccctgatgagatcatagatcagaagcagaaatcaactatcatgttgtatcatatctcagattcagctgggcagctggcagtcacagaggtagcaacaaggcctctggtccaggacttactgaaccatgatgactgctacatcctggaccaaagtggaaccaaaatctacgtgtggaaaggaaaaggagccacaaaggctgaaaaacaggcagccatgtctaaagcgctgggcttcatcaagatgaagagctaccccagcagcaccaatgtggagaccgtcaacgatggtgctgagtcggccatgttcaagcagctgttccagaagtggtcagtaaaggaccagaccatgggcctggggaaaacgttcagcattggtaaaattgctaaagttttccaggataaatttgatgtgactctgctacacaccaagccagaggtagctgcccaggaaagaatggtcgatgatggcaacggaaaagttgaggtctggagaattgagaacctggagctggtccctgtggagtatcaatggtatggcttcttttatgggggagactgttatctggtcctctacacatacgaggtaaatgggaagccacatcacatcttgtacatctggcagggccgccacgcctcacaggatgagctggcagcctcagcataccaggcagtggaggtggatcggcagtttgatggggctgctgtgcaggttcgagtcaggatgggaacggagccacgccacttcatggccatcttcaaagggaagctagttatctttgagggtgggacttccaggaagggaaatgccgagcctgaccctccagtaagactcttccaaattcatggaaatgacaaatctaacaccaaagcagtggaagttccagcctttgcctcctccctaaactccaatgatgtctttctgctgcgaactcaggcagagcactacctgtggtatggcaaggggtctagtggggatgagcgggcaatggctaaggagctggccagccttctctgtgatggcagcgagaacactgtggccgagggccaggagccagccgagttctgggacctactgggagggaaaactccctatgccaatgataaaagacttcagcaggaaatcctagatgtccagtctcgtctctttgaatgttccaataagaccggccaattcgttgtcactgagatcacagacttcacccaggatgacctgaaccctactgacgtgatgctcctagatacctgggaccaggtgttcttgtggattggggctgaggccaatgccacggagaaggagagtgcccttgccacagcacagcagtacctgcacactcaccccagcggccgagatcccgacacaccaatcctgatcattaagcaggggtttgagcctcccatcttcacaggctggttcctagcctgggaccctaacatttggagtgcaggaaaaacatatgaacaattaaaagaagagctgggagatgctgctgctatcatgcgaatcactgctgacatgaagaatgcaaccctctccctgaattctaatgacagtgagccaaaatattaccctatagcagttctgttgaaaaaccagaatcaggagctgcctgaggatgtaaaccctgccaaaaaggagaattacctctctgaacaggactttgtgtctgtgtttggcatcacaagagggcaatttgcagctctgcctggctggaaacagctccaaatgaagaaagaaaaggggcttttctaa

SEQ ID NO: 1475 - DNA, 2939 bp, Homo sapiens
  source 1..2939: mol_type = unassigned DNA
atgtcttccacggggcaccctggctcctacaaaatatggggagagaaaatggagctggcgctggtgcctgtgagcgcccacggcaacttctatgagggggactgctacgtcatcctctcgacccggagagtggccagtctcctatcccaggacatccacttctggatcgggaaggactcctcccaggatgagcaaagctgcgcagccatatataccacacagctggacgactacctgggaggcagccctgtgcagcaccgagaggtccagtaccatgagtcagacactttccgtggctacttcaagcagggcatcatctacaagcaggggggtgtcgcctctgggatgaagcacgtggagaccaatacctacgacgtgaagcggctgctacatgtgaaagggaaaagaaacatcagggctaccgaggtggaaatgagctgggacagtttcaaccgaggtgatgtcttcttgctggaccttgggaaagtcatcatccaatggaatggcccagagagcaacagtggggagcgcctgaaggctatgcttctggcaaaggatattcgagacagggagcgagggggccgtgctaaaataggagtgatcgagggagacaaggaggcagccagcccagagctgatgaaggtccttcaggacacccttggccgacgctccattatcaagcctacagtccctgatgagatcatagatcagaagcagaaatcaactatcatgttgtatcatatctcagattcagctgggcagctggcagtcacagaggtagcaacaaggcctctggtccaggacttactgaaccatgatgactgctacatcctggaccaaagtggaaccaaaatctacgtgtggaaaggaaaaggagccacaaaggctgaaaaacaggcagccatgtctaaagcgctgggcttcatcaagatgaagagctaccccagcagcaccaatgtggagaccgtcaacgatggtgctgagtcggccatgttcaagcagctgttccagaagtggtcagtaaaggaccagaccatgggcctggggaaaacgttcagcattggtaaaattgctaaagttttccaggataaatttgatgtgactctgctacacaccaagccagaggtagctgcccaggaaagaatggtcgatgatggcaacggaaaagttgaggtctggagaattgagaacctggagctggtccctgtggagtatcaatggtatggcttcttttatgggggagactgttatctggtcctctacacatacgaggtaaatgggaagccacatcacatcttgtacatctggcagggccgccacgcctcacaggatgagctggcagcctcagcataccaggcagtggaggtggatcggcagtttgatggggctgctgtgcaggttcgagtcaggatgggaacggagccacgccacttcatggccatcttcaaagggaagctagttatctttgagggtgggacttccaggaagggaaatgccgagcctgaccctccagtaagactcttccaaattcatggaaatgacaaatctaacaccaaagcagtggaagttccagcctttgcctcctccctaaactccaatgatgtctttctgctgcgaactcaggcagagcactacctgtggtatggcaaggggtctagtggggatgagcgggcaatggctaaggagctggccagccttctctgtgatggcagcgagaacactgtggccgagggccaggagccagccgagttctgggacctactgggagggaaaactccctatgccaatgataaaagacttcagcaggaaatcctagatgtccagtctcgtctctttgaatgttccaataagaccggccaattcgttgtcactgagatcacagacttcacccaggatgacctgaaccctactgacgtgatgctcctagatacctgggaccaggtgttcttgtggattggggctgaggccaatgccacggagaaggagagtgcccttgccacagcacagcagtacctgcacactcaccccagcggccgagatcccgacacaccaatcctgatcattaagcaggggtttgagcctcccatcttcacaggctggttcctagcctgggaccctaacatttggagtgcaggaaaaacatatgaacaattaaaagaagagctgggagatgctgctgctatcatgcgaatcactgctgacatgaagaatgcaaccctctccctgaattctaatgacagtgagccaaaatattaccctatagcagttctgttgaaaaaccagaatcaggagctgcctgaggatgtaaaccctgccaaaaaggagaattacctctctgaacaggactttgtgtctgtgtttggcatcacaagagggcaatttgcagctctgcctggctggaaacagctccaaatgaagaaagaaaaggggcttttctaaagcaagaaggcctatacctattgcaaggccacagaaaagagcagatagtgccaatatcaggaaataatttatccaccaatttctgcctgacattcagctacttaatttagatataatagagtctgcaaatcacggcatgttctccattttttctcatccttgcattccttgcttgttatatacctaaaatgttaaccatatagtttttgggttttgtggccctctagctaaagcctcagcagaaagcactaaaactgcataaatctggagaaatcaaaagaaagagaaccaaaaaacaatgcttaaaatgtttaataactttatgtttaatattataccaggacctacctttgttttcaattttaagatgattatttctaaaatctatttagcctgtaaatcattgaaatcatatatgcactccataggcaaaatccaaatacccagatctgtaatgtgtcaaagcatttttcacttttcaaataaagatacctataatg

SEQ ID NO: 1476 - DNA, 568 bp, Homo sapiens
  source 1..568: mol_type = unassigned DNA
gctttggagtggttcttcaatactgctgctgcttacgcgccgggaaactgggaaggctggtgagcgagaaggcaagtcctggaaagacaagcatcatgcctctgaccagtgccttcagggctgtggacaacgaccctgggatcattgtctggagaatagagaaaatggagctggcgctggtgcctgtgagcgcccacggcaacttctatgagggggactgctacgtcatcctctcgacccggagagtggccagtctcctatcccaggacatccacttctggatcgggaaggactcctcccaggatgagcaaagctgcgcagccatatataccacacagctggacgactacctgggaggcagccctgtgcagcaccgagaggtccagtaccatgagtcagacactttccgtggctacttcaagcagggcatcatctacaagcaggggggtgtcgcctctgggatgaagcacgtggagaccaatacctacgacgtgaagcggctgctacatgtgaaagggaaaagaaacatcagggctaccgaggtggaaatgagctgggacagtttcaa

SEQ ID NO: 1477 - DNA, 12280 bp, Homo sapiens
  source 1..12280: mol_type = unassigned DNA
agttttggttgtggcaacccagaggaaggttgcagtggcccatctatctatcccagatgtaagatatgcttcacccctctttcttgatccatgaagttcaaaaggaggcaccaagcatttccgtccttcttcaagatgaaggtaagccttcccagtgatccaagctgtgttgaagaaatcttgcgggaatcgcagcatctgaccccaggattcaccttacaaaagtggaatgacccaaccaccagagcttctacaaagtcagtgtctttcaaatcgatgcttgaggatgacctgaagctgagcagtgatgaagatgaccttgagcctgtgaagaccttgaccactcagtgcactgccactgagctctaccaggctgttgaaaaggcaaaacctaggaataatcctgtgaacccacccttggccactccccagcccccacctgcagtgcaagccagcgggggttctggcagctccagcgaatcggagagcagctctgagtcggattcagacactgaaagtagcaccactgacagcgaatctaatgaggcacctcgtgtggcaactccagagcctgagccaccctcaaccaacaagtggcaactggataaatggcttaacaaagtgacatcccagaacaagtcttttatttgtggccaaaatgaaacacccatggagactatttctctgcctcctccaatcatccaaccaatggaagtccagatgaaagtgaagacgaatgccagtcaggtcccagctgaacccaaagaaaggcctctcctcagtctcattagggagaaagcccgtccacggcccactcagaaaattccagaaacaaaggctttgaagcataagttgtcaacaactagtgagacagtgtctcaaaggacaattgggaaaaaacagcccaaaaaagttgagaagaacaccagcactgacgagtttacctggcccaaaccaaatattaccagcagcactcccaaagaaaaagaaagtgtggagcttcatgacccaccaagaggccgcaacaaagccactgcccacaaaccagcccctaggaaagaaccaagacctaacatccctttggctcccgagaagaagaagtacagagggcctggcaagattgtgccaaagtctcgggaattcattgaaacagattcatctacatctgactccaacacagatcaggaagagaccctgcaaatcaaagtcctgcctccgtgcattatttctggaggtaatactgccaaatccaaggaaatctgtggtgccagcctgaccctcagcaccttaatgagtagcagtggcagcaacaacaacttatccatcagtaatgaagagccaacattttcacctattcctgtcatgcaaactgaaatcctgtcccctctgcgagatcatgagaacctgaaaaacctctgggtgaagattgaccttgacttactctctagagtacctggccacagctcactccatgcagcacctgccaagccagaccacaaggagactgccacaaaacccaagcgtcagacagctgtcacagctgtggagaaaccagcccctaagggcaaacgtaagcacaagccaatagaagttgcagagaagatccctgagaagaagcagcgcctggaggaggccacaactatctgcttgctccctccttgcatctcaccagccccaccccacaagcctcccaacactagagaaaataattcatccaggagagcaaatagaagaaaggaagaaaaactatttcctcctccactttccccactgccagaggaccctccacgccgcagaaatgtcagtggcaataatggtccctttggtcaagacaaaaacatcgccatgactggacaaatcacatctaccaaacctaagagaactgaaggcaaattctgtgctactttcaaagggatatcggtaaatgagggagacactccaaaaaaggcatcctctgccaccatcactgtcaccaatactgctattgccactgctactgtcactgctactgccattgtcaccaccactgtcacagctactgccaccgccacggccaccaccacaactactaccactaccatttccaccatcacctctaccatcactactggcctcatggatagcagtcacctggagatgacgtcctgggcggctctgccccttctatccagcagcagcactaatgtccggagacccaagctcacttttgatgactcggttcacaatgctgattattacatgcaagaagctaagaagctgaagcacaaagctgatgcactgttcgagaaatttggcaaagctgtgaattatgctgatgccgccctctccttcactgaatgtggcaatgccatggaacgcgaccctctggaagcaaagtccccatacaccatgtactctgagactgtggagctcctcaggtatgcaatgaggctgaagaactttgcaagtcccttggcttcggatggggacaaaaagctagcagtactatgctaccgatgtttatcactcctctatttgagaatgtttaagctgaagaaggaccatgctatgaagtactccagatcactgatggaatattttaagcaaaatgcttcaaaagtcgcacagataccctctccatgggtaagcaatggaaagaacactccatccccagtgtctctcaacaacgtctcccccatcaacgcaatggggaactgtaacaatggcccagtcaccattccccagcgcattcaccacatggctgccagccacgtcaacatcactagcaatgtgttacggggctatgaacactgggatatggccgacaaactgacaagagaaaacaaagaattctttggtgatctggacacgctgatggggcctctgacccagcacagcagcatgaccaatcttgtccgctacgttcgccaaggactgtgttggctgcgcatcgatgcccacttgttgtagtgggtgttctcagatctctagcatcacgacccatcactctacctctaccagcgcactgatggtcactggtggaactccactcactggggaacgttctctttggttatgtttgtttttatgcttcttttgttatctgtaaaaaacagaagtcattgtaagttgacactacaacttaagggcagtgtacgttttattacttagtcattttttttcttttagcatttgatatgcatttctcagattccaccatctttttgtgctttatggaatgacagtccctacaatattgttttaagcccacactacccaaaacaaagaatgggaagcacttgtgataaagacaggctcctgagaaatgcaacaagtggtcttacatatacatgagaacttagacacaagggaccatcccccaaactctactcttatacccagaaaagaacatatttcagaatctgtcaaacttttgtgtatcccacagattcaatcttcaggtgagaattttcattgtcaaaacccactggttagatgttgtagcaacatcataaaatcaagagtatcaagaaaataaatgagcatagcaatgctactcttaaaaagatgctatgccacacaaccagaggactttcttgttagcatccctttcctgattccctattttgttaattttaatgataagaagaaagggtgacatttattttgacaagttttaggcatcagctggcatcagtgtttttcaactccattatttgaagtgtaaatcctcacctggggttctctgtgtgcaaagctgtccttttgaagaacagtttggttgatgcatgccttagtagccaaaatgctacactctagacttacaagtgggagttaagagaggtctggaaagtgtccaacaaggaattcacacctctgcctcctttgcaacaacaacatttacacagttggtaagtgggtccataactggcaggatttttaaattgtattttgctcaaatctatgggaacaaaagtcaaggtatcactacctagaagtaatgatatacagttttcttcctagtggcttgaaaatctggacttcctcaattattattcacattttctctcttataggttttctgttttctactttcttttttctcttatctgtgtttccctttcctttgtttggctcattaacttttgactgaattacaattactccttttattaaagtccatattattgtgaatcatttccatgaaaatttctaagaaaactccaaactctctaaatagtagctaacttttatttttttaaaatgagtcgtggggtagtgcttcaccttgagatgctttgaaagagccctaaacattgggaaccattcacctaatttggagacatttctcactggttgtgactacccccttatgatccttcacattcattttatgtccctaaacatcacaatgtaaatatcatttttgatgttccagctcaccagaagattcttacacttggggtaaacactatccatgcattacttactggtaattacctgctggtatataattccatgtagcctttaatatgctgggttatcaaattctgttcactgagttatgaccagataaataatagatatgcacatgaaagatgcaaacttgtgtgattattaaagccagccatgcaggtccatgatagaaacagcaggtgatgactctgcactctcattgtcaaggttagatatatccccagttgcaaaacagccagacttgagctgtgctctggtcatctttgagtttaaggccttttgttgtataaggctgtggaagttgtactccaatggctgaagccatgttgttaatatggctgatgggagcatccctgcagctgaacccagcactttttatgctcccactgtggttgagctttatgtttacagtctcagcaacaacacttatgcatccaaacactcacaaatgaaacctgaaagaatcttttctgagcctcttaaaagaggaaaatgatgataacattaaagactctgaacacccaaggttggtgtcacatataaaaattaagctgatgactttgcagtgactcaagttgtctctttatcatggtttaccaggtagagtgcctggctattactatataatgaagcccactggcttgacttgtaagttcaacctaaaccacaatcctagaccatcatggatttaggagtagattcttcttgaaatcccacatccagaaactagacattagaatgttgaggcagtttcccagagaaacaagcatattgcctcatggatgaaagacttgtagttctagtttcagtgacttgttatatctacttacatacaacagggaggcaagaggattctctgtcatctctggtgactgagtgtaaaatatgtgccaagtctgcagcacagtgaccaaatctgacaatcgagctctggatcaccacttgattatgtagtagactcatttataaagcagcttaggaactaattaaacatggaggatgaattaccttcctatcccttgagataagacatctttcagtttcatgattaaggattgttgctgttttatagttactctgttcatcacagtgtaaatggtgatgcgtgtcgtaggtgtgcagctatttgagggactaagggatggagatattctgtcaaatgaatctcttcagtataccagtttgtgggagggatatgagacatgtggatggcagtgagagatcgtgcctctagatcttgatggaggcttggtgagacacacttaaataagcacgtggaggttagaatagagggcagagtaaaaggaagctccatctgagcaagtacaccaaatgatctcagccctgcaacttgacccaggtagggccaccactacgccttcacttgtcacccaagctccaaccacagagagtttgacaagtttgtgttatgatgttggcttggctttgtatttttaattaactttggatttttagtggttttgtcatataactgtctgagtttggtaggtaggattactttgaaaagggtttactagtgtggtcctccgggtagaatttagctgtaagcatgttgttagccagcctgtagactgttaattacttaataatctcattgggaaaatactagtagttttatatttggatgacataattggaaaagcagattagctgctactacttttaaaagacttaaggtcgggatgcctttttttccatgtaaggaaatgaaaagaccaaaatcttcaggcaaaaagcaagttgcaaaattagaaaccattggctaaaaatgtgttttgttgagtttccaaatggatgaattttcatttggacattacatcactaaattcattagattttgtctgcattggaaagatactcttctagcatatctttcccaaagatatctaatttggattctgtttcatgcaaatttgcatcccggaggttgaagttggagtttgaggttggaaaatatctttgaaggcagaatcagttgagttgtgagggtgaagcctcacatacttctcaacagacatgataaaattcacctgcatgagttggcaggtgggagaaccaaactggatcactgggtaagactactcagtaaagcaatgaactgcttgcttagagaagcatcactatccccattgagaaaaatgtgtggcaagatgatacagctacacagtatcaaatgaatgggtcaattcagcacccccaaatttaattctgtggggaaaaattattgagccagttgtcagtgttctgttacatgactggcagactaaattcttcatcgttgttgttattgttgttgttgtttctcattttcactcgcacggccttattctcataattaaaatctaattcattttctctttagtgttagtagactccaacaacagaagtggcatctgtgtattcataatcagcatttaccctggcaggagactaatcagataggccggtctcagacattaatcctaccatctgatatttttggtgaaggaaaaagtattaattctctttccatcctcctcctcagaaatatagaagccctctttaccaaaatcatcacattttactctgtaatctaccagctaaaagaaaattgcattgtggggagggcagaaagggggtgggggtgggggcgggggggtggggggtggggaagccccacaaagccagattgcagttcttgcccctttttgcgtctgacatgagatgttaaagaattattcatagtgctcacattgggttaggggacactgaactgctttttagatccatgatcagtcatcattcttctaagagattggagctttgctgtttcattaactgtgcagtgtagactaatggtgtttaataaaaatcattcaaaatttcaaactcttttgccagtgacctcaattttgttggctctgtgatttgtatcagactttgaggagggaagggggaagtgaaggaagcctacgtccaggcccctgacaggatgctgcagtagcaagctcaagctcgcctgcctgccagcagttgctggtgagcagcagcatgcagaccagctgtgggaagcctcctgaagaatgccccagctgatgctttcagctgggaatagtttgttcctattggggaactcattgttctccagtctctgcagcaggaagccagctgtcatattcggagggaatttcagatgctttacctttttggttttgtcctgcatcactcatgtggctacgaaagtgtctctgagaatagagcccaatgtggtgacaatgggtagtcaaatgcaccccagatgctcaagccctgttgtggttctgcagtgtttatgaaattgggaggaaggagaccctggacagtaagcaaaattggagacactccaacgaggctaagttaatgccgtgttgcccagaacaagatctagcttctcatttggtcagcctagcatgcaaccagtggtgtgctggtaaaatgtttaacaaccagctcgctgagaatagaaagcacctggtttgcaccatttgccaatttccatggcataaatactaccactttagatgattttaagctaccaactgtgatgtcactgaacacatggttggaaagagatgcacgcagttggctcttgcaagcctgggcaaaaatgcttcaacacgccactggatgcagccagtcagagggttcatatttaatatatgtgttcatgtggacacacacagacacacacacacaaactcacccttacacacacacttcgatgactaaaacaattacatagttttaagatatgaatcaatgtgtgaatgtagaaagcttatgataaggccctagaggtatgggttgccctggaagcctaggttttaagcaggagaatagctgagaagaatgaagccctcctgagctgaaaggagagatggatcaatggagatggttccatcatctccttccatatctcacaggtaaaatgggcactcagaaaaccctcacgattgattttttaaaaagataagtgagtgttttttattttattattattgtcatcattattttgatttacaaatgctatttgtaacttttacatgtaactaggataaagtatttacgggaactctatggagaatagcacaatccagaatttactgtgtttttcttttatgtgacgtggaaactcagtaattctcccaccttcacattgttgttcataagaattttactttagttattagggaatctaagttttttgttaacatttgtttttagttaaaagtatctacttactgttttagctctgaactcaaaccagaatatctctgtatcaattgcatgactattcagaaacaataatccaaaccaaaataattctttttccacccagtacgaagaaaactaagctcagtaacaagaaggcataaactaaagtatataatgaggctttcattaaatacacacacacacacactcacacacacacacatacactttttaaatttttaaattaggcctccacacataaatcattttgaaagtagaatagaaaatctcaaagaattcattctcctggtcctgtgcatcttctgcagttaataagaggtttgtatctggaaagatggaagaacttgttctaaaatcttatttttcaaaaaaaaatttccattttctctctgggcctgtatccatggttgaatgttagccctggaggagatccatgtcttactcgctctttctggcccttctgtcttttgcctctgcaattctttttgtagctggcacgatagcagggactgggggtctatcctttcatggtattgctacaatatttgtccttactggaaaatggtaacatccgggtctgatttaattggcattacacttacacagggactctgagcacccccgtcaccacaccagacagtggaccagttttcacagctacaaagagctagaaatgtgtttaacatcatccagtgcatcccctaattcaaaaccatcctcactaatcaatcatattcacccataaatattacaaatgagattgattccatctcaagacaatttgtcaaatacttaattttcttcctggatgattctacttactggatattttagaaagagaaatgtctgagataaaatccctcacatttactcaatataacaaattactgtttctactcctattctgagtagtgcttctgaagattgtttgctgtagtgttgtctttgataaaatgaatgtcagtagtgagccttttagagataccatgctcagaaatcctctttgggatcagaagatacctaaaattctccccttttgcccacttggttagatgagtgatatattctttggatcctgcaaagaagagattggtttattttcttttctggtggtggtagtggttgtatctgtggctgtgatggttgttgttacttgtctctctctctctctggctctggcttttgctttcctgctagtgttctttctctttccaaacaaatagttaaattaaatgtgagcttctgaattgtacttgttcatactttcaaaacataacagattaataaaaatagatgtgtcctgatttaaaacatgccccctggaaaggcatgctgtattatgaaatcgtgataatataactgcattattacatggcagtataaatattagtctgttgaattcatttgtccaattgtataactttgtggagcagtgttttgacctttgatacataattctggagcaagtggagtggttgcaggcagatgagacagtgttatatcaggatttttcaatcaactttagttggaggcctggcaattacaaacatcttcagatgtttctgtaaccattataaatatgaaaaaaacctcttcaaaaaatttcccatagtacttcagtcaagactttttaggtttatcttttttttttcatttctccttttccttttccattatttttcgatgggggggttgttatcattgactgaagaaatattttgattgcaatggtctctctctctctccccctctctctctctctcctctattctttcctccttccctctgtccatcacccctcattaaaatattgaaatctggagtctttgataaatctgcattagaccaggctatatgctaggaatgaaatctgggcaaatatcgatgggttttcaaagaatgctccatgttcattgggccctttcacaccccacagtgataaatgaaaaggatagaggtagttttttcaaaagagcactttaataatatcctctgagacctaatgcagtttaacaaatgactccacctatttttccagtaggtaaattgactgagacttgcaaaatacccctgagagttgtcaggggtgtcttctgcctggtctatagcgtgtgtgtttgctttgtatctaacaggcacattcacgtctcgtgtactcatatgaagtatttcctaacattcccattagcctgtatataagaatcagaaagataatcccaacatgttgtaaatgaagatgtgactctataacctttctcttcttcctggaaaaaaaaggacattttcatgcatattttaaacagaaattttgtatatttaagtgtcatagaaaatatttattgagtaactgggacacaaatgggaatttaattgtcatcatatgctttgtgtgtggggatgcttaccaacaccatgtcgctggaccattgtggcaagccataactgcacaaagagtacacatcgtcagtgtgtgtgtgtgtgtgtgtgtgcgcgcacacacgtgcgtgtgtgtgtccctgcatgtgcaacatgtctagcttgctgtccttcatgggattttagctttcccttcttgaaaaacattattttacagttccaggaggccctggttacattactatatgaaggcagtgatttgaaatgaaaattcctttcctcttggaagctttggtcataatatcatggttcaattaaacggattccaccggactttgtgatgaaaaaggctctgttaaaatccaattgagtttccaagaggaaattgtagtaggtcaagatgcatgagagggaagatggaggccacctcaactggagaacatgagctgagttgagccctcagtgttgaagttgacttgctccaagctgcagtctaaaaccctggggcccgtgcctggcctatgctccctcccaagtaagtagaggagcagaaccatcaggaacagcctgcctggctcctatgaagaaaacttcctgacgtcctgtccccaaaggaagaccctttccccaagggcaccccaggtggccattaaattgtgatgatcattcagaaagtgcccccttggctttatgagaatccaattagtcttctgaaccaccttttcttgggtgcagatttccaacattcatgctcattgcagatccaccaactgtcactgttcttaacaagcatgctcgtcttgtcagaatttcagtaagttccaatttcctgtacagaccagggtaaactgttctaaaatcaatcaattaatgaaatgttatctggtttttaaaagctggtttcatgtgctttatgtgtataaaactatatctgcctgtgtggctttgcatttcaaatgtgtggcgcacaagcgttttgttggtgctttgttctcagtacagtaactctgtgtacaaacattttaatgtggttttgttgttttccaacaagatgtctctgtaaaaatgatattggctgagctggtgcgttggtttctctcatagaggcattaactatactgccaatgcattgaattatttaaaaatgcaaaataaaatttttatgaaaatctca

SEQ ID NO: 1478 - DNA, 7319 bp, Homo sapiens
  source 1..7319: mol_type = unassigned DNA
gccgctgcctctgccccggccgcccccgccgccgctgccgccgccggcccgcagccagccaggcgggcggcccagcccgcctgagcccgcagcggctgccgccgcagcgtcgggtcgctgggtgcgcgggctaccgcggaccgagcggacccgagtgggcgaccaggcgcttgcccgcccagtgccactgccgccgcttcctcgccggagcacaggaccagacacctccagcgcccgctgctgctgccgatgcggcccggacacttttagctgggcgggagggctggagagccgggggccgccgagaaccgccagcgagctgtgccgagagccgcgccgacccgctgcgatcagggacaggcgcccgcccgccgccgccgcctggccgctatggatctattcgactttttcagagactgggacttggagcagcagtgtcactatgaacaagaccgtagtgcacttaaaaaaagggaatgggagcggaggaatcaagaagtccagcaagaagacgatctcttttcttcaggctttgatctttttggggagccatacaagacaaacaaaggtgatgcacttgccaaccgagtccagaacacgcttggaaactatgatgaaatgaagaatttgctaactaaccattctaatcagaatcacctagtgggaattccaaagaattctgtgccccagaatcccaacaacaaaaatgaaccaagcttttttccagaacaaaagaacagaataattccacctcaccaggataatacccatccttcagcaccaatgcctccaccttctgttgtgatactgaattcaactctaatacacagcaacagaaaatcaaaacctgagtggtcacgtgatagtcataaccctagcactgtactggcaagccaggccagtggtcagccaaacaagatgcagactttgacacaggaccagtctcaagccaaactggaagacttctttgtctacccagctgaacagccccagattggagaagttgaagagtcaaacccatctgcaaaggaagacagtaaccctaattctagtggagaagatgctttcaaagaaatctttcaatccaattcaccggaagaatctgaattcgccgtgcaagcgcctgggtctcccctagtggcttcctctttattagctcctagcagtggcctttcagttcaaaacttcccaccagggctttactgcaaaacaagcatggggcagcaaaagccaactgcatacgtcagacccatggatggccaggaccaggcaccggacatctcaccaacactgaaaccttcaattgaatttgagaacagctttgggaatctgtcatttggaacactcttggatggaaaacccagtgcagccagttcaaagactaaactgccaaagttcaccatcctccaaacaagtgaagtaagccttcccagtgatccaagctgtgttgaagaaatcttgcgggaatcgcagcatctgaccccaggattcaccttacaaaagtggaatgacccaaccaccagagcttctacaaagtcagtgtctttcaaatcgatgcttgaggatgacctgaagctgagcagtgatgaagatgaccttgagcctgtgaagaccttgaccactcagtgcactgccactgagctctaccaggctgttgaaaaggcaaaacctaggaataatcctgtgaacccacccttggccactccccagcccccacctgcagtgcaagccagcgggggttctggcagctccagcgaatcggagagcagctctgagtcggattcagacactgaaagtagcaccactgacagcgaatctaatgaggcacctcgtgtggcaactccagagcctgagccaccctcaaccaacaagtggcaactggataaatggcttaacaaagtgacatcccagaacaagtcttttatttgtggccaaaatgaaacacccatggagactatttctctgcctcctccaatcatccaaccaatggaagtccagatgaaagtgaagacgaatgccagtcaggtcccagctgaacccaaagaaaggcctctcctcagtctcattagggagaaagcccgtccacggcccactcagaaaattccagaaacaaaggctttgaagcataagttgtcaacaactagtgagacagtgtctcaaaggacaattgggaaaaaacagcccaaaaaagttgagaagaacaccagcactgacgagtttacctggcccaaaccaaatattaccagcagcactcccaaagaaaaagaaagtgtggagcttcatgacccaccaagaggccgcaacaaagccactgcccacaaaccagcccctaggaaagaaccaagacctaacatccctttggctcccgagaagaagaagtacagagggcctggcaagattgtgccaaagtctcgggaattcattgaaacagattcatctacatctgactccaacacagatcaggaagagaccctgcaaatcaaagtcctgcctccgtgcattatttctggaggtaatactgccaaatccaaggaaatctgtggtgccagcctgaccctcagcaccttaatgagtagcagtggcagcaacaacaacttatccatcagtaatgaagagccaacattttcacctattcctgtcatgcaaactgaaatcctgtcccctctgcgagatcatgagaacctgaaaaacctctgggtgaagattgaccttgacttactctctagagtacctggccacagctcactccatgcagcacctgccaagccagaccacaaggagactgccacaaaacccaagcgtcagacagctgtcacagctgtggagaaaccagcccctaagggcaaacgtaagcacaagccaatagaagttgcagagaagatccctgagaagaagcagcgcctggaggaggccacaactatctgcttgctccctccttgcatctcaccagccccaccccacaagcctcccaacactagagaaaataattcatccaggagagcaaatagaagaaaggaagaaaaactatttcctcctccactttccccactgccagaggaccctccacgccgcagaaatgtcagtggcaataatggtccctttggtcaagacaaaaacatcgccatgactggacaaatcacatctaccaaacctaagagaactgaaggcaaattctgtgctactttcaaagggatatcggtaaatgagggagacactccaaaaaaggcatcctctgccaccatcactgtcaccaatactgctattgccactgctactgtcactgctactgccattgtcaccaccactgtcacagctactgccaccgccacggccaccaccacaactactaccactaccatttccaccatcacctctaccatcactactggcctcatggatagcagtcacctggagatgacgtcctgggcggctctgccccttctatccagcagcagcactaatgtccggagacccaagctcacttttgatgactcggttcacaatgctgattattacatgcaagaagctaagaagctgaagcacaaagctgatgcactgttcgagaaatttggcaaagctgtgaattatgctgatgccgccctctccttcactgaatgtggcaatgccatggaacgcgaccctctggaagcaaagtccccatacaccatgtactctgagactgtggagctcctcaggtatgcaatgaggctgaagaactttgcaagtcccttggcttcggatggggacaaaaagctagcagtactatgctaccgatgtttatcactcctctatttgagaatgtttaagctgaagaaggaccatgctatgaagtactccagatcactgatggaatattttaagcaaaatgcttcaaaagtcgcacagataccctctccatgggtaagcaatggaaagaacactccatccccagtgtctctcaacaacgtctcccccatcaacgcaatggggaactgtaacaatggcccagtcaccattccccagcgcattcaccacatggctgccagccacgtcaacatcactagcaatgtgttacggggctatgaacactgggatatggccgacaaactgacaagagaaaacaaagaattctttggtgatctggacacgctgatggggcctctgacccagcacagcagcatgaccaatcttgtccgctacgttcgccaaggactgtgttggctgcgcatcgatgcccacttgttgtagtgggtgttctcagatctctagcatcacgacccatcactctacctctaccagcgcactgatggtcactggtggaactccactcactggggaacgttctctttggttatgtttgtttttatgcttcttttgttatctgtaaaaaacagaagtcattgtaagttgacactacaacttaagggcagtgtacgttttattacttagtcattttttttcttttagcatttgatatgcatttctcagattccaccatctttttgtgctttatggaatgacagtccctacaatattgttttaagcccacactacccaaaacaaagaatgggaagcacttgtgataaagacaggctcctgagaaatgcaacaagtggtcttacatatacatgagaacttagacacaagggaccatcccccaaactctactcttatacccagaaaagaacatatttcagaatctgtcaaacttttgtgtatcccacagattcaatcttcaggtgagaattttcattgtcaaaacccactggttagatgttgtagcaacatcataaaatcaagagtatcaagaaaataaatgagcatagcaatgctactcttaaaaagatgctatgccacacaaccagaggactttcttgttagcatccctttcctgattccctattttgttaattttaatgataagaagaaagggtgacatttattttgacaagttttaggcatcagctggcatcagtgtttttcaactccattatttgaagtgtaaatcctcacctggggttctctgtgtgcaaagctgtccttttgaagaacagtttggttgatgcatgccttagtagccaaaatgctacactctagacttacaagtgggagttaagagaggtctggaaagtgtccaacaaggaattcacacctctgcctcctttgcaacaacaacatttacacagttggtaagtgggtccataactggcaggatttttaaattgtattttgctcaaatctatgggaacaaaagtcaaggtatcactacctagaagtaatgatatacagttttcttcctagtggcttgaaaatctggacttcctcaattattattcacattttctctcttataggttttctgttttctactttcttttttctcttatctgtgtttccctttcctttgtttggctcattaacttttgactgaattacaattactccttttattaaagtccatattattgtgaatcatttccatgaaaatttctaagaaaactccaaactctctaaatagtagctaacttttatttttttaaaatgagtcgtggggtagtgcttcaccttgagatgctttgaaagagccctaaacattgggaaccattcacctaatttggagacatttctcactggttgtgactacccccttatgatccttcacattcattttatgtccctaaacatcacaatgtaaatatcatttttgatgttccagctcaccagaagattcttacacttggggtaaacactatccatgcattacttactggtaattacctgctggtatataattccatgtagcctttaatatgctgggttatcaaattctgttcactgagttatgaccagataaataatagatatgcacatgaaagatgcaaacttgtgtgattattaaagccagccatgcaggtccatgatagaaacagcaggtgatgactctgcactctcattgtcaaggttagatatatccccagttgcaaaacagccagacttgagctgtgctctggtcatctttgagtttaaggccttttgttgtataaggctgtggaagttgtactccaatggctgaagccatgttgttaatatggctgatgggagcatccctgcagctgaacccagcactttttatgctcccactgtggttgagctttatgtttacagtctcagcaacaacacttatgcatccaaacactcacaaatgaaacctgaaagaatcttttctgagcctcttaaaagaggaaaatgatgataacattaaagactctgaacacccaaggttggtgtcacatataaaaattaagctgatgactttgcagtgactcaagttgtctctttatcatggtttaccaggtagagtgcctggctattactatataatgaagcccactggcttgacttgtaagttcaacctaaaccacaatcctagaccatcatggatttaggagtagattcttcttgaaatcccacatccagaaactagacattagaatgttgaggcagtttcccagagaaacaagcatattgcctcatggatgaaagacttgtagttctagtttcagtgacttgttatatctacttacatacaacagggaggcaagaggattctctgtcatctctggtgactgagtgtaaaatatgtgccaagtctgcagcacagtgaccaaatctgacaatcgagctctggatcaccacttgattatgtagtagactcatttataaagcagcttaggaactaattaaacatggaggatgaattaccttcctatcccttgagataagacatctttcagtttcatgattaaggattgttgctgttttatagttactctgttcatcacagtgtaaatggtgatgcgtgtcgtaggtgtgcagctatttgagggactaagggatggagatattctgtcaaatgaatctcttcagtataccagtttgtgggagggatatgagacatgtggatggcagtgagagatcgtgcctctagatcttgatggaggcttggtgagacacacttaaataagcacgtggaggttagaatagagggcagagtaaaaggaagctccatctgagcaagtacaccaaatgatctcagccctgcaacttgacccaggtagggccaccactacgccttcacttgtcacccaagctccaaccacagagagtttgacaagtttgtgttatgatgttggcttggctttgtatttttaattaactttggatttttagtggttttgtcatataactgtctgagtttggtaggtaggattactttgaaaagggtttactagtgtggtcctccgggtagaatttagctgtaagcatgttgttagccagcc

SEQ ID NO: 1479 - DNA, 13641 bp, Homo sapiens
  source 1..13641: mol_type = unassigned DNA
cgccgcctgtgcagccgctgccgccgccgccgccgccgccgccgccgccgccgccgccgccgccgctgccgccccggctgccgcgccgcgccgctgcctctgccccggccgcccccgccgccgctgccgccgccggcccgcagccagccaggcgggcggcccagcccgcctgagcccgcagcggctgccgccgcagcgtcgggtcgctgggtgcgcgggctaccgcggaccgagcggacccgagtgggcgaccaggcgcttgcccgcccagtgccactgccgccgcttcctcgccggagcacaggaccagacacctccagcgcccgctgctgctgccgatgcggcccggacacttttagctgggcgggagggctggagagccgggggccgccgagaaccgccagcgagctgtgccgagagccgcgccgacccgctgcgatcagggacaggcgcccgcccgccgccgccgcctggccgctatggatctattcgactttttcagagactgggacttggagcagcagtgtcactatgaacaagaccgtagtgcacttaaaaaaagggaatgggagcggaggaatcaagaagtccagcaagaagacgatctcttttcttcaggctttgatctttttggggagccatacaagacaaacaaaggtgatgcacttgccaaccgagtccagaacacgcttggaaactatgatgaaatgaagaatttgctaactaaccattctaatcagaatcacctagtgggaattccaaagaattctgtgccccagaatcccaacaacaaaaatgaaccaagcttttttccagaacaaaagaacagaataattccacctcaccaggataatacccatccttcagcaccaatgcctccaccttctgttgtgatactgaattcaactctaatacacagcaacagaaaatcaaaacctgagtggtcacgtgatagtcataaccctagcactgtactggcaagccaggccagtggtcagccaaacaagatgcagactttgacacaggaccagtctcaagccaaactggaagacttctttgtctacccagctgaacagccccagattggagaagttgaagagtcaaacccatctgcaaaggaagacagtaaccctaattctagtggagaagatgctttcaaagaaatctttcaatccaattcaccggaagaatctgaattcgccgtgcaagcgcctgggtctcccctagtggcttcctctttattagctcctagcagtggcctttcagttcaaaacttcccaccagggctttactgcaaaacaagcatggggcagcaaaagccaactgcatacgtcagacccatggatggccaggaccaggcaccggacatctcaccaacactgaaaccttcaattgaatttgagaacagctttgggaatctgtcatttggaacactcttggatggaaaacccagtgcagccagttcaaagactaaactgccaaagttcaccatcctccaaacaagtgaagtaagccttcccagtgatccaagctgtgttgaagaaatcttgcgggaatcgcagcatctgaccccaggattcaccttacaaaagtggaatgacccaaccaccagagcttctacaaagtcagtgtctttcaaatcgatgcttgaggatgacctgaagctgagcagtgatgaagatgaccttgagcctgtgaagaccttgaccactcagtgcactgccactgagctctaccaggctgttgaaaaggcaaaacctaggaataatcctgtgaacccacccttggccactccccagcccccacctgcagtgcaagccagcgggggttctggcagctccagcgaatcggagagcagctctgagtcggattcagacactgaaagtagcaccactgacagcgaatctaatgaggcacctcgtgtggcaactccagagcctgagccaccctcaaccaacaagtggcaactggataaatggcttaacaaagtgacatcccagaacaagtcttttatttgtggccaaaatgaaacacccatggagactatttctctgcctcctccaatcatccaaccaatggaagtccagatgaaagtgaagacgaatgccagtcaggtcccagctgaacccaaagaaaggcctctcctcagtctcattagggagaaagcccgtccacggcccactcagaaaattccagaaacaaaggctttgaagcataagttgtcaacaactagtgagacagtgtctcaaaggacaattgggaaaaaacagcccaaaaaagttgagaagaacaccagcactgacgagtttacctggcccaaaccaaatattaccagcagcactcccaaagaaaaagaaagtgtggagcttcatgacccaccaagaggccgcaacaaagccactgcccacaaaccagcccctaggaaagaaccaagacctaacatccctttggctcccgagaagaagaagtacagagggcctggcaagattgtgccaaagtctcgggaattcattgaaacagattcatctacatctgactccaacacagatcaggaagagaccctgcaaatcaaagtcctgcctccgtgcattatttctggaggtaatactgccaaatccaaggaaatctgtggtgccagcctgaccctcagcaccttaatgagtagcagtggcagcaacaacaacttatccatcagtaatgaagagccaacattttcacctattcctgtcatgcaaactgaaatcctgtcccctctgcgagatcatgagaacctgaaaaacctctgggtgaagattgaccttgacttactctctagagtacctggccacagctcactccatgcagcacctgccaagccagaccacaaggagactgccacaaaacccaagcgtcagacagctgtcacagctgtggagaaaccagcccctaagggcaaacgtaagcacaagccaatagaagttgcagagaagatccctgagaagaagcagcgcctggaggaggccacaactatctgcttgctccctccttgcatctcaccagccccaccccacaagcctcccaacactagagaaaataattcatccaggagagcaaatagaagaaaggaagaaaaactatttcctcctccactttccccactgccagaggaccctccacgccgcagaaatgtcagtggcaataatggtccctttggtcaagacaaaaacatcgccatgactggacaaatcacatctaccaaacctaagagaactgaaggcaaattctgtgctactttcaaagggatatcggagggagacactccaaaaaaggcatcctctgccaccatcactgtcaccaatactgctattgccactgctactgtcactgctactgccattgtcaccaccactgtcacagctactgccaccgccacggccaccaccacaactactaccactaccatttccaccatcacctctaccatcactactggcctcatggatagcagtcacctggagatgacgtcctgggcggctctgccccttctatccagcagcagcactaatgtccggagacccaagctcacttttgatgactcggttcacaatgctgattattacatgcaagaagctaagaagctgaagcacaaagctgatgcactgttcgagaaatttggcaaagctgtgaattatgctgatgccgccctctccttcactgaatgtggcaatgccatggaacgcgaccctctggaagcaaagtccccatacaccatgtactctgagactgtggagctcctcaggtatgcaatgaggctgaagaactttgcaagtcccttggcttcggatggggacaaaaagctagcagtactatgctaccgatgtttatcactcctctatttgagaatgtttaagctgaagaaggaccatgctatgaagtactccagatcactgatggaatattttaagcaaaatgcttcaaaagtcgcacagataccctctccatgggtaagcaatggaaagaacactccatccccagtgtctctcaacaacgtctcccccatcaacgcaatggggaactgtaacaatggcccagtcaccattccccagcgcattcaccacatggctgccagccacgtcaacatcactagcaatgtgttacggggctatgaacactgggatatggccgacaaactgacaagagaaaacaaagaattctttggtgatctggacacgctgatggggcctctgacccagcacagcagcatgaccaatcttgtccgctacgttcgccaaggactgtgttggctgcgcatcgatgcccacttgttgtagtgggtgttctcagatctctagcatcacgacccatcactctacctctaccagcgcactgatggtcactggtggaactccactcactggggaacgttctctttggttatgtttgtttttatgcttcttttgttatctgtaaaaaacagaagtcattgtaagttgacactacaacttaagggcagtgtacgttttattacttagtcattttttttcttttagcatttgatatgcatttctcagattccaccatctttttgtgctttatggaatgacagtccctacaatattgttttaagcccacactacccaaaacaaagaatgggaagcacttgtgataaagacaggctcctgagaaatgcaacaagtggtcttacatatacatgagaacttagacacaagggaccatcccccaaactctactcttatacccagaaaagaacatatttcagaatctgtcaaacttttgtgtatcccacagattcaatcttcaggtgagaattttcattgtcaaaacccactggttagatgttgtagcaacatcataaaatcaagagtatcaagaaaataaatgagcatagcaatgctactcttaaaaagatgctatgccacacaaccagaggactttcttgttagcatccctttcctgattccctattttgttaattttaatgataagaagaaagggtgacatttattttgacaagttttaggcatcagctggcatcagtgtttttcaactccattatttgaagtgtaaatcctcacctggggttctctgtgtgcaaagctgtccttttgaagaacagtttggttgatgcatgccttagtagccaaaatgctacactctagacttacaagtgggagttaagagaggtctggaaagtgtccaacaaggaattcacacctctgcctcctttgcaacaacaacatttacacagttggtaagtgggtccataactggcaggatttttaaattgtattttgctcaaatctatgggaacaaaagtcaaggtatcactacctagaagtaatgatatacagttttcttcctagtggcttgaaaatctggacttcctcaattattattcacattttctctcttataggttttctgttttctactttcttttttctcttatctgtgtttccctttcctttgtttggctcattaacttttgactgaattacaattactccttttattaaagtccatattattgtgaatcatttccatgaaaatttctaagaaaactccaaactctctaaatagtagctaacttttatttttttaaaatgagtcgtggggtagtgcttcaccttgagatgctttgaaagagccctaaacattgggaaccattcacctaatttggagacatttctcactggttgtgactacccccttatgatccttcacattcattttatgtccctaaacatcacaatgtaaatatcatttttgatgttccagctcaccagaagattcttacacttggggtaaacactatccatgcattacttactggtaattacctgctggtatataattccatgtagcctttaatatgctgggttatcaaattctgttcactgagttatgaccagataaataatagatatgcacatgaaagatgcaaacttgtgtgattattaaagccagccatgcaggtccatgatagaaacagcaggtgatgactctgcactctcattgtcaaggttagatatatccccagttgcaaaacagccagacttgagctgtgctctggtcatctttgagtttaaggccttttgttgtataaggctgtggaagttgtactccaatggctgaagccatgttgttaatatggctgatgggagcatccctgcagctgaacccagcactttttatgctcccactgtggttgagctttatgtttacagtctcagcaacaacacttatgcatccaaacactcacaaatgaaacctgaaagaatcttttctgagcctcttaaaagaggaaaatgatgataacattaaagactctgaacacccaaggttggtgtcacatataaaaattaagctgatgactttgcagtgactcaagttgtctctttatcatggtttaccaggtagagtgcctggctattactatataatgaagcccactggcttgacttgtaagttcaacctaaaccacaatcctagaccatcatggatttaggagtagattcttcttgaaatcccacatccagaaactagacattagaatgttgaggcagtttcccagagaaacaagcatattgcctcatggatgaaagacttgtagttctagtttcagtgacttgttatatctacttacatacaacagggaggcaagaggattctctgtcatctctggtgactgagtgtaaaatatgtgccaagtctgcagcacagtgaccaaatctgacaatcgagctctggatcaccacttgattatgtagtagactcatttataaagcagcttaggaactaattaaacatggaggatgaattaccttcctatcccttgagataagacatctttcagtttcatgattaaggattgttgctgttttatagttactctgttcatcacagtgtaaatggtgatgcgtgtcgtaggtgtgcagctatttgagggactaagggatggagatattctgtcaaatgaatctcttcagtataccagtttgtgggagggatatgagacatgtggatggcagtgagagatcgtgcctctagatcttgatggaggcttggtgagacacacttaaataagcacgtggaggttagaatagagggcagagtaaaaggaagctccatctgagcaagtacaccaaatgatctcagccctgcaacttgacccaggtagggccaccactacgccttcacttgtcacccaagctccaaccacagagagtttgacaagtttgtgttatgatgttggcttggctttgtatttttaattaactttggatttttagtggttttgtcatataactgtctgagtttggtaggtaggattactttgaaaagggtttactagtgtggtcctccgggtagaatttagctgtaagcatgttgttagccagcctgtagactgttaattacttaataatctcattgggaaaatactagtagttttatatttggatgacataattggaaaagcagattagctgctactacttttaaaagacttaaggtcgggatgcctttttttccatgtaaggaaatgaaaagaccaaaatcttcaggcaaaaagcaagttgcaaaattagaaaccattggctaaaaatgtgttttgttgagtttccaaatggatgaattttcatttggacattacatcactaaattcattagattttgtctgcattggaaagatactcttctagcatatctttcccaaagatatctaatttggattctgtttcatgcaaatttgcatcccggaggttgaagttggagtttgaggttggaaaatatctttgaaggcagaatcagttgagttgtgagggtgaagcctcacatacttctcaacagacatgataaaattcacctgcatgagttggcaggtgggagaaccaaactggatcactgggtaagactactcagtaaagcaatgaactgcttgcttagagaagcatcactatccccattgagaaaaatgtgtggcaagatgatacagctacacagtatcaaatgaatgggtcaattcagcacccccaaatttaattctgtggggaaaaattattgagccagttgtcagtgttctgttacatgactggcagactaaattcttcatcgttgttgttattgttgttgttgtttctcattttcactcgcacggccttattctcataattaaaatctaattcattttctctttagtgttagtagactccaacaacagaagtggcatctgtgtattcataatcagcatttaccctggcaggagactaatcagataggccggtctcagacattaatcctaccatctgatatttttggtgaaggaaaaagtattaattctctttccatcctcctcctcagaaatatagaagccctctttaccaaaatcatcacattttactctgtaatctaccagctaaaagaaaattgcattgtggggagggcagaaagggggtgggggtgggggcgggggggtggggggtggggaagccccacaaagccagattgcagttcttgcccctttttgcgtctgacatgagatgttaaagaattattcatagtgctcacattgggttaggggacactgaactgctttttagatccatgatcagtcatcattcttctaagagattggagctttgctgtttcattaactgtgcagtgtagactaatggtgtttaataaaaatcattcaaaatttcaaactcttttgccagtgacctcaattttgttggctctgtgatttgtatcagactttgaggagggaagggggaagtgaaggaagcctacgtccaggcccctgacaggatgctgcagtagcaagctcaagctcgcctgcctgccagcagttgctggtgagcagcagcatgcagaccagctgtgggaagcctcctgaagaatgccccagctgatgctttcagctgggaatagtttgttcctattggggaactcattgttctccagtctctgcagcaggaagccagctgtcatattcggagggaatttcagatgctttacctttttggttttgtcctgcatcactcatgtggctacgaaagtgtctctgagaatagagcccaatgtggtgacaatgggtagtcaaatgcaccccagatgctcaagccctgttgtggttctgcagtgtttatgaaattgggaggaaggagaccctggacagtaagcaaaattggagacactccaacgaggctaagttaatgccgtgttgcccagaacaagatctagcttctcatttggtcagcctagcatgcaaccagtggtgtgctggtaaaatgtttaacaaccagctcgctgagaatagaaagcacctggtttgcaccatttgccaatttccatggcataaatactaccactttagatgattttaagctaccaactgtgatgtcactgaacacatggttggaaagagatgcacgcagttggctcttgcaagcctgggcaaaaatgcttcaacacgccactggatgcagccagtcagagggttcatatttaatatatgtgttcatgtggacacacacagacacacacacacaaactcacccttacacacacacttcgatgactaaaacaattacatagttttaagatatgaatcaatgtgtgaatgtagaaagcttatgataaggccctagaggtatgggttgccctggaagcctaggttttaagcaggagaatagctgagaagaatgaagccctcctgagctgaaaggagagatggatcaatggagatggttccatcatctccttccatatctcacaggtaaaatgggcactcagaaaaccctcacgattgattttttaaaaagataagtgagtgttttttattttattattattgtcatcattattttgatttacaaatgctatttgtaacttttacatgtaactaggataaagtatttacgggaactctatggagaatagcacaatccagaatttactgtgtttttcttttatgtgacgtggaaactcagtaattctcccaccttcacattgttgttcataagaattttactttagttattagggaatctaagttttttgttaacatttgtttttagttaaaagtatctacttactgttttagctctgaactcaaaccagaatatctctgtatcaattgcatgactattcagaaacaataatccaaaccaaaataattctttttccacccagtacgaagaaaactaagctcagtaacaagaaggcataaactaaagtatataatgaggctttcattaaatacacacacacacacactcacacacacacacatacactttttaaatttttaaattaggcctccacacataaatcattttgaaagtagaatagaaaatctcaaagaattcattctcctggtcctgtgcatcttctgcagttaataagaggtttgtatctggaaagatggaagaacttgttctaaaatcttatttttcaaaaaaaaatttccattttctctctgggcctgtatccatggttgaatgttagccctggaggagatccatgtcttactcgctctttctggcccttctgtcttttgcctctgcaattctttttgtagctggcacgatagcagggactgggggtctatcctttcatggtattgctacaatatttgtccttactggaaaatggtaacatccgggtctgatttaattggcattacacttacacagggactctgagcacccccgtcaccacaccagacagtggaccagttttcacagctacaaagagctagaaatgtgtttaacatcatccagtgcatcccctaattcaaaaccatcctcactaatcaatcatattcacccataaatattacaaatgagattgattccatctcaagacaatttgtcaaatacttaattttcttcctggatgattctacttactggatattttagaaagagaaatgtctgagataaaatccctcacatttactcaatataacaaattactgtttctactcctattctgagtagtgcttctgaagattgtttgctgtagtgttgtctttgataaaatgaatgtcagtagtgagccttttagagataccatgctcagaaatcctctttgggatcagaagatacctaaaattctccccttttgcccacttggttagatgagtgatatattctttggatcctgcaaagaagagattggtttattttcttttctggtggtggtagtggttgtatctgtggctgtgatggttgttgttacttgtctctctctctctctggctctggcttttgctttcctgctagtgttctttctctttccaaacaaatagttaaattaaatgtgagcttctgaattgtacttgttcatactttcaaaacataacagattaataaaaatagatgtgtcctgatttaaaacatgccccctggaaaggcatgctgtattatgaaatcgtgataatataactgcattattacatggcagtataaatattagtctgttgaattcatttgtccaattgtataactttgtggagcagtgttttgacctttgatacataattctggagcaagtggagtggttgcaggcagatgagacagtgttatatcaggatttttcaatcaactttagttggaggcctggcaattacaaacatcttcagatgtttctgtaaccattataaatatgaaaaaaacctcttcaaaaaatttcccatagtacttcagtcaagactttttaggtttatcttttttttttcatttctccttttccttttccattatttttcgatgggggggttgttatcattgactgaagaaatattttgattgcaatggtctctctctctctccccctctctctctctctcctctattctttcctccttccctctgtccatcacccctcattaaaatattgaaatctggagtctttgataaatctgcattagaccaggctatatgctaggaatgaaatctgggcaaatatcgatgggttttcaaagaatgctccatgttcattgggccctttcacaccccacagtgataaatgaaaaggatagaggtagttttttcaaaagagcactttaataatatcctctgagacctaatgcagtttaacaaatgactccacctatttttccagtaggtaaattgactgagacttgcaaaatacccctgagagttgtcaggggtgtcttctgcctggtctatagcgtgtgtgtttgctttgtatctaacaggcacattcacgtctcgtgtactcatatgaagtatttcctaacattcccattagcctgtatataagaatcagaaagataatcccaacatgttgtaaatgaagatgtgactctataacctttctcttcttcctggaaaaaaaaggacattttcatgcatattttaaacagaaattttgtatatttaagtgtcatagaaaatatttattgagtaactgggacacaaatgggaatttaattgtcatcatatgctttgtgtgtggggatgcttaccaacaccatgtcgctggaccattgtggcaagccataactgcacaaagagtacacatcgtcagtgtgtgtgtgtgtgtgtgtgtgcgcgcacacacgtgcgtgtgtgtgtccctgcatgtgcaacatgtctagcttgctgtccttcatgggattttagctttcccttcttgaaaaacattattttacagttccaggaggccctggttacattactatatgaaggcagtgatttgaaatgaaaattcctttcctcttggaagctttggtcataatatcatggttcaattaaacggattccaccggactttgtgatgaaaaaggctctgttaaaatccaattgagtttccaagaggaaattgtagtaggtcaagatgcatgagagggaagatggaggccacctcaactggagaacatgagctgagttgagccctcagtgttgaagttgacttgctccaagctgcagtctaaaaccctggggcccgtgcctggcctatgctccctcccaagtaagtagaggagcagaaccatcaggaacagcctgcctggctcctatgaagaaaacttcctgacgtcctgtccccaaaggaagaccctttccccaagggcaccccaggtggccattaaattgtgatgatcattcagaaagtgcccccttggctttatgagaatccaattagtcttctgaaccaccttttcttgggtgcagatttccaacattcatgctcattgcagatccaccaactgtcactgttcttaacaagcatgctcgtcttgtcagaatttcagtaagttccaatttcctgtacagaccagggtaaactgttctaaaatcaatcaattaatgaaatgttatctggtttttaaaagctggtttcatgtgctttatgtgtataaaactatatctgcctgtgtggctttgcatttcaaatgtgtggcgcacaagcgttttgttggtgctttgttctcagtacagtaactctgtgtacaaacattttaatgtggttttgttgttttccaacaagatgtctctgtaaaaatgatattggctgagctggtgcgttggtttctctcatagaggcattaactatactgccaatgcattgaattatttaaaaatgcaaaataaaatttttatgaaaatctca

SEQ ID NO: 1480 - DNA, 1488 bp, Homo sapiens
  source 1..1488: mol_type = unassigned DNA
ccgagaaccgccagcgagctgtgccgagagccgcgccgacccgctgcgatcagggacaggcgcccgcccgccgccgccgcctggccgctatggatctattcgactttttcagagactgggacttggagcagcagtgtcactatgaacaagaccgtagtgcacttaaaaaaagggaatgggagcggaggaatcaagaagtccagcaagaagacgatctcttttcttcaggctttgatctttttggggagccatacaagacaaacaaaggtgatgcacttgccaaccgagtccagaacacgcttggaaactatgatgaaatgaagaatttgctaactaaccattctaatcagaatcacctagtgggaattccaaagaattctgtgccccagaatcccaacaacaaaaatgaaccaagcttttttccagaacaaaagaacagaataattccacctcaccaggataatacccatccttcagcaccaatgcctccaccttctgttgtgatactgaattcaactctaatacacagcaacagaaaatcaaaacctgagtggtcacgtgatagtcataaccctagcactgtactggcaagccaggccagtggtcagccaaacaagatgcagactttgacacaggaccagtctcaagccaaactggaagacttctttgtctacccagctgaacagccccagattggagaagttgaagagtcaaacccatctgcaaaggaagacagtaaccctaattctagtggagaagatgctttcaaagaaatctttcaatccaattcaccggaagaatctgaattcgccgtgcaagcgcctgggtctcccctagtggcttcctctttattagctcctagcagtggcctttcagttcaaaacttcccaccagggctttactgcaaaacaagcatggggcagcaaaagccaactgcatacgtcagacccatggatggccaggaccaggcaccggacatctcaccaacactgaaaccttcaattgaatttgagaacagctttgggaatctgtcatttggaacactcttggatggaaaacccagtgcagccagttcaaagactaaactgccaaagttcaccatcctccaaacaagtgaagtaagccttcccagtgatccaagctgtgttgaagaaatcttgcgggaatcgcagcatctgaccccaggattcaccttacaaaagtggaatgacccaaccaccagagcttctacaaagatgcttgaggatgacctgaagctgagcagtgatgaagatgaccttgagcctgtgaagaccttgaccactcagtgcactgccactgagctctaccaggctgttgaaaaggcaaaacctaggaataatcctgtgaagtaagttattatttttattagttgcaaatgttaattttaacggactcgatgcatgtgaaaaaataaggtcataaaagagaccttggattttgagttaatctctattcatgacaatttaa

SEQ ID NO: 1481 - DNA, 13746 bp, Homo sapiens
  source 1..13746: mol_type = unassigned DNA
cgccgcctgtgcagccgctgccgccgccgccgccgccgccgccgccgccgccgccgccgccgccgctgccgccccggctgccgcgccgcgccgctgcctctgccccggccgcccccgccgccgctgccgccgccggcccgcagccagccaggcgggcggcccagcccgcctgagcccgcagcggctgccgccgcagcgtcgggtcgctgggtgcgcgggctaccgcggaccgagcggacccgagtgggcgaccaggcgcttgcccgcccagtgccactgccgccgcttcctcgccggagcacaggaccagacacctccagcgcccgctgctgctgccgatgcggcccggacacttttagctgggcgggagggctggagagccgggggccgccgagaaccgccagcgagctgtgccgagagccgcgccgacccgctgcgatcagggacaggcgcccgcccgccgccgccgcctggccgctatggatctattcgactttttcagagactgggacttggagcagcagtgtcactatgaacaagaccgtagtgcacttaaaaaaagggaatgggagcggaggaatcaagaagtccagcaagaagacgatctcttttcttcaggctttgatctttttggggagccatacaaggtagctgaatatacaaacaaaggtgatgcacttgccaaccgagtccagaacacgcttggaaactatgatgaaatgaagaatttgctaactaaccattctaatcagaatcacctagtgggaattccaaagaattctgtgccccagaatcccaacaacaaaaatgaaccaagcttttttccagaacaaaagaacagaataattccacctcaccaggataatacccatccttcagcaccaatgcctccaccttctgttgtgatactgaattcaactctaatacacagcaacagaaaatcaaaacctgagtggtcacgtgatagtcataaccctagcactgtactggcaagccaggccagtggtcagccaaacaagatgcagactttgacacaggaccagtctcaagccaaactggaagacttctttgtctacccagctgaacagccccagattggagaagttgaagagtcaaacccatctgcaaaggaagacagtaaccctaattctagtggagaagatgctttcaaagaaatctttcaatccaattcaccggaagaatctgaattcgccgtgcaagcgcctgggtctcccctagtggcttcctctttattagctcctagcagtggcctttcagttcaaaacttcccaccagggctttactgcaaaacaagcatggggcagcaaaagccaactgcatacgtcagacccatggatggccaggaccaggcaccggacatctcaccaacactgaaaccttcaattgaatttgagaacagctttgggaatctgtcatttggaacactcttggatggaaaacccagtgcagccagttcaaagactaaactgccaaagttcaccatcctccaaacaagtgaagtaagccttcccagtgatccaagctgtgttgaagaaatcttgcgggagatgacccattcctggcctactcctctcacttccatgcatactgctggacactctgagcagagcaccttttccatcccaggacaggaatcgcagcatctgaccccaggattcaccttacaaaagtggaatgacccaaccaccagagcttctacaaagtcagtgtctttcaaatcgatgcttgaggatgacctgaagctgagcagtgatgaagatgaccttgagcctgtgaagaccttgaccactcagtgcactgccactgagctctaccaggctgttgaaaaggcaaaacctaggaataatcctgtgaacccacccttggccactccccagcccccacctgcagtgcaagccagcgggggttctggcagctccagcgaatcggagagcagctctgagtcggattcagacactgaaagtagcaccactgacagcgaatctaatgaggcacctcgtgtggcaactccagagcctgagccaccctcaaccaacaagtggcaactggataaatggcttaacaaagtgacatcccagaacaagtcttttatttgtggccaaaatgaaacacccatggagactatttctctgcctcctccaatcatccaaccaatggaagtccagatgaaagtgaagacgaatgccagtcaggtcccagctgaacccaaagaaaggcctctcctcagtctcattagggagaaagcccgtccacggcccactcagaaaattccagaaacaaaggctttgaagcataagttgtcaacaactagtgagacagtgtctcaaaggacaattgggaaaaaacagcccaaaaaagttgagaagaacaccagcactgacgagtttacctggcccaaaccaaatattaccagcagcactcccaaagaaaaagaaagtgtggagcttcatgacccaccaagaggccgcaacaaagccactgcccacaaaccagcccctaggaaagaaccaagacctaacatccctttggctcccgagaagaagaagtacagagggcctggcaagattgtgccaaagtctcgggaattcattgaaacagattcatctacatctgactccaacacagatcaggaagagaccctgcaaatcaaagtcctgcctccgtgcattatttctggaggtaatactgccaaatccaaggaaatctgtggtgccagcctgaccctcagcaccttaatgagtagcagtggcagcaacaacaacttatccatcagtaatgaagagccaacattttcacctattcctgtcatgcaaactgaaatcctgtcccctctgcgagatcatgagaacctgaaaaacctctgggtgaagattgaccttgacttactctctagagtacctggccacagctcactccatgcagcacctgccaagccagaccacaaggagactgccacaaaacccaagcgtcagacagctgtcacagctgtggagaaaccagcccctaagggcaaacgtaagcacaagccaatagaagttgcagagaagatccctgagaagaagcagcgcctggaggaggccacaactatctgcttgctccctccttgcatctcaccagccccaccccacaagcctcccaacactagagaaaataattcatccaggagagcaaatagaagaaaggaagaaaaactatttcctcctccactttccccactgccagaggaccctccacgccgcagaaatgtcagtggcaataatggtccctttggtcaagacaaaaacatcgccatgactggacaaatcacatctaccaaacctaagagaactgaaggcaaattctgtgctactttcaaagggatatcggtaaatgagggagacactccaaaaaaggcatcctctgccaccatcactgtcaccaatactgctattgccactgctactgtcactgctactgccattgtcaccaccactgtcacagctactgccaccgccacggccaccaccacaactactaccactaccatttccaccatcacctctaccatcactactggcctcatggatagcagtcacctggagatgacgtcctgggcggctctgccccttctatccagcagcagcactaatgtccggagacccaagctcacttttgatgactcggttcacaatgctgattattacatgcaagaagctaagaagctgaagcacaaagctgatgcactgttcgagaaatttggcaaagctgtgaattatgctgatgccgccctctccttcactgaatgtggcaatgccatggaacgcgaccctctggaagcaaagtccccatacaccatgtactctgagactgtggagctcctcaggtatgcaatgaggctgaagaactttgcaagtcccttggcttcggatggggacaaaaagctagcagtactatgctaccgatgtttatcactcctctatttgagaatgtttaagctgaagaaggaccatgctatgaagtactccagatcactgatggaatattttaagcaaaatgcttcaaaagtcgcacagataccctctccatgggtaagcaatggaaagaacactccatccccagtgtctctcaacaacgtctcccccatcaacgcaatggggaactgtaacaatggcccagtcaccattccccagcgcattcaccacatggctgccagccacgtcaacatcactagcaatgtgttacggggctatgaacactgggatatggccgacaaactgacaagagaaaacaaagaattctttggtgatctggacacgctgatggggcctctgacccagcacagcagcatgaccaatcttgtccgctacgttcgccaaggactgtgttggctgcgcatcgatgcccacttgttgtagtgggtgttctcagatctctagcatcacgacccatcactctacctctaccagcgcactgatggtcactggtggaactccactcactggggaacgttctctttggttatgtttgtttttatgcttcttttgttatctgtaaaaaacagaagtcattgtaagttgacactacaacttaagggcagtgtacgttttattacttagtcattttttttcttttagcatttgatatgcatttctcagattccaccatctttttgtgctttatggaatgacagtccctacaatattgttttaagcccacactacccaaaacaaagaatgggaagcacttgtgataaagacaggctcctgagaaatgcaacaagtggtcttacatatacatgagaacttagacacaagggaccatcccccaaactctactcttatacccagaaaagaacatatttcagaatctgtcaaacttttgtgtatcccacagattcaatcttcaggtgagaattttcattgtcaaaacccactggttagatgttgtagcaacatcataaaatcaagagtatcaagaaaataaatgagcatagcaatgctactcttaaaaagatgctatgccacacaaccagaggactttcttgttagcatccctttcctgattccctattttgttaattttaatgataagaagaaagggtgacatttattttgacaagttttaggcatcagctggcatcagtgtttttcaactccattatttgaagtgtaaatcctcacctggggttctctgtgtgcaaagctgtccttttgaagaacagtttggttgatgcatgccttagtagccaaaatgctacactctagacttacaagtgggagttaagagaggtctggaaagtgtccaacaaggaattcacacctctgcctcctttgcaacaacaacatttacacagttggtaagtgggtccataactggcaggatttttaaattgtattttgctcaaatctatgggaacaaaagtcaaggtatcactacctagaagtaatgatatacagttttcttcctagtggcttgaaaatctggacttcctcaattattattcacattttctctcttataggttttctgttttctactttcttttttctcttatctgtgtttccctttcctttgtttggctcattaacttttgactgaattacaattactccttttattaaagtccatattattgtgaatcatttccatgaaaatttctaagaaaactccaaactctctaaatagtagctaacttttatttttttaaaatgagtcgtggggtagtgcttcaccttgagatgctttgaaagagccctaaacattgggaaccattcacctaatttggagacatttctcactggttgtgactacccccttatgatccttcacattcattttatgtccctaaacatcacaatgtaaatatcatttttgatgttccagctcaccagaagattcttacacttggggtaaacactatccatgcattacttactggtaattacctgctggtatataattccatgtagcctttaatatgctgggttatcaaattctgttcactgagttatgaccagataaataatagatatgcacatgaaagatgcaaacttgtgtgattattaaagccagccatgcaggtccatgatagaaacagcaggtgatgactctgcactctcattgtcaaggttagatatatccccagttgcaaaacagccagacttgagctgtgctctggtcatctttgagtttaaggccttttgttgtataaggctgtggaagttgtactccaatggctgaagccatgttgttaatatggctgatgggagcatccctgcagctgaacccagcactttttatgctcccactgtggttgagctttatgtttacagtctcagcaacaacacttatgcatccaaacactcacaaatgaaacctgaaagaatcttttctgagcctcttaaaagaggaaaatgatgataacattaaagactctgaacacccaaggttggtgtcacatataaaaattaagctgatgactttgcagtgactcaagttgtctctttatcatggtttaccaggtagagtgcctggctattactatataatgaagcccactggcttgacttgtaagttcaacctaaaccacaatcctagaccatcatggatttaggagtagattcttcttgaaatcccacatccagaaactagacattagaatgttgaggcagtttcccagagaaacaagcatattgcctcatggatgaaagacttgtagttctagtttcagtgacttgttatatctacttacatacaacagggaggcaagaggattctctgtcatctctggtgactgagtgtaaaatatgtgccaagtctgcagcacagtgaccaaatctgacaatcgagctctggatcaccacttgattatgtagtagactcatttataaagcagcttaggaactaattaaacatggaggatgaattaccttcctatcccttgagataagacatctttcagtttcatgattaaggattgttgctgttttatagttactctgttcatcacagtgtaaatggtgatgcgtgtcgtaggtgtgcagctatttgagggactaagggatggagatattctgtcaaatgaatctcttcagtataccagtttgtgggagggatatgagacatgtggatggcagtgagagatcgtgcctctagatcttgatggaggcttggtgagacacacttaaataagcacgtggaggttagaatagagggcagagtaaaaggaagctccatctgagcaagtacaccaaatgatctcagccctgcaacttgacccaggtagggccaccactacgccttcacttgtcacccaagctccaaccacagagagtttgacaagtttgtgttatgatgttggcttggctttgtatttttaattaactttggatttttagtggttttgtcatataactgtctgagtttggtaggtaggattactttgaaaagggtttactagtgtggtcctccgggtagaatttagctgtaagcatgttgttagccagcctgtagactgttaattacttaataatctcattgggaaaatactagtagttttatatttggatgacataattggaaaagcagattagctgctactacttttaaaagacttaaggtcgggatgcctttttttccatgtaaggaaatgaaaagaccaaaatcttcaggcaaaaagcaagttgcaaaattagaaaccattggctaaaaatgtgttttgttgagtttccaaatggatgaattttcatttggacattacatcactaaattcattagattttgtctgcattggaaagatactcttctagcatatctttcccaaagatatctaatttggattctgtttcatgcaaatttgcatcccggaggttgaagttggagtttgaggttggaaaatatctttgaaggcagaatcagttgagttgtgagggtgaagcctcacatacttctcaacagacatgataaaattcacctgcatgagttggcaggtgggagaaccaaactggatcactgggtaagactactcagtaaagcaatgaactgcttgcttagagaagcatcactatccccattgagaaaaatgtgtggcaagatgatacagctacacagtatcaaatgaatgggtcaattcagcacccccaaatttaattctgtggggaaaaattattgagccagttgtcagtgttctgttacatgactggcagactaaattcttcatcgttgttgttattgttgttgttgtttctcattttcactcgcacggccttattctcataattaaaatctaattcattttctctttagtgttagtagactccaacaacagaagtggcatctgtgtattcataatcagcatttaccctggcaggagactaatcagataggccggtctcagacattaatcctaccatctgatatttttggtgaaggaaaaagtattaattctctttccatcctcctcctcagaaatatagaagccctctttaccaaaatcatcacattttactctgtaatctaccagctaaaagaaaattgcattgtggggagggcagaaagggggtgggggtgggggcgggggggtggggggtggggaagccccacaaagccagattgcagttcttgcccctttttgcgtctgacatgagatgttaaagaattattcatagtgctcacattgggttaggggacactgaactgctttttagatccatgatcagtcatcattcttctaagagattggagctttgctgtttcattaactgtgcagtgtagactaatggtgtttaataaaaatcattcaaaatttcaaactcttttgccagtgacctcaattttgttggctctgtgatttgtatcagactttgaggagggaagggggaagtgaaggaagcctacgtccaggcccctgacaggatgctgcagtagcaagctcaagctcgcctgcctgccagcagttgctggtgagcagcagcatgcagaccagctgtgggaagcctcctgaagaatgccccagctgatgctttcagctgggaatagtttgttcctattggggaactcattgttctccagtctctgcagcaggaagccagctgtcatattcggagggaatttcagatgctttacctttttggttttgtcctgcatcactcatgtggctacgaaagtgtctctgagaatagagcccaatgtggtgacaatgggtagtcaaatgcaccccagatgctcaagccctgttgtggttctgcagtgtttatgaaattgggaggaaggagaccctggacagtaagcaaaattggagacactccaacgaggctaagttaatgccgtgttgcccagaacaagatctagcttctcatttggtcagcctagcatgcaaccagtggtgtgctggtaaaatgtttaacaaccagctcgctgagaatagaaagcacctggtttgcaccatttgccaatttccatggcataaatactaccactttagatgattttaagctaccaactgtgatgtcactgaacacatggttggaaagagatgcacgcagttggctcttgcaagcctgggcaaaaatgcttcaacacgccactggatgcagccagtcagagggttcatatttaatatatgtgttcatgtggacacacacagacacacacacacaaactcacccttacacacacacttcgatgactaaaacaattacatagttttaagatatgaatcaatgtgtgaatgtagaaagcttatgataaggccctagaggtatgggttgccctggaagcctaggttttaagcaggagaatagctgagaagaatgaagccctcctgagctgaaaggagagatggatcaatggagatggttccatcatctccttccatatctcacaggtaaaatgggcactcagaaaaccctcacgattgattttttaaaaagataagtgagtgttttttattttattattattgtcatcattattttgatttacaaatgctatttgtaacttttacatgtaactaggataaagtatttacgggaactctatggagaatagcacaatccagaatttactgtgtttttcttttatgtgacgtggaaactcagtaattctcccaccttcacattgttgttcataagaattttactttagttattagggaatctaagttttttgttaacatttgtttttagttaaaagtatctacttactgttttagctctgaactcaaaccagaatatctctgtatcaattgcatgactattcagaaacaataatccaaaccaaaataattctttttccacccagtacgaagaaaactaagctcagtaacaagaaggcataaactaaagtatataatgaggctttcattaaatacacacacacacacactcacacacacacacatacactttttaaatttttaaattaggcctccacacataaatcattttgaaagtagaatagaaaatctcaaagaattcattctcctggtcctgtgcatcttctgcagttaataagaggtttgtatctggaaagatggaagaacttgttctaaaatcttatttttcaaaaaaaaatttccattttctctctgggcctgtatccatggttgaatgttagccctggaggagatccatgtcttactcgctctttctggcccttctgtcttttgcctctgcaattctttttgtagctggcacgatagcagggactgggggtctatcctttcatggtattgctacaatatttgtccttactggaaaatggtaacatccgggtctgatttaattggcattacacttacacagggactctgagcacccccgtcaccacaccagacagtggaccagttttcacagctacaaagagctagaaatgtgtttaacatcatccagtgcatcccctaattcaaaaccatcctcactaatcaatcatattcacccataaatattacaaatgagattgattccatctcaagacaatttgtcaaatacttaattttcttcctggatgattctacttactggatattttagaaagagaaatgtctgagataaaatccctcacatttactcaatataacaaattactgtttctactcctattctgagtagtgcttctgaagattgtttgctgtagtgttgtctttgataaaatgaatgtcagtagtgagccttttagagataccatgctcagaaatcctctttgggatcagaagatacctaaaattctccccttttgcccacttggttagatgagtgatatattctttggatcctgcaaagaagagattggtttattttcttttctggtggtggtagtggttgtatctgtggctgtgatggttgttgttacttgtctctctctctctctggctctggcttttgctttcctgctagtgttctttctctttccaaacaaatagttaaattaaatgtgagcttctgaattgtacttgttcatactttcaaaacataacagattaataaaaatagatgtgtcctgatttaaaacatgccccctggaaaggcatgctgtattatgaaatcgtgataatataactgcattattacatggcagtataaatattagtctgttgaattcatttgtccaattgtataactttgtggagcagtgttttgacctttgatacataattctggagcaagtggagtggttgcaggcagatgagacagtgttatatcaggatttttcaatcaactttagttggaggcctggcaattacaaacatcttcagatgtttctgtaaccattataaatatgaaaaaaacctcttcaaaaaatttcccatagtacttcagtcaagactttttaggtttatcttttttttttcatttctccttttccttttccattatttttcgatgggggggttgttatcattgactgaagaaatattttgattgcaatggtctctctctctctccccctctctctctctctcctctattctttcctccttccctctgtccatcacccctcattaaaatattgaaatctggagtctttgataaatctgcattagaccaggctatatgctaggaatgaaatctgggcaaatatcgatgggttttcaaagaatgctccatgttcattgggccctttcacaccccacagtgataaatgaaaaggatagaggtagttttttcaaaagagcactttaataatatcctctgagacctaatgcagtttaacaaatgactccacctatttttccagtaggtaaattgactgagacttgcaaaatacccctgagagttgtcaggggtgtcttctgcctggtctatagcgtgtgtgtttgctttgtatctaacaggcacattcacgtctcgtgtactcatatgaagtatttcctaacattcccattagcctgtatataagaatcagaaagataatcccaacatgttgtaaatgaagatgtgactctataacctttctcttcttcctggaaaaaaaaggacattttcatgcatattttaaacagaaattttgtatatttaagtgtcatagaaaatatttattgagtaactgggacacaaatgggaatttaattgtcatcatatgctttgtgtgtggggatgcttaccaacaccatgtcgctggaccattgtggcaagccataactgcacaaagagtacacatcgtcagtgtgtgtgtgtgtgtgtgtgtgcgcgcacacacgtgcgtgtgtgtgtccctgcatgtgcaacatgtctagcttgctgtccttcatgggattttagctttcccttcttgaaaaacattattttacagttccaggaggccctggttacattactatatgaaggcagtgatttgaaatgaaaattcctttcctcttggaagctttggtcataatatcatggttcaattaaacggattccaccggactttgtgatgaaaaaggctctgttaaaatccaattgagtttccaagaggaaattgtagtaggtcaagatgcatgagagggaagatggaggccacctcaactggagaacatgagctgagttgagccctcagtgttgaagttgacttgctccaagctgcagtctaaaaccctggggcccgtgcctggcctatgctccctcccaagtaagtagaggagcagaaccatcaggaacagcctgcctggctcctatgaagaaaacttcctgacgtcctgtccccaaaggaagaccctttccccaagggcaccccaggtggccattaaattgtgatgatcattcagaaagtgcccccttggctttatgagaatccaattagtcttctgaaccaccttttcttgggtgcagatttccaacattcatgctcattgcagatccaccaactgtcactgttcttaacaagcatgctcgtcttgtcagaatttcagtaagttccaatttcctgtacagaccagggtaaactgttctaaaatcaatcaattaatgaaatgttatctggtttttaaaagctggtttcatgtgctttatgtgtataaaactatatctgcctgtgtggctttgcatttcaaatgtgtggcgcacaagcgttttgttggtgctttgttctcagtacagtaactctgtgtacaaacattttaatgtggttttgttgttttccaacaagatgtctctgtaaaaatgatattggctgagctggtgcgttggtttctctcatagaggcattaactatactgccaatgcattgaattatttaaaaatgcaaaataaaatttttatgaaaatctca

SEQ ID NO: 1482 - DNA, 2032 bp, Homo sapiens
  source 1..2032: mol_type = unassigned DNA
gttacttttttactgataatgtgaaagaatgatataaaaacttgattttcctcaacaacattactttcttttgtaaatgtggtttctacaaagatgaaactactaaaacttacaggttttatttttttcttgttttttttgactgaatccctaaccctgcccacacaacctcgggatatagagaacttcaatagtactcaaaaatttatagaagataatattgaatacatcaccatcattgcatttgctcagtatgttcaggaagcaacctttgaagaaatggaaaagctggtgaaagacatggtagaatacaaagacagatgtatggctgacaagacgctcccagagtgttcaaaattacctaataatgttttacaggaaaaaatatgtgctatggaggggctgccacaaaagcataatttctcacactgctgcagtaaggttgatgctcaaagaagactctgtttcttctataacaagaaatctgatgtgggatttctgcctcctttccctaccctggatcccgaagagaaatgccaggcttatgaaagtaacagagaatcccttttaaatcactttttatatgaagttgccagaaggaacccatttgtcttcgcccctacacttctaactgttgctgttcattttgaggaggtggccaaatcatgttgtgaagaacaaaacaaagtcaactgccttcaaacaagggcaatacctgtcacacaatatttaaaagcattttcttcttatcaaaaacatgtctgtggggcacttttgaaatttggaaccaaagttgtacactttatatatattgcgatactcagtcaaaaattccccaagattgaatttaaggagcttatttctcttgtagaagatgtttcttccaactatgatggatgctgtgaaggggatgttgtgcagtgcatccgtgacacgagcaaggttatgaaccatatttgttcaaaacaagattctatctccagcaaaatcaaagagtgctgtgaaaagaaaataccagagcgcggccagtgcataattaactcaaacaaagatgatagaccaaaggatttatctctaagagaaggaaaatttactgacagtgaaaatgtgtgtcaagaacgagatgctgacccagacaccttctttgcgaagtttacttttgaatactcaaggagacatccagacctgtctataccagagcttttaagaattgttcaaatatacaaagatctcctgagaaattgctgcaacacagaaaaccctccaggttgttaccgttacgcggaagacaaattcaatgagacaactgagaaaagcctcaagatggtacaacaagaatgtaaacatttccagaatttggggaaggatggtttgaaataccattacctcatcaggctcacgaagatagctccccaactctccactgaagaactggtgtctcttggcgagaaaatggtgacagctttcactacttgctgtacgctaagtgaagagtttgcctgtgttgataatttggcagatttagtttttggagagttatgtggagtaaatgaaaatcgaactatcaaccctgctgtggaccactgctgtaaaacaaactttgccttcagaaggccctgctttgagagtttgaaagctgataaaacatatgtgcctccacctttctctcaagatttatttacctttcacgcagacatgtgtcaatctcagaatgaggagcttcagaggaagacagacaggtttcttgtcaacttagtgaagctgaagcatgaactcacagatgaagagctgcagtctttgtttacaaatttcgcaaatgtagtggataagtgctgcaaagcagagagtcctgaagtctgctttaatgaagagagtccaaaaattggcaactgaagccagctgctggagatatgtaaagaaaaaagcaccaaagggaaggcttcctatctgtgtggtgatgaatcgcatttcctgagaacaaaataaaaggatttttctgtaactgtcacctgaaataatacattgcagcaag

SEQ ID NO: 1483 - DNA, 3185 bp, Homo sapiens
  source 1..3185: mol_type = unassigned DNA
ggctggcggcaggagacgccgcgttgagagcttgggctcctccgtgagccgccggcgcgcttcgctgcctggcggcctttccccgagccgagcccgcttcccgaggccgccagtcgtcgcctgcccgcgcctgcgcagcgtcccgggccgagagggccacggcggcggccatggcgcaccgctgtttgcggctgtggggccggggcggctgctggccccgcggcctacagcagctcctcgtgcctggcggcgtgggcccgggcgagcagccctgcctccggacgctttaccgatttgttacaactcaagcaagggccagcagaaattctcttttgacagatataattgctgcttatcaaagattctgttctcgacccccaaaaggatttgaaaaatactttcctaatggaaaaaatggaaaaaaagctagtgaacctaaagaagttatgggagagaaaaaagaatcaaagccagctgctaccacacgctcttctggaggaggaggtggtggcggtggaaaacgaggtggcaagaaagatgattctcactggtggtccaggtttcagaagggtgacattccatgggacgacaaggatttcaggatgttcttcctctggactgctctgttctggggtggagtcatgttttacttgctgctcaagagatccgggagagaaatcacttggaaggactttgtcaataactatctttcaaaaggagtagtagacagattggaagtcgtcaacaagcgttttgttcgagtgacctttacaccaggaaaaactcctgttgatgggcaatacgtttggtttaatattggcagtgtggacacctttgaacggaatctggaaactttacagcaggaattgggcatagaaggagaaaatcgggtgcctgttgtctacattgctgaaagtgatggctcttttctgctgagcatgctgcctacggtgctcatcatcgccttcttgctctacaccatcagaagagggcctgctggcattggccggacaggccgagggatgggcggactcttcagtgtcggagaaaccactgccaaggtcttaaaggatgaaattgatgtgaagttcaaagatgtggctggctgtgaggaggccaagctagagatcatggaatttgtgaatttcttgaaaaacccaaagcagtatcaagacctaggagcaaaaatcccaaagggtgccattctcactggtcctccaggcactgggaagacgctgctagctaaggccacagccggagaagccaatgtccccttcatcaccgttagtggatctgagtttttggagatgttcgttggtgtgggccctgctagagtccgagacttatttgcccttgctcggaagaatgccccttgcatcctcttcatcgatgaaatcgatgcggtgggaaggaagagaggaagaggcaactttggagggcagagtgagcaggagaacacactcaaccagctgctggtggagatggatggttttaatacaacaacaaatgtcgtcattttggccggcaccaatcgaccagatatcctggaccccgcgctgcttaggccggggcgtttcgacaggcagatctttattggaccaccagacataaaaggaagagcttctattttcaaagttcatctccgaccgctaaaactggacagtaccctggagaaggataaattggcaagaaaactggcatctttaactccagggttttcaggtgctgatgttgctaatgtctgtaatgaagctgcgttgattgctgcaaggcatctgtcagattccataaatcagaaacactttgaacaggcaattgaacgagtgattggtggcttagagaagaaaacgcaggttctgcagcctgaggagaagaagactgtggcataccacgaagcaggccatgcggttgccggctggtatctggagcacgcagacccgcttttaaaggtatccatcatcccacgtggcaaaggactaggttatgctcagtatttaccaaaagaacaatacctctataccaaagagcagctcttggataggatgtgtatgactttaggtggtcgagtctctgaagaaatcttctttggaagaattacaactggtgctcaagatgacttgagaaaagtaactcagagtgcatatgcccaaattgttcagtttggcatgaatgaaaaggttgggcaaatctcctttgacctcccacgtcagggggacatggtattggagaaaccttacagtgaagccactgcaagattgatagatgatgaagtacgaatacttattaatgatgcttataaaagaacagtagctcttctcacagaaaagaaagctgacgtggagaaggttgctcttctgttgttagaaaaagaagtattagataagaatgatatggttgaacttttgggccccagaccatttgcggaaaaatctacctatgaagaatttgtggaaggcactggcagcttggatgaggacacctcacttccagaaggccttaaggactggaacaaggagcgggaaaaggagaaagaggagcccccgggtgagaaagttgccaactagaggcccagagggaggccatctcagtctgtccactgtggtttcagctggtgcattatttcagctgtggctttcagaagaatgggaatgctgcgctgattttagccagccactggcccagctgaaatgatggggaaaggagtccttagtcctttcagcctcagaggtcacagtgggtggcaggtgactttccggaggccttgagggaaatgcacactgtcccatagcctcattgggctcccagacgtgctggaaaggttgagcccagagtggccgaggctggaccctgtggcaccaagtggggtcggctgaccgtgtggcagggatcgttgcactggactcttggcgtgtgggaagggatgctttctctttgtcgcccactcttcattcctgtttctcctcagttcccctgtgcagatgggctgtgaaattaaattggagtcttgataagaacattttaatttgacttaatattttaaagattgaatccagatcacttgttgctgtcttaatggaatggttttctacaggagctgtaacatacttaaaaatatgaatgtattatgtaaatatggcttctttacataaaaaataaaatgtcaacactgtacttttctgaacaca

SEQ ID NO: 1484 - DNA, 2860 bp, Homo sapiens
  source 1..2860: mol_type = unassigned DNA
ggggctggcggcaggagacgccgcgttgagagcttgggctcctccgtgagccgccggcgcgcttcgctgcctggcggcctttccccgagccgagcccgcttcccgaggccgccagtcgtcgcctgcccgcgcctgcgcgagcagccctgcctccggacgctttaccgatttgttacaactcaagcaagggccagcagaaattctcttttgacagatataattgctgcttatcaaagattctgttctcgacccccaaaaggatttgaaaaatactttcctaatggaaaaaatggaaaaaaagctagtgaacctaaagaagttatgggagagaaaaaagaatcaaagccagctgctaccacacgctcttctggaggaggaggtggtggcggtggaaaacgaggtggcaagaaagatgattctcactggtggtccaggtttcagaagggtgacattccatgggacgacaaggatttcaggatgttcttcctctggactgctctgttctggggtggagtcatgttttacttgctgctcaagagatccgggagagaaatcacttggaaggactttgtcaataactatctttcaaaaggagtagtagacagattggaagtcgtcaacaagcgttttgttcgagtgacctttacaccaggaaaaactcctgttgatgggcaatacgtttggtttaatattggcagtgtggacacctttgaacggaatctggaaactttacagcaggaattgggcatagaaggagaaaatcgggtgcctgttgtctacattgctgaaagtgatggctcttttctgctgagcatgctgcctacggtgctcatcatcgccttcttgctctacaccatcagaagagggcctgctggcattggccggacaggccgagggatgggcggactcttcagtgtcggagaaaccactgccaaggtcttaaaggatgaaattgatgtgaagttcaaagatgtggctggctgtgaggaggccaagctagagatcatggaatttgtgaatttcttgaaaaacccaaagcagtatcaagacctaggagcaaaaatcccaaagggtgccattctcactggtcctccaggcactgggaagacgctgctagctaaggccacagccggagaagccaatgtccccttcatcaccgttagtggatctgagtttttggagatgttcgttggtgtgggccctgctagagtccgagacttatttgcccttgctcggaagaatgccccttgcatcctcttcatcgatgaaatcgatgcggtgggaaggaagagaggaagaggcaactttggagggcagagtgagcaggagaacacactcaaccagctgctggtggagatggatggttttaatacaacaacaaatgtcgtcattttggccggcaccaatcgaccagatatcctggaccccgcgctgcttaggccggggcgtttcgacaggcagatctttattggaccaccagacataaaaggaagagcttctattttcaaagttcatctccgaccgctaaaactggacagtaccctggagaaggataaattggcaagaaaactggcatctttaactccagggttttcaggtgctgatgttgctaatgtctgtaatgaagctgcgttgattgctgcaaggcatctgtcagattccataaatcagaaacactttgaacaggcaattgaacgagtgattggtggcttagagaagaaaacgcaggttctgcagcctgaggagaagaagactgtggcataccacgaagcaggccatgcggttgccggctggtatctggagcacgcagacccgcttttaaaggtatccatcatcccacgtggcaaaggactaggttatgctcagtatttaccaaaagaacaatacctctataccaaagagcagctcttggataggatgtgtatgactttaggtggtcgagtctctgaagaaatcttctttggaagaattacaactggtgctcaagatgacttgagaaaagtaactcagagtgcatatgcccaaattgttcagtttggcatgaatgaaaaggttgggcaaatctcctttgacctcccacgtcagggggacatggtattggagaaaccttacagtgaagccactgcaagattgatagatgatgaagtacgaatacttattaatgatgcttataaaagaacagtagctcttctcacagaaaagaaagctgacgtggagaaggttgctcttctgttgttagaaaaagaagtattagataagaatgatatggttgaacttttgggccccagaccatttgcggaaaaatctacctatgaagaatttgtggaaggcactggcagcttggatgaggacacctcacttccagaaggccttaaggactggaacaaggagcgggaaaaggagaaagaggagcccccgggtgagaaagttgccaactagaggcccagagggaggccatctcagtctgtccactgtggtttcagctggtgcattatttcagctgtggctttcagaagaatgggaatgctgcgctgattttagccagccactggcccagctgaaatgatggggaaaggagtccttagtcctttcagcctcagaggtcacagtgggtggcaggtgactttccggaggccttgagggaaatgcacactgtcccatagcctcattgggctcccagacgtgctggaaaggttgagcccagagtggccgaggctggaccctgtggcaccaagtggggtcggctgaccgtgtggcagggatcgttgcactggactcttggcgtgtgggaagggatgctttctctttgtcgcccactcttcattcctgtttctcctcagttcccctgtgcagatgggct

SEQ ID NO: 1485 - DNA, 8498 bp, Homo sapiens
  source 1..8498: mol_type = unassigned DNA
cacctacctccccgccgctccagagggggctcgcagagctgaggacgcgcgcagcgctgctcaaggtctctctctctcagcaccctcgccggccggcgtctgacgcgggtgccagggtctccgggcacctttcagtgtccattccctcagccagccaggactccgcaacccagcagttgccgctgcggccacagcccgaggggacctgcggacaggacgccggcaggaggaggggtgcgcagcgcccgcgcagagcgtctccctcgctacgcagcgagacccgggcctcccggccccaggagcccccagctgcctcgccaggtgtgtgggactgaagttcttggagaagggagtccaactcttcaaggtgaactatgaccactttactctgggttttcgtgactctgagggtcatcactgcagctgtcactgtagaaacttcagaccatgacaactcgctgagtgtcagcatcccccaaccgtccccgctgagggtcctcctggggacctccctcaccatcccctgctatttcatcgaccccatgcaccctgtgaccaccgccccttctaccgccccactggccccaagaatcaagtggagccgtgtgtccaaggagaaggaggtagtgctgctggtggccactgaagggcgcgtgcgggtcaacagtgcctatcaggacaaggtctcactgcccaactacccggccatccccagtgacgccaccttggaagtccagagcctgcgctccaatgactctggggtctaccgctgcgaggtgatgcatggcatcgaggacagcgaggccaccctggaagtcgtggtgaaaggcatcgtgttccattacagagccatctctacacgctacaccctcgactttgacagggcgcagcgggcctgcctgcagaacagtgccatcattgccacgcctgagcagctgcaggccgcctacgaagacggcttccaccagtgtgacgccggctggctggctgaccagactgtcagataccccatccacactccccgggaaggctgctatggagacaaggatgagtttcctggtgtgaggacgtatggcatccgagacaccaacgagacctatgatgtgtactgcttcgccgaggagatggagggtgaggtcttttatgcaacatctccagagaagttcaccttccaggaagcagccaatgagtgccggcggctgggtgcccggctggccaccacgggccagctctacctggcctggcaggctggcatggacatgtgcagcgccggctggctggccgaccgcagcgtgcgctaccccatctccaaggcccggcccaactgcggtggcaacctcctgggcgtgaggaccgtctacgtgcatgccaaccagacgggctaccccgacccctcatcccgctacgacgccatctgctacacaggtgaagactttgtggacatcccagaaaacttctttggagtggggggtgaggaggacatcaccgtccagacagtgacctggcctgacatggagctgccactgcctcgaaacatcactgagggtgaagcccgaggcagcgtgatccttaccgtaaagcccatcttcgaggtctcccccagtcccctggaacccgaggagcccttcacgtttgcccctgaaataggggccactgccttcgctgaggttgagaatgagactggagaggccaccaggccctggggctttcccacacctggcctgggccctgccacggcattcaccagtgaggacctcgtcgtgcaggtgaccgctgtccctgggcagccgcatttgccagggggggtcgtcttccactaccgcccgggacccacccgctactcgctgacctttgaggaggcacagcaggcctgcctgcgcacgggggcggtcattgcctcgccggagcagctccaggccgcctacgaagcaggctatgagcagtgtgacgccggctggctgcgggaccagaccgtcagataccccattgtgagcccccggaccccatgcgtgggtgacaaggacagcagcccaggggtcaggacctatggcgtgcgcccatcaacagagacctacgatgtctactgctttgtagacagacttgagggggaggtgttcttcgccacacgccttgagcagttcaccttccaggaagcactggagttctgtgaatctcacaatgctacgctggccaccacgggccagctctacgccgcctggagccgcggcctggacaagtgctatgccggctggctggccgacggcagcctccgctaccccatcgtcaccccaaggcctgcctgcggtggggacaagccaggcgtgagaacggtctacctctaccctaaccagacgggcctcccagacccactgtcccggcaccatgccttctgcttccgaggcatttcagcggttccttctccaggagaagaagagggtggcacacccacatcaccctctggtgtggaggagtggatcgtgacccaagtggttcctggtgtggctgctgtccccgtagaagaggagacaactgctgtaccctcaggggagactactgccatcctagagttcaccaccgagccagaaaaccagacagaatgggaaccagcctataccccagtgggcacatccccgctgccagggatccttcctacttggcctcccactggcgcagcaacagaggaaagtacagaaggcccttctgcaactgaagtgccctctgcctcagaggaaccatccccctcagaggtgccattcccctcagaggagccatccccctcagaggaaccattcccctcagtgaggccattcccctcagtggagctgttcccctcagaggagccattcccctccaaggagccatccccctcagaggaaccatcagcctcggaagagccgtatacaccttcaccccccgtgcccagctggactgagctgcccagctctggggaggaatctggggcccctgatgtcagtggtgacttcacaggcagtggagatgtttcaggacaccttgacttcagtgggcagctgtcaggggacagggcaagtggactgccctctggagacctggactccagtggtcttacttccacagtgggctcaggcctgcctgtggaaagtggactaccctcaggggatgaagagagaattgagtggcccagcactcctacggttggtgaactgccctctggagctgagatcctagagggctctgcctctggagttggggatctcagtggacttccttctggagaagttctagagacctctgcctctggagtaggagacctcagtgggcttccttctggagaagttctagagaccactgcccctggagtagaggacatcagcgggcttccttctggagaagttctagagaccactgcccctggagtagaggacatcagcgggcttccttctggagaagttctagagaccactgcccctggagtagaggacatcagcgggcttccttctggagaagttctagagaccactgcccctggagtagaggacatcagcgggcttccttctggagaagttctagagaccactgcccctggagtagaggacatcagcgggcttccttctggagaagttctagagaccgctgcccctggagtagaggacatcagcgggcttccttctggagaagttctagagaccgctgcccctggagtagaggacatcagcgggcttccttctggagaagttctagagactgctgcccctggagtagaggacatcagcgggcttccttctggagaagttctagagactgctgcccctggagtagaggacatcagcgggcttccttctggagaagttctagagactgctgcccctggagtagaggacatcagcgggcttccttctggagaagttctagagactgctgcccctggagtagaggacatcagcgggcttccttctggagaagttctagagactgctgcccctggagtagaggacatcagcgggcttccttctggagaagttctagagactgctgcccctggagtagaggacatcagcgggcttccttctggagaagttctagagactgctgcccctggagtagaggacatcagcgggcttccttctggagaagttctagagactgctgcccctggagtagaggacatcagcgggcttccttctggagaagttctagagactgctgcccctggagtagaggacatcagcgggcttccttctggagaagttctagagactactgcccctggagtagaggagatcagcgggcttccttctggagaagttctagagactactgcccctggagtagatgagatcagtgggcttccttctggagaagttctagagactactgcccctggagtagaggagatcagcgggcttccttctggagaagttctagagacttctacctctgcggtaggggacctcagtggacttccttctggaggagaagttctagagatttctgtctctggagtagaggacatcagtgggcttccttctggagaggttgtagagacttctgcctctggaatagaggatgtcagtgaacttccttcaggagaaggtctagagacctctgcttctggagtagaggacctcagcaggctcccttctggagaagaagttctagagatttctgcctctggatttggggacctcagtggacttccttctggaggagaaggtctagagacctctgcttctgaagtagggactgacctcagtgggcttccttctggaagggagggtctagagacttcagcttctggagctgaggacctcagtgggttgccttctggaaaagaagacttggtggggtcagcttctggagacttggacttgggcaaactgccttctggaactctaggaagtgggcaagctccagaaacaagtggtcttccctctggatttagtggtgagtattctggggtggaccttggaagtggcccaccctctggcctgcctgactttagtggacttccatctggattcccaactgtttccctagtggattctacattggtggaagtggtcacagcctccactgcaagtgaactggaagggaggggaaccattggcatcagtggtgcaggagaaatatctggactgccctccagtgagctggacattagtgggagagctagtggactcccttcaggaactgaactcagtggccaagcatctgggtctcctgatgtcagtggggaaatacctggactctttggtgtcagtggacagccatcagggtttcctgacactagtggggaaacatctggagtgactgagcttagcgggctgtcctctggacaaccaggtattagtggagaagcatctggagttctttatggcactagtcaaccctttggcataactgatctgagtggagaaacatctggggtccctgatctcagtgggcagccttcagggttaccagggttcagtggggcaacatcaggagtccctgacctggtttctggtaccacgagtggcagcggtgaatcttctgggattacatttgtggacaccagtttggttgaagtggcccctactacatttaaagaagaagaaggcttagggtctgtggaactcagtggcctcccttccggagaggcagatctgtcaggcaaatctgggatggtggatgtcagtggacagttttctggaacagtcgattccagtgggtttacatcccagactccggaattcagtggcctaccaagtggcatagctgaggtcagtggagaatcctccagagctgagattgggagcagcctgccctcgggagcatattatggcagtggaactccatctagtttccccactgtctctcttgtagacagaactttggtggaatctgtaacccaggctccaacagcccaagaggcaggagaagggccttctggcattttagaactcagtggtgctcattctggagcaccagacatgtctggggagcattctggatttctggacctaagtgggctgcagtccgggctgatagagcccagcggagagccaccaggtactccatattttagtggggattttgccagcaccaccaatgtaagtggagaatcctctgtagccatgggcaccagtggagaggcctcaggacttccagaagttactttaatcacttctgagttcgtggagggtgttactgaaccaactatttctcaggaactaggccaaaggccccctgtgacacacacaccccagctttttgagtccagtggaaaagtctccacagctggggacattagtggagctaccccagtgctccctgggtctggagtagaagtatcatcagtcccagaatctagcagtgagacgtccgcctatcctgaagctgggttcggggcatctgccgcccctgaggccagcagagaagattctgggtcccctgatctgagtgaaaccacctctgcattccacgaagctaaccttgagagatcctctggcctaggagtgagcggcagcactttgacatttcaagaaggcgaggcgtccgctgccccagaagtgagtggagaatccaccaccaccagtgatgtggggacagaggcaccaggcttgccttcagccactcccacggcttctggagacaggactgaaatcagcggagacctgtctggtcacacctcgcagctgggcgttgtcatcagcaccagcatcccagagtctgagtggacccagcagacccagcgccctgcagagacgcatctagaaattgagtcctcaagcctcctgtactcaggagaagagactcacacagtcgaaacagccacctccccaacagatgcttccatcccagcttctccggaatggaaacgtgaatcagaatcaactgctgcagcccccgccaggtcctgtgcagaggagccctgtggagctgggacctgcaaggagacagagggacacgtcatatgcctgtgcccccctggctacactggcgagcactgtaacatagaccaggaggtatgtgaggagggctggaacaagtaccagggccactgttaccgccacttcccggaccgcgagacctgggtggatgctgagcgccggtgtcgggagcagcagtcacacctgagcagcatcgtcacccccgaggagcaggagtttgtcaacaacaatgcccaagactaccagtggatcggcctgaacgacaggaccatcgaaggggacttccgctggtcagatggacaccccatgcaatttgagaactggcgccccaaccagcctgacaacttttttgccgctggagaggactgtgtggtgatgatctggcacgagaagggcgagtggaatgatgttccctgcaattaccacctccccttcacgtgtaaaaagggcacagtggcctgcggagagccccctgtggtggagcatgccaggaccttcgggcagaagaaggaccggtatgagatcaattccctggtgcggtaccagtgcacagaggggtttgtccagcgccacatgcccaccatccggtgccagcccagcgggcactgggaggagcctcagatcacctgcacagaccccaccacctacaaacgcagactacagaagcggagctcacggcaccctcggaggagccgccccagcacagcccactgagaagagcttccaggacgcacccaggacgctgagcccaggagcctgccaggctgacgtgcatcccacccagacggtgtcctcttcttgtcgctttttgtcatataaggaatcccattaaagaaggaaaaaaataaatcccacatttgtgtatgcacccactcacccctccaaatcagcaaaaccgcatctaatttgtccgccgaatgccaaagcaaagcaaacttattataacccttggactgagtttagagacatttcttcaatttcccatcgtgcctttccagggaccagtgcagggacagggggagaaggggaggggttaagttaaataaagaagattatttttgtttcctgactttatccaagagcagtgcaatcgttggttatttcacctccagggagagctagggaggagggaggagggctccaaaggagctggaaggagcagaggcctgagagcaggaagaactcggaaccgcagctgaatgtattggatgagaaggagccaggagggctacaccatctgtatgagggaaaagccttgggggagaggggtgggttcctgcctcctgccgagggtaagccggcaggagagagccatcagagggacctccgctgcctgggagttgggttccctccaagggtccctctttcagtgtcctctctctcacctgggtctgccaccctaacaggtggcaactcggcagggctgctgggggcacttcctgcccagtggggggtgccgcccaaccttctcccctccccacccccgcccccgggaccgtgcaggcaccagggttccgtgcacctatttatatttttgaaaactgaagattataatattataataataataaagacattggaagagat

SEQ ID NO: 1486 - DNA, 7526 bp, Homo sapiens
  source 1..7526: mol_type = unassigned DNA
gccaggtgtgtgggactgaagttcttggagaagggagtccaactcttcaaggtgaactatgaccactttactctgggttttcgtgactctgagggtcatcactgcagctgtcactgtagaaacttcagaccatgacaactcgctgagtgtcagcatcccccaaccgtccccgctgagggtcctcctggggacctccctcaccatcccctgctatttcatcgaccccatgcaccctgtgaccaccgccccttctaccgccccactggccccaagaatcaagtggagccgtgtgtccaaggagaaggaggtagtgctgctggtggccactgaagggcgcgtgcgggtcaacagtgcctatcaggacaaggtctcactgcccaactacccggccatccccagtgacgccaccttggaagtccagagcctgcgctccaatgactctggggtctaccgctgcgaggtgatgcatggcatcgaggacagcgaggccaccctggaagtcgtggtgaaaggcatcgtgttccattacagagccatctctacacgctacaccctcgactttgacagggcgcagcgggcctgcctgcagaacagtgccatcattgccacgcctgagcagctgcaggccgcctacgaagacggcttccaccagtgtgacgccggctggctggctgaccagactgtcagataccccatccacactccccgggaaggctgctatggagacaaggatgagtttcctggtgtgaggacgtatggcatccgagacaccaacgagacctatgatgtgtactgcttcgccgaggagatggagggtgaggtcttttatgcaacatctccagagaagttcaccttccaggaagcagccaatgagtgccggcggctgggtgcccggctggccaccacgggccagctctacctggcctggcaggctggcatggacatgtgcagcgccggctggctggccgaccgcagcgtgcgctaccccatctccaaggcccggcccaactgcggtggcaacctcctgggcgtgaggaccgtctacgtgcatgccaaccagacgggctaccccgacccctcatcccgctacgacgccatctgctacacaggtgaagactttgtggacatcccagaaaacttctttggagtggggggtgaggaggacatcaccgtccagacagtgacctggcctgacatggagctgccactgcctcgaaacatcactgagggtgaagcccgaggcagcgtgatccttaccgtaaagcccatcttcgaggtctcccccagtcccctggaacccgaggagcccttcacgtttgcccctgaaataggggccactgccttcgctgaggttgagaatgagactggagaggccaccaggccctggggctttcccacacctggcctgggccctgccacggcattcaccagtgaggacctcgtcgtgcaggtgaccgctgtccctgggcagccgcatttgccagggggggtcgtcttccactaccgcccgggacccacccgctactcgctgacctttgaggaggcacagcaggcctgcctgcgcacgggggcggtcattgcctcgccggagcagctccaggccgcctacgaagcaggctatgagcagtgtgacgccggctggctgcgggaccagaccgtcagataccccattgtgagcccccggaccccatgcgtgggtgacaaggacagcagcccaggggtcaggacctatggcgtgcgcccatcaacagagacctacgatgtctactgctttgtagacagacttgagggggaggtgttcttcgccacacgccttgagcagttcaccttccaggaagcactggagttctgtgaatctcacaatgctacgctggccaccacgggccagctctacgccgcctggagccgcggcctggacaagtgctatgccggctggctggccgacggcagcctccgctaccccatcgtcaccccaaggcctgcctgcggtggggacaagccaggcgtgagaacggtctacctctaccctaaccagacgggcctcccagacccactgtcccggcaccatgccttctgcttccgaggcatttcagcggttccttctccaggagaagaagagggtggcacacccacatcaccctctggtgtggaggagtggatcgtgacccaagtggttcctggtgtggctgctgtccccgtagaagaggagacaactgctgtaccctcaggggagactactgccatcctagagttcaccaccgagccagaaaaccagacagaatgggaaccagcctataccccagtgggcacatccccgctgccagggatccttcctacttggcctcccactggcgcagcaacagaggaaagtacagaaggcccttctgcaactgaagtgccctctgcctcagaggaaccatccccctcagaggtgccattcccctcagaggagccatccccctcagaggaaccattcccctcagtgaggccattcccctcagtggagctgttcccctcagaggagccattcccctccaaggagccatccccctcagaggaaccatcagcctcggaagagccgtatacaccttcaccccccgtgcccagctggactgagctgcccagctctggggaggaatctggggcccctgatgtcagtggtgacttcacaggcagtggagatgtttcaggacaccttgacttcagtgggcagctgtcaggggacagggcaagtggactgccctctggagacctggactccagtggtcttacttccacagtgggctcaggcctgcctgtggaaagtggactaccctcaggggatgaagagagaattgagtggcccagcactcctacggttggtgaactgccctctggagctgagatcctagagggctctgcctctggagttggggatctcagtggacttccttctggagaagttctagagacctctgcctctggagtaggagacctcagtgggcttccttctggagaagttctagagaccactgcccctggagtagaggacatcagcgggcttccttctggagaagttctagagaccactgcccctggagtagaggacatcagcgggcttccttctggagaagttctagagaccactgcccctggagtagaggacatcagcgggcttccttctggagaagttctagagaccactgcccctggagtagaggacatcagcgggcttccttctggagaagttctagagaccactgcccctggagtagaggacatcagcgggcttccttctggagaagttctagagaccactgcccctggagtagaggacatcagcgggcttccttctggagaagttctagagaccgctgcccctggagtagaggacatcagcgggcttccttctggagaagttctagagaccgctgcccctggagtagaggacatcagcgggcttccttctggagaagttctagagaccgctgcccctggagtagaggacatcagcgggcttccttctggagaagttctagagaccgctgcccctggagtagaggacatcagcgggcttccttctggagaagttctagagaccgctgcccctggagtagaggacatcagcgggcttccttctggagaagttctagagaccgctgcccctggagtagaggacatcagcgggcttccttctggagaagttctagagaccgctgcccctggagtagaggacatcagcgggcttccttctggagaagttctagagactgctgcccctggagtagaggacatcagcgggcttccttctggagaagttctagagactgctgcccctggagtagaggacatcagcgggcttccttctggagaagttctagagactgctgcccctggagtagaggacatcagcgggcttccttctggagaagttctagagactgctgcccctggagtagaggacatcagcgggcttccttctggagaagttctagagactgctgcccctggagtagaggacatcagcgggcttccttctggagaagttctagagactgctgcccctggagtagaggacatcagcgggcttccttctggagaagttctagagactgctgcccctggagtagaggacatcagcgggcttccttctggagaagttctagagactgctgcccctggagtagaggacatcagcgggcttccttctggagaagttctagagactgctgcccctggagtagaggacatcagcgggcttccttctggagaagttctagagactactgcccctggagtagaggagatcagcgggcttccttctggagaagttctagagactactgcccctggagtagatgagatcagtgggcttccttctggagaagttctagagactactgcccctggagtagaggagatcagcgggcttccttctggagaagttctagagacttctacctctgcggtaggggacctcagtggacttccttctggaggagaagttctagagatttctgtctctggagtagaggacatcagtgggcttccttctggagaggttgtagagacttctgcctctggaatagaggatgtcagtgaacttccttcaggagaaggtctagagacctctgcttctggagtagaggacctcagcaggctcccttctggagaagaagttctagagatttctgcctctggatttggggacctcagtggacttccttctggaggagaaggtctagagacctctgcttctgaagtagggactgacctcagtgggcttccttctggaagggagggtctagagacttcagcttctggagctgaggacctcagtgggttgccttctggaaaagaagacttggtggggtcagcttctggagacttggacttgggcaaactgccttctggaactctaggaagtgggcaagctccagaaacaagtggtcttccctctggatttagtggtgagtattctggggtggaccttggaagtggcccaccctctggcctgcctgactttagtggacttccatctggattcccaactgtttccctagtggattctacattggtggaagtggtcacagcctccactgcaagtgaactggaagggaggggaaccattggcatcagtggtgcaggagaaatatctggactgccctccagtgagctggacattagtgggagagctagtggactcccttcaggaactgaactcagtggccaagcatctgggtctcctgatgtcagtggggaaatacctggactctttggtgtcagtggacagccatcagggtttcctgacactagtggggaaacatctggagtgactgagcttagcgggctgtcctctggacaaccaggtattagtggagaagcatctggagttctttatggcactagtcaaccctttggcataactgatctgagtggagaaacatctggggtccctgatctcagtgggcagccttcagggttaccagggttcagtggggcaacatcaggagtccctgacctggtttctggtaccacgagtggcagcggtgaatcttctgggattacatttgtggacaccagtttggttgaagtggcccctactacatttaaagaagaagaaggcttagggtctgtggaactcagtggcctcccttccggagaggcagatctgtcaggcaaatctgggatggtggatgtcagtggacagttttctggaacagtcgattccagtgggtttacatcccagactccggaattcagtggcctaccaagtggcatagctgaggtcagtggagaatcctccagagctgagattgggagcagcctgccctcgggagcatattatggcagtggaactccatctagtttccccactgtctctcttgtagacagaactttggtggaatctgtaacccaggctccaacagcccaagaggcaggagaagggccttctggcattttagaactcagtggtgctcattctggagcaccagacatgtctggggagcattctggatttctggacctaagtgggctgcagtccgggctgatagagcccagcggagagccaccaggtactccatattttagtggggattttgccagcaccaccaatgtaagtggagaatcctctgtagccatgggcaccagtggagaggcctcaggacttccagaagttactttaatcacttctgagttcgtggagggtgttactgaaccaactatttctcaggaactaggccaaaggccccctgtgacacacacaccccagctttttgagtccagtggaaaagtctccacagctggggacattagtggagctaccccagtgctccctgggtctggagtagaagtatcatcagtcccagaatctagcagtgagacgtccgcctatcctgaagctgggttcggggcatctgccgcccctgaggccagcagagaagattctgggtcccctgatctgagtgaaaccacctctgcattccacgaagctaaccttgagagatcctctggcctaggagtgagcggcagcactttgacatttcaagaaggcgaggcgtccgctgccccagaagtgagtggagaatccaccaccaccagtgatgtggggacagaggcaccaggcttgccttcagccactcccacggcttctggagacaggactgaaatcagcggagacctgtctggtcacacctcgcagctgggcgttgtcatcagcaccagcatcccagagtctgagtggacccagcagacccagcgccctgcagagacgcatctagaaattgagtcctcaagcctcctgtactcaggagaagagactcacacagtcgaaacagccacctccccaacagatgcttccatcccagcttctccggaatggaaacgtgaatcagaatcaactgctgcagaccaggaggtatgtgaggagggctggaacaagtaccagggccactgttaccgccacttcccggaccgcgagacctgggtggatgctgagcgccggtgtcgggagcagcagtcacacctgagcagcatcgtcacccccgaggagcaggagtttgtcaacaacaatgcccaagactaccagtggatcggcctgaacgacaggaccatcgaaggggacttccgctggtcagatggacaccccatgcaatttgagaactggcgccccaaccagcctgacaacttttttgccgctggagaggactgtgtggtgatgatctggcacgagaagggcgagtggaatgatgttccctgcaattaccacctccccttcacgtgtaaaaagggcacagccaccacctacaaacgcagactacagaagcggagctcacggcaccctcggaggagccgccccagcacagcccactgagaagagcttccaggacgcacccaggacgctgagcccaggagcctgccaggctgacgtgcatcccacccagacggtgtcctcttcttgtcgctttttgtcatataaggaatcccattaaagaaggaaaaaaataaatcccacatttgtgtatgcacccactcacccctccaaa

SEQ ID NO: 1487 - DNA, 8840 bp, Homo sapiens
  source 1..8840: mol_type = unassigned DNA
cacctacctccccgccgctccagagggggctcgcagagctgaggacgcgcgcagcgctgctcaaggtctctctctctcagcaccctcgccggccggcgtctgacgcgggtgccagggtctccgggcacctttcagtgtccattccctcagccagccaggactccgcaacccagcagttgccgctgcggccacagcccgaggggacctgcggacaggacgccggcaggaggaggggtgcgcagcgcccgcgcagagcgtctccctcgctacgcagcgagacccgggcctcccggccccaggagcccccagctgcctcgccaggtgtgtgggactgaagttcttggagaagggagtccaactcttcaaggtgaactatgaccactttactctgggttttcgtgactctgagggtcatcactgcagctgtcactgtagaaacttcagaccatgacaactcgctgagtgtcagcatcccccaaccgtccccgctgagggtcctcctggggacctccctcaccatcccctgctatttcatcgaccccatgcaccctgtgaccaccgccccttctaccgccccactggccccaagaatcaagtggagccgtgtgtccaaggagaaggaggtagtgctgctggtggccactgaagggcgcgtgcgggtcaacagtgcctatcaggacaaggtctcactgcccaactacccggccatccccagtgacgccaccttggaagtccagagcctgcgctccaatgactctggggtctaccgctgcgaggtgatgcatggcatcgaggacagcgaggccaccctggaagtcgtggtgaaaggcatcgtgttccattacagagccatctctacacgctacaccctcgactttgacagggcgcagcgggcctgcctgcagaacagtgccatcattgccacgcctgagcagctgcaggccgcctacgaagacggcttccaccagtgtgacgccggctggctggctgaccagactgtcagataccccatccacactccccgggaaggctgctatggagacaaggatgagtttcctggtgtgaggacgtatggcatccgagacaccaacgagacctatgatgtgtactgcttcgccgaggagatggagggtgaggtcttttatgcaacatctccagagaagttcaccttccaggaagcagccaatgagtgccggcggctgggtgcccggctggccaccacgggccagctctacctggcctggcaggctggcatggacatgtgcagcgccggctggctggccgaccgcagcgtgcgctaccccatctccaaggcccggcccaactgcggtggcaacctcctgggcgtgaggaccgtctacgtgcatgccaaccagacgggctaccccgacccctcatcccgctacgacgccatctgctacacaggtgaagactttgtggacatcccagaaaacttctttggagtggggggtgaggaggacatcaccgtccagacagtgacctggcctgacatggagctgccactgcctcgaaacatcactgagggtgaagcccgaggcagcgtgatccttaccgtaaagcccatcttcgaggtctcccccagtcccctggaacccgaggagcccttcacgtttgcccctgaaataggggccactgccttcgctgaggttgagaatgagactggagaggccaccaggccctggggctttcccacacctggcctgggccctgccacggcattcaccagtgaggacctcgtcgtgcaggtgaccgctgtccctgggcagccgcatttgccagggggggtcgtcttccactaccgcccgggacccacccgctactcgctgacctttgaggaggcacagcaggcctgcctgcgcacgggggcggtcattgcctcgccggagcagctccaggccgcctacgaagcaggctatgagcagtgtgacgccggctggctgcgggaccagaccgtcagataccccattgtgagcccccggaccccatgcgtgggtgacaaggacagcagcccaggggtcaggacctatggcgtgcgcccatcaacagagacctacgatgtctactgctttgtagacagacttgagggggaggtgttcttcgccacacgccttgagcagttcaccttccaggaagcactggagttctgtgaatctcacaatgctacgctggccaccacgggccagctctacgccgcctggagccgcggcctggacaagtgctatgccggctggctggccgacggcagcctccgctaccccatcgtcaccccaaggcctgcctgcggtggggacaagccaggcgtgagaacggtctacctctaccctaaccagacgggcctcccagacccactgtcccggcaccatgccttctgcttccgaggcatttcagcggttccttctccaggagaagaagagggtggcacacccacatcaccctctggtgtggaggagtggatcgtgacccaagtggttcctggtgtggctgctgtccccgtagaagaggagacaactgctgtaccctcaggggagactactgccatcctagagttcaccaccgagccagaaaaccagacagaatgggaaccagcctataccccagtgggcacatccccgctgccagggatccttcctacttggcctcccactggcgcagcaacagaggaaagtacagaaggcccttctgcaactgaagtgccctctgcctcagaggaaccatccccctcagaggtgccattcccctcagaggagccatccccctcagaggaaccattcccctcagtgaggccattcccctcagtggagctgttcccctcagaggagccattcccctccaaggagccatccccctcagaggaaccatcagcctcggaagagccgtatacaccttcaccccccgtgcccagctggactgagctgcccagctctggggaggaatctggggcccctgatgtcagtggtgacttcacaggcagtggagatgtttcaggacaccttgacttcagtgggcagctgtcaggggacagggcaagtggactgccctctggagacctggactccagtggtcttacttccacagtgggctcaggcctgcctgtggaaagtggactaccctcaggggatgaagagagaattgagtggcccagcactcctacggttggtgaactgccctctggagctgagatcctagagggctctgcctctggagttggggatctcagtggacttccttctggagaagttctagagacctctgcctctggagtaggagacctcagtgggcttccttctggagaagttctagagaccactgcccctggagtagaggacatcagcgggcttccttctggagaagttctagagaccactgcccctggagtagaggacatcagcgggcttccttctggagaagttctagagaccactgcccctggagtagaggacatcagcgggcttccttctggagaagttctagagaccactgcccctggagtagaggacatcagcgggcttccttctggagaagttctagagaccactgcccctggagtagaggacatcagcgggcttccttctggagaagttctagagaccactgcccctggagtagaggacatcagcgggcttccttctggagaagttctagagaccgctgcccctggagtagaggacatcagcgggcttccttctggagaagttctagagaccgctgcccctggagtagaggacatcagcgggcttccttctggagaagttctagagaccgctgcccctggagtagaggacatcagcgggcttccttctggagaagttctagagaccgctgcccctggagtagaggacatcagcgggcttccttctggagaagttctagagaccgctgcccctggagtagaggacatcagcgggcttccttctggagaagttctagagaccgctgcccctggagtagaggacatcagcgggcttccttctggagaagttctagagaccgctgcccctggagtagaggacatcagcgggcttccttctggagaagttctagagactgctgcccctggagtagaggacatcagcgggcttccttctggagaagttctagagactgctgcccctggagtagaggacatcagcgggcttccttctggagaagttctagagactgctgcccctggagtagaggacatcagcgggcttccttctggagaagttctagagactgctgcccctggagtagaggacatcagcgggcttccttctggagaagttctagagactgctgcccctggagtagaggacatcagcgggcttccttctggagaagttctagagactgctgcccctggagtagaggacatcagcgggcttccttctggagaagttctagagactgctgcccctggagtagaggacatcagcgggcttccttctggagaagttctagagactgctgcccctggagtagaggacatcagcgggcttccttctggagaagttctagagactgctgcccctggagtagaggacatcagcgggcttccttctggagaagttctagagactactgcccctggagtagaggagatcagcgggcttccttctggagaagttctagagactactgcccctggagtagatgagatcagtgggcttccttctggagaagttctagagactactgcccctggagtagaggagatcagcgggcttccttctggagaagttctagagacttctacctctgcggtaggggacctcagtggacttccttctggaggagaagttctagagatttctgtctctggagtagaggacatcagtgggcttccttctggagaggttgtagagacttctgcctctggaatagaggatgtcagtgaacttccttcaggagaaggtctagagacctctgcttctggagtagaggacctcagcaggctcccttctggagaagaagttctagagatttctgcctctggatttggggacctcagtggacttccttctggaggagaaggtctagagacctctgcttctgaagtagggactgacctcagtgggcttccttctggaagggagggtctagagacttcagcttctggagctgaggacctcagtgggttgccttctggaaaagaagacttggtggggtcagcttctggagacttggacttgggcaaactgccttctggaactctaggaagtgggcaagctccagaaacaagtggtcttccctctggatttagtggtgagtattctggggtggaccttggaagtggcccaccctctggcctgcctgactttagtggacttccatctggattcccaactgtttccctagtggattctacattggtggaagtggtcacagcctccactgcaagtgaactggaagggaggggaaccattggcatcagtggtgcaggagaaatatctggactgccctccagtgagctggacattagtgggagagctagtggactcccttcaggaactgaactcagtggccaagcatctgggtctcctgatgtcagtggggaaatacctggactctttggtgtcagtggacagccatcagggtttcctgacactagtggggaaacatctggagtgactgagcttagcgggctgtcctctggacaaccaggtattagtggagaagcatctggagttctttatggcactagtcaaccctttggcataactgatctgagtggagaaacatctggggtccctgatctcagtgggcagccttcagggttaccagggttcagtggggcaacatcaggagtccctgacctggtttctggtaccacgagtggcagcggtgaatcttctgggattacatttgtggacaccagtttggttgaagtggcccctactacatttaaagaagaagaaggcttagggtctgtggaactcagtggcctcccttccggagaggcagatctgtcaggcaaatctgggatggtggatgtcagtggacagttttctggaacagtcgattccagtgggtttacatcccagactccggaattcagtggcctaccaagtggcatagctgaggtcagtggagaatcctccagagctgagattgggagcagcctgccctcgggagcatattatggcagtggaactccatctagtttccccactgtctctcttgtagacagaactttggtggaatctgtaacccaggctccaacagcccaagaggcaggagaagggccttctggcattttagaactcagtggtgctcattctggagcaccagacatgtctggggagcattctggatttctggacctaagtgggctgcagtccgggctgatagagcccagcggagagccaccaggtactccatattttagtggggattttgccagcaccaccaatgtaagtggagaatcctctgtagccatgggcaccagtggagaggcctcaggacttccagaagttactttaatcacttctgagttcgtggagggtgttactgaaccaactatttctcaggaactaggccaaaggccccctgtgacacacacaccccagctttttgagtccagtggaaaagtctccacagctggggacattagtggagctaccccagtgctccctgggtctggagtagaagtatcatcagtcccagaatctagcagtgagacgtccgcctatcctgaagctgggttcggggcatctgccgcccctgaggccagcagagaagattctgggtcccctgatctgagtgaaaccacctctgcattccacgaagctaaccttgagagatcctctggcctaggagtgagcggcagcactttgacatttcaagaaggcgaggcgtccgctgccccagaagtgagtggagaatccaccaccaccagtgatgtggggacagaggcaccaggcttgccttcagccactcccacggcttctggagacaggactgaaatcagcggagacctgtctggtcacacctcgcagctgggcgttgtcatcagcaccagcatcccagagtctgagtggacccagcagacccagcgccctgcagagacgcatctagaaattgagtcctcaagcctcctgtactcaggagaagagactcacacagtcgaaacagccacctccccaacagatgcttccatcccagcttctccggaatggaaacgtgaatcagaatcaactgctgcagcccccgccaggtcctgtgcagaggagccctgtggagctgggacctgcaaggagacagagggacacgtcatatgcctgtgcccccctggctacactggcgagcactgtaacatagaccaggaggtatgtgaggagggctggaacaagtaccagggccactgttaccgccacttcccggaccgcgagacctgggtggatgctgagcgccggtgtcgggagcagcagtcacacctgagcagcatcgtcacccccgaggagcaggagtttgtcaacaacaatgcccaagactaccagtggatcggcctgaacgacaggaccatcgaaggggacttccgctggtcagatggacaccccatgcaatttgagaactggcgccccaaccagcctgacaacttttttgccgctggagaggactgtgtggtgatgatctggcacgagaagggcgagtggaatgatgttccctgcaattaccacctccccttcacgtgtaaaaagggcacagtggcctgcggagagccccctgtggtggagcatgccaggaccttcgggcagaagaaggaccggtatgagatcaattccctggtgcggtaccagtgcacagaggggtttgtccagcgccacatgcccaccatccggtgccagcccagcgggcactgggaggagcctcagatcacctgcacagaccccaccacctacaaacgcagactacagaagcggagctcacggcaccctcggaggagccgccccagcacagcccactgagaagagcttccaggacgcacccaggacgctgagcccaggagcctgccaggctgacgtgcatcccacccagacggtgtcctcttcttgtcgctttttgtcatataaggaatcccattaaagaaggaaaaaaataaatcccacatttgtgtatgcacccactcacccctccaaatcagcaaaaccgcatctaatttgtccgccgaatgccaaagcaaagcaaacttattataacccttggactgagtttagagacatttcttcaatttcccatcgtgcctttccagggaccagtgcagggacagggggagaaggggaggggttaagttaaataaagaagattatttttgtttcctgactttatccaagagcagtgcaatcgttggttatttcacctccagggagagctagggaggagggaggagggctccaaaggagctggaaggagcagaggcctgagagcaggaagaactcggaaccgcagctgaatgtattggatgagaaggagccaggagggctacaccatctgtatgagggaaaagccttgggggagaggggtgggttcctgcctcctgccgagggtaagccggcaggagagagccatcagagggacctccgctgcctgggagttgggttccctccaagggtccctctttcagtgtcctctctctcacctgggtctgccaccctaacaggtggcaactcggcagggctgctgggggcacttcctgcccagtggggggtgccgcccaaccttctcccctccccacccccgcccccgggaccgtgcaggcaccagggttccgtgcacctatttatatttttgaaaactgaagattataatattataataataataaagacattggaagagat

SEQ ID NO: 1488 - DNA, 7628 bp, Homo sapiens
  source 1..7628: mol_type = unassigned DNA
gccaggtgtgtgggactgaagttcttggagaagggagtccaactcttcaaggtgaactatgaccactttactctgggttttcgtgactctgagggtcatcactgcagctgtcactgtagaaacttcagaccatgacaactcgctgagtgtcagcatcccccaaccgtccccgctgagggtcctcctggggacctccctcaccatcccctgctatttcatcgaccccatgcaccctgtgaccaccgccccttctaccgccccactggccccaagaatcaagtggagccgtgtgtccaaggagaaggaggtagtgctgctggtggccactgaagggcgcgtgcgggtcaacagtgcctatcaggacaaggtctcactgcccaactacccggccatccccagtgacgccaccttggaagtccagagcctgcgctccaatgactctggggtctaccgctgcgaggtgatgcatggcatcgaggacagcgaggccaccctggaagtcgtggtgaaaggcatcgtgttccattacagagccatctctacacgctacaccctcgactttgacagggcgcagcgggcctgcctgcagaacagtgccatcattgccacgcctgagcagctgcaggccgcctacgaagacggcttccaccagtgtgacgccggctggctggctgaccagactgtcagataccccatccacactccccgggaaggctgctatggagacaaggatgagtttcctggtgtgaggacgtatggcatccgagacaccaacgagacctatgatgtgtactgcttcgccgaggagatggagggtgaggtcttttatgcaacatctccagagaagttcaccttccaggaagcagccaatgagtgccggcggctgggtgcccggctggccaccacgggccagctctacctggcctggcaggctggcatggacatgtgcagcgccggctggctggccgaccgcagcgtgcgctaccccatctccaaggcccggcccaactgcggtggcaacctcctgggcgtgaggaccgtctacgtgcatgccaaccagacgggctaccccgacccctcatcccgctacgacgccatctgctacacaggtgaagactttgtggacatcccagaaaacttctttggagtggggggtgaggaggacatcaccgtccagacagtgacctggcctgacatggagctgccactgcctcgaaacatcactgagggtgaagcccgaggcagcgtgatccttaccgtaaagcccatcttcgaggtctcccccagtcccctggaacccgaggagcccttcacgtttgcccctgaaataggggccactgccttcgctgaggttgagaatgagactggagaggccaccaggccctggggctttcccacacctggcctgggccctgccacggcattcaccagtgaggacctcgtcgtgcaggtgaccgctgtccctgggcagccgcatttgccagggggggtcgtcttccactaccgcccgggacccacccgctactcgctgacctttgaggaggcacagcaggcctgcctgcgcacgggggcggtcattgcctcgccggagcagctccaggccgcctacgaagcaggctatgagcagtgtgacgccggctggctgcgggaccagaccgtcagataccccattgtgagcccccggaccccatgcgtgggtgacaaggacagcagcccaggggtcaggacctatggcgtgcgcccatcaacagagacctacgatgtctactgctttgtagacagacttgagggggaggtgttcttcgccacacgccttgagcagttcaccttccaggaagcactggagttctgtgaatctcacaatgctacgctggccaccacgggccagctctacgccgcctggagccgcggcctggacaagtgctatgccggctggctggccgacggcagcctccgctaccccatcgtcaccccaaggcctgcctgcggtggggacaagccaggcgtgagaacggtctacctctaccctaaccagacgggcctcccagacccactgtcccggcaccatgccttctgcttccgaggcatttcagcggttccttctccaggagaagaagagggtggcacacccacatcaccctctggtgtggaggagtggatcgtgacccaagtggttcctggtgtggctgctgtccccgtagaagaggagacaactgctgtaccctcaggggagactactgccatcctagagttcaccaccgagccagaaaaccagacagaatgggaaccagcctataccccagtgggcacatccccgctgccagggatccttcctacttggcctcccactggcgcagcaacagaggaaagtacagaaggcccttctgcaactgaagtgccctctgcctcagaggaaccatccccctcagaggtgccattcccctcagaggagccatccccctcagaggaaccattcccctcagtgaggccattcccctcagtggagctgttcccctcagaggagccattcccctccaaggagccatccccctcagaggaaccatcagcctcggaagagccgtatacaccttcaccccccgtgcccagctggactgagctgcccagctctggggaggaatctggggcccctgatgtcagtggtgacttcacaggcagtggagatgtttcaggacaccttgacttcagtgggcagctgtcaggggacagggcaagtggactgccctctggagacctggactccagtggtcttacttccacagtgggctcaggcctgcctgtggaaagtggactaccctcaggggatgaagagagaattgagtggcccagcactcctacggttggtgaactgccctctggagctgagatcctagagggctctgcctctggagttggggatctcagtggacttccttctggagaagttctagagacctctgcctctggagtaggagacctcagtgggcttccttctggagaagttctagagaccactgcccctggagtagaggacatcagcgggcttccttctggagaagttctagagaccactgcccctggagtagaggacatcagcgggcttccttctggagaagttctagagaccactgcccctggagtagaggacatcagcgggcttccttctggagaagttctagagaccactgcccctggagtagaggacatcagcgggcttccttctggagaagttctagagaccactgcccctggagtagaggacatcagcgggcttccttctggagaagttctagagaccactgcccctggagtagaggacatcagcgggcttccttctggagaagttctagagaccgctgcccctggagtagaggacatcagcgggcttccttctggagaagttctagagaccgctgcccctggagtagaggacatcagcgggcttccttctggagaagttctagagaccgctgcccctggagtagaggacatcagcgggcttccttctggagaagttctagagaccgctgcccctggagtagaggacatcagcgggcttccttctggagaagttctagagaccgctgcccctggagtagaggacatcagcgggcttccttctggagaagttctagagaccgctgcccctggagtagaggacatcagcgggcttccttctggagaagttctagagaccgctgcccctggagtagaggacatcagcgggcttccttctggagaagttctagagactgctgcccctggagtagaggacatcagcgggcttccttctggagaagttctagagactgctgcccctggagtagaggacatcagcgggcttccttctggagaagttctagagactgctgcccctggagtagaggacatcagcgggcttccttctggagaagttctagagactgctgcccctggagtagaggacatcagcgggcttccttctggagaagttctagagactgctgcccctggagtagaggacatcagcgggcttccttctggagaagttctagagactgctgcccctggagtagaggacatcagcgggcttccttctggagaagttctagagactgctgcccctggagtagaggacatcagcgggcttccttctggagaagttctagagactgctgcccctggagtagaggacatcagcgggcttccttctggagaagttctagagactgctgcccctggagtagaggacatcagcgggcttccttctggagaagttctagagactactgcccctggagtagaggagatcagcgggcttccttctggagaagttctagagactactgcccctggagtagatgagatcagtgggcttccttctggagaagttctagagactactgcccctggagtagaggagatcagcgggcttccttctggagaagttctagagacttctacctctgcggtaggggacctcagtggacttccttctggaggagaagttctagagatttctgtctctggagtagaggacatcagtgggcttccttctggagaggttgtagagacttctgcctctggaatagaggatgtcagtgaacttccttcaggagaaggtctagagacctctgcttctggagtagaggacctcagcaggctcccttctggagaagaagttctagagatttctgcctctggatttggggacctcagtggacttccttctggaggagaaggtctagagacctctgcttctgaagtagggactgacctcagtgggcttccttctggaagggagggtctagagacttcagcttctggagctgaggacctcagtgggttgccttctggaaaagaagacttggtggggtcagcttctggagacttggacttgggcaaactgccttctggaactctaggaagtgggcaagctccagaaacaagtggtcttccctctggatttagtggtgagtattctggggtggaccttggaagtggcccaccctctggcctgcctgactttagtggacttccatctggattcccaactgtttccctagtggattctacattggtggaagtggtcacagcctccactgcaagtgaactggaagggaggggaaccattggcatcagtggtgcaggagaaatatctggactgccctccagtgagctggacattagtgggagagctagtggactcccttcaggaactgaactcagtggccaagcatctgggtctcctgatgtcagtggggaaatacctggactctttggtgtcagtggacagccatcagggtttcctgacactagtggggaaacatctggagtgactgagcttagcgggctgtcctctggacaaccaggtattagtggagaagcatctggagttctttatggcactagtcaaccctttggcataactgatctgagtggagaaacatctggggtccctgatctcagtgggcagccttcagggttaccagggttcagtggggcaacatcaggagtccctgacctggtttctggtaccacgagtggcagcggtgaatcttctgggattacatttgtggacaccagtttggttgaagtggcccctactacatttaaagaagaagaaggcttagggtctgtggaactcagtggcctcccttccggagaggcagatctgtcaggcaaatctgggatggtggatgtcagtggacagttttctggaacagtcgattccagtgggtttacatcccagactccggaattcagtggcctaccaagtggcatagctgaggtcagtggagaatcctccagagctgagattgggagcagcctgccctcgggagcatattatggcagtggaactccatctagtttccccactgtctctcttgtagacagaactttggtggaatctgtaacccaggctccaacagcccaagaggcaggagaagggccttctggcattttagaactcagtggtgctcattctggagcaccagacatgtctggggagcattctggatttctggacctaagtgggctgcagtccgggctgatagagcccagcggagagccaccaggtactccatattttagtggggattttgccagcaccaccaatgtaagtggagaatcctctgtagccatgggcaccagtggagaggcctcaggacttccagaagttactttaatcacttctgagttcgtggagggtgttactgaaccaactatttctcaggaactaggccaaaggccccctgtgacacacacaccccagctttttgagtccagtggaaaagtctccacagctggggacattagtggagctaccccagtgctccctgggtctggagtagaagtatcatcagtcccagaatctagcagtgagacgtccgcctatcctgaagctgggttcggggcatctgccgcccctgaggccagcagagaagattctgggtcccctgatctgagtgaaaccacctctgcattccacgaagctaaccttgagagatcctctggcctaggagtgagcggcagcactttgacatttcaagaaggcgaggcgtccgctgccccagaagtgagtggagaatccaccaccaccagtgatgtggggacagaggcaccaggcttgccttcagccactcccacggcttctggagacaggactgaaatcagcggagacctgtctggtcacacctcgcagctgggcgttgtcatcagcaccagcatcccagagtctgagtggacccagcagacccagcgccctgcagagacgcatctagaaattgagtcctcaagcctcctgtactcaggagaagagactcacacagtcgaaacagccacctccccaacagatgcttccatcccagcttctccggaatggaaacgtgaatcagaatcaactgctgcagaccaggaggtatgtgaggagggctggaacaagtaccagggccactgttaccgccacttcccggaccgcgagacctgggtggatgctgagcgccggtgtcgggagcagcagtcacacctgagcagcatcgtcacccccgaggagcaggagtttgtcaacaacaatgcccaagactaccagtggatcggcctgaacgacaggaccatcgaaggggacttccgctggtcagatggacaccccatgcaatttgagaactggcgccccaaccagcctgacaacttttttgccgctggagaggactgtgtggtgatgatctggcacgagaagggcgagtggaatgatgttccctgcaattaccacctccccttcacgtgtaaaaagggcacagtggcctgcggagagccccctgtggtggagcatgccaggaccttcgggcagaagaaggaccggtatgagatcaattccctggtgcggtaccagtgcacagaggggtttgtccagcgccacatgcccaccatccggtgccagcccagcgggcactgggaggagcctcagatcacctgcacagaccccaccacctacaaacgcagactacagaagcggagctcacggcaccctcggaggagccgccccagcacagcccactgagaagagcttccaggacgcacccaggacgctgagcccaggagcctgccaggctgacgtgcatcccacccagacggtgtcctcttcttgtcgc

SEQ ID NO: 1489 - DNA, 7593 bp, Homo sapiens
  source 1..7593: mol_type = unassigned DNA
atgaccactttactctgggttttcgtgactctgagggtcatcactgcagctgtcactgtagaaacttcagaccatgacaactcgctgagtgtcagcatcccccaaccgtccccgctgagggtcctcctggggacctccctcaccatcccctgctatttcatcgaccccatgcaccctgtgaccaccgccccttctaccgccccactggccccaagaatcaagtggagccgtgtgtccaaggagaaggaggtagtgctgctggtggccactgaagggcgcgtgcgggtcaacagtgcctatcaggacaaggtctcactgcccaactacccggccatccccagtgacgccaccttggaagtccagagcctgcgctccaatgactctggggtctaccgctgcgaggtgatgcatggcatcgaggacagcgaggccaccctggaagtcgtggtgaaaggcatcgtgttccattacagagccatctctacacgctacaccctcgactttgacagggcgcagcgggcctgcctgcagaacagtgccatcattgccacgcctgagcagctgcaggccgcctacgaagacggcttccaccagtgtgacgccggctggctggctgaccagactgtcagataccccatccacactccccgggaaggctgctatggagacaaggatgagtttcctggtgtgaggacgtatggcatccgagacaccaacgagacctatgatgtgtactgcttcgccgaggagatggagggtgaggtcttttatgcaacatctccagagaagttcaccttccaggaagcagccaatgagtgccggcggctgggtgcccggctggccaccacgggccagctctacctggcctggcaggctggcatggacatgtgcagcgccggctggctggccgaccgcagcgtgcgctaccccatctccaaggcccggcccaactgcggtggcaacctcctgggcgtgaggaccgtctacgtgcatgccaaccagacgggctaccccgacccctcatcccgctacgacgccatctgctacacaggtgaagactttgtggacatcccagaaaacttctttggagtggggggtgaggaggacatcaccgtccagacagtgacctggcctgacatggagctgccactgcctcgaaacatcactgagggtgaagcccgaggcagcgtgatccttaccgtaaagcccatcttcgaggtctcccccagtcccctggaacccgaggagcccttcacgtttgcccctgaaataggggccactgccttcgctgaggttgagaatgagactggagaggccaccaggccctggggctttcccacacctggcctgggccctgccacggcattcaccagtgaggacctcgtcgtgcaggtgaccgctgtccctgggcagccgcatttgccagggggggtcgtcttccactaccgcccgggacccacccgctactcgctgacctttgaggaggcacagcaggcctgcctgcgcacgggggcggtcattgcctcgccggagcagctccaggccgcctacgaagcaggctatgagcagtgtgacgccggctggctgcgggaccagaccgtcagataccccattgtgagcccccggaccccatgcgtgggtgacaaggacagcagcccaggggtcaggacctatggcgtgcgcccatcaacagagacctacgatgtctactgctttgtagacagacttgagggggaggtgttcttcgccacacgccttgagcagttcaccttccaggaagcactggagttctgtgaatctcacaatgctacgctggccaccacgggccagctctacgccgcctggagccgcggcctggacaagtgctatgccggctggctggccgacggcagcctccgctaccccatcgtcaccccaaggcctgcctgcggtggggacaagccaggcgtgagaacggtctacctctaccctaaccagacgggcctcccagacccactgtcccggcaccatgccttctgcttccgaggcatttcagcggttccttctccaggagaagaagagggtggcacacccacatcaccctctggtgtggaggagtggatcgtgacccaagtggttcctggtgtggctgctgtccccgtagaagaggagacaactgctgtaccctcaggggagactactgccatcctagagttcaccaccgagccagaaaaccagacagaatgggaaccagcctataccccagtgggcacatccccgctgccagggatccttcctacttggcctcccactggcgcagcaacagaggaaagtacagaaggcccttctgcaactgaagtgccctctgcctcagaggaaccatccccctcagaggtgccattcccctcagaggagccatccccctcagaggaaccattcccctcagtgaggccattcccctcagtggagctgttcccctcagaggagccattcccctccaaggagccatccccctcagaggaaccatcagcctcggaagagccgtatacaccttcaccccccgtgcccagctggactgagctgcccagctctggggaggaatctggggcccctgatgtcagtggtgacttcacaggcagtggagatgtttcaggacaccttgacttcagtgggcagctgtcaggggacagggcaagtggactgccctctggagacctggactccagtggtcttacttccacagtgggctcaggcctgcctgtggaaagtggactaccctcaggggatgaagagagaattgagtggcccagcactcctacggttggtgaactgccctctggagctgagatcctagagggctctgcctctggagttggggatctcagtggacttccttctggagaagttctagagacctctgcctctggagtaggagacctcagtgggcttccttctggagaagttctagagaccactgcccctggagtagaggacatcagcgggcttccttctggagaagttctagagaccactgcccctggagtagaggacatcagcgggcttccttctggagaagttctagagaccactgcccctggagtagaggacatcagcgggcttccttctggagaagttctagagaccactgcccctggagtagaggacatcagcgggcttccttctggagaagttctagagaccactgcccctggagtagaggacatcagcgggcttccttctggagaagttctagagaccactgcccctggagtagaggacatcagcgggcttccttctggagaagttctagagaccgctgcccctggagtagaggacatcagcgggcttccttctggagaagttctagagaccgctgcccctggagtagaggacatcagcgggcttccttctggagaagttctagagaccgctgcccctggagtagaggacatcagcgggcttccttctggagaagttctagagaccgctgcccctggagtagaggacatcagcgggcttccttctggagaagttctagagaccgctgcccctggagtagaggacatcagcgggcttccttctggagaagttctagagaccgctgcccctggagtagaggacatcagcgggcttccttctggagaagttctagagaccgctgcccctggagtagaggacatcagcgggcttccttctggagaagttctagagactgctgcccctggagtagaggacatcagcgggcttccttctggagaagttctagagactgctgcccctggagtagaggacatcagcgggcttccttctggagaagttctagagactgctgcccctggagtagaggacatcagcgggcttccttctggagaagttctagagactgctgcccctggagtagaggacatcagcgggcttccttctggagaagttctagagactgctgcccctggagtagaggacatcagcgggcttccttctggagaagttctagagactgctgcccctggagtagaggacatcagcgggcttccttctggagaagttctagagactgctgcccctggagtagaggacatcagcgggcttccttctggagaagttctagagactgctgcccctggagtagaggacatcagcgggcttccttctggagaagttctagagactgctgcccctggagtagaggacatcagcgggcttccttctggagaagttctagagactactgcccctggagtagaggagatcagcgggcttccttctggagaagttctagagactactgcccctggagtagatgagatcagtgggcttccttctggagaagttctagagactactgcccctggagtagaggagatcagcgggcttccttctggagaagttctagagacttctacctctgcggtaggggacctcagtggacttccttctggaggagaagttctagagatttctgtctctggagtagaggacatcagtgggcttccttctggagaggttgtagagacttctgcctctggaatagaggatgtcagtgaacttccttcaggagaaggtctagagacctctgcttctggagtagaggacctcagcaggctcccttctggagaagaagttctagagatttctgcctctggatttggggacctcagtggacttccttctggaggagaaggtctagagacctctgcttctgaagtagggactgacctcagtgggcttccttctggaagggagggtctagagacttcagcttctggagctgaggacctcagtgggttgccttctggaaaagaagacttggtggggtcagcttctggagacttggacttgggcaaactgccttctggaactctaggaagtgggcaagctccagaaacaagtggtcttccctctggatttagtggtgagtattctggggtggaccttggaagtggcccaccctctggcctgcctgactttagtggacttccatctggattcccaactgtttccctagtggattctacattggtggaagtggtcacagcctccactgcaagtgaactggaagggaggggaaccattggcatcagtggtgcaggagaaatatctggactgccctccagtgagctggacattagtgggagagctagtggactcccttcaggaactgaactcagtggccaagcatctgggtctcctgatgtcagtggggaaatacctggactctttggtgtcagtggacagccatcagggtttcctgacactagtggggaaacatctggagtgactgagcttagcgggctgtcctctggacaaccaggtattagtggagaagcatctggagttctttatggcactagtcaaccctttggcataactgatctgagtggagaaacatctggggtccctgatctcagtgggcagccttcagggttaccagggttcagtggggcaacatcaggagtccctgacctggtttctggtaccacgagtggcagcggtgaatcttctgggattacatttgtggacaccagtttggttgaagtggcccctactacatttaaagaagaagaaggcttagggtctgtggaactcagtggcctcccttccggagaggcagatctgtcaggcaaatctgggatggtggatgtcagtggacagttttctggaacagtcgattccagtgggtttacatcccagactccggaattcagtggcctaccaagtggcatagctgaggtcagtggagaatcctccagagctgagattgggagcagcctgccctcgggagcatattatggcagtggaactccatctagtttccccactgtctctcttgtagacagaactttggtggaatctgtaacccaggctccaacagcccaagaggcaggagaagggccttctggcattttagaactcagtggtgctcattctggagcaccagacatgtctggggagcattctggatttctggacctaagtgggctgcagtccgggctgatagagcccagcggagagccaccaggtactccatattttagtggggattttgccagcaccaccaatgtaagtggagaatcctctgtagccatgggcaccagtggagaggcctcaggacttccagaagttactttaatcacttctgagttcgtggagggtgttactgaaccaactatttctcaggaactaggccaaaggccccctgtgacacacacaccccagctttttgagtccagtggaaaagtctccacagctggggacattagtggagctaccccagtgctccctgggtctggagtagaagtatcatcagtcccagaatctagcagtgagacgtccgcctatcctgaagctgggttcggggcatctgccgcccctgaggccagcagagaagattctgggtcccctgatctgagtgaaaccacctctgcattccacgaagctaaccttgagagatcctctggcctaggagtgagcggcagcactttgacatttcaagaaggcgaggcgtccgctgccccagaagtgagtggagaatccaccaccaccagtgatgtggggacagaggcaccaggcttgccttcagccactcccacggcttctggagacaggactgaaatcagcggagacctgtctggtcacacctcgcagctgggcgttgtcatcagcaccagcatcccagagtctgagtggacccagcagacccagcgccctgcagagacgcatctagaaattgagtcctcaagcctcctgtactcaggagaagagactcacacagtcgaaacagccacctccccaacagatgcttccatcccagcttctccggaatggaaacgtgaatcagaatcaactgctgcagcccccgccaggtcctgtgcagaggagccctgtggagctgggacctgcaaggagacagagggacacgtcatatgcctgtgcccccctggctacactggcgagcactgtaacatagaccaggaggtatgtgaggagggctggaacaagtaccagggccactgttaccgccacttcccggaccgcgagacctgggtggatgctgagcgccggtgtcgggagcagcagtcacacctgagcagcatcgtcacccccgaggagcaggagtttgtcaacaacaatgcccaagactaccagtggatcggcctgaacgacaggaccatcgaaggggacttccgctggtcagatggacaccccatgcaatttgagaactggcgccccaaccagcctgacaacttttttgccgctggagaggactgtgtggtgatgatctggcacgagaagggcgagtggaatgatgttccctgcaattaccacctccccttcacgtgtaaaaagggcacagtggcctgcggagagccccctgtggtggagcatgccaggaccttcgggcagaagaaggaccggtatgagatcaattccctggtgcggtaccagtgcacagaggggtttgtccagcgccacatgcccaccatccggtgccagcccagcgggcactgggaggagcctcagatcacctgcacagaccccaccacctacaaacgcagactacagaagcggagctcacggcaccctcggaggagccgccccagcacagcccactga

SEQ ID NO: 1490 - DNA, 764 bp, Homo sapiens
  source 1..764: mol_type = unassigned DNA
agctcctaggtccctgtcctgtggaaatttgtggaccctgggcaccctctcttgctcccaaattttaatcggctcctggaaacctcaccccaaattggagataggcactcctcttgtagaacaaaaggctcaggttcagggagtgagggcctgaactgtgcccccaccctccaggaagggtccttcacggcctggctgcagggatcagtcacgtgtggcccttcattaggccctgccatataagccaagggcacggggtggccgggaactctctaggcaagaatcccggaggcagaggccatgctgaccgcagcggtgctgagctgtgccctgctgctggcactgcctgccacgcgaggagcccagatgggcttggcccccatggagggcatcagaaggcctgaccaggccctgctcccagagctcccaggcctgggcctgcgggccccactgaagaagacaactgcagaacaggcagaagaggatctgttgcaggaggctcaggccttggcagaggtactagacctgcaggaccgcgagccccgctcctcacgtcgctgcgtaaggctgcatgagtcctgcctgggacagcaggtgccttgctgtgacccatgtgccacgtgctactgccgcttcttcaatgccttctgctactgccgcaagctgggtactgccatgaatccctgcagccgcacctagctggccaacgtcagggtcggggctagggtaggggcaaggaaactcgaataaaggatgggaccaac

SEQ ID NO: 1491 - DNA, 586 bp, Homo sapiens
  source 1..586: mol_type = unassigned DNA
gcctcctgggatggatgtcacccgcttactcctggccaccctgctggtcttcctctgcttcttcactgccaacagccacctgccacctgaggagaagctccgagatgacaggagcctgagaagcaactcctctgtgaacctactggatgtcccttctgtctctattgtggcgctgaacaagaaatccaaacagatcggcagaaaagcagcagaaaagaaaagatcttctaagaaggaggcttcgatgaagaaagtggtgcggccccggacccccctatctgcgccctgcgtggccacccgcaacagctgcaagccgccggcacccgcctgctgcgacccgtgcgcctcctgccagtgccgcttcttccgcagcgcctgctcctgccgcgtgctcagcctcaactgctgagcgcccccactcccggccgcgagcaggcagggcttcggggacgcggggcgcttctcgggcgggtgatccctaacagggcggcttcccagggctgcaggcgggcggaggttccaggagatgggacttcagggagacctggcttgggctaaaatcgaaatacaatatatataggctgct

SEQ ID NO: 1492 - DNA, 2668 bp, Homo sapiens
  source 1..2668: mol_type = unassigned DNA
ctgccatggcggggccccatgccagaacctggaggctggaaggttccattgccagtgcccgcccggccgcgtcggaccaacctgtgccgatgagaagagcccctgccagcccaacccctgccatggggcggcgccctgccgtgtgctgcccgagggtggtgctcagtgcgagtgccccctggggcgtgagggcaccttctgccagacagcctcggggcaggacggctctgggcccttcctggctgacttcaacggcttctcccacctggagctgagaggcctgcacacctttgcacgggacctgggggagaagatggcgctggaggtcgtgttcctggcacgaggccccagcggcctcctgctctacaacgggcagaagacggacggcaagggggacttcgtgtcgctggcactgcgggaccgccgcctggagttccgctacgacctgggcaagggggcagcggtcatcaggagcagggagccagtcaccctgggagcctggaccagggtctcactggagcgaaacggccgcaagggtgccctgcgtgtgggcgacggcccccgtgtgttgggggagtccccgaaatcccgcaaggttccgcacaccgtcctcaacctgaaggagccgctctacgtagggggcgctcccgacttcagcaagctggcccgtgctgctgccgtgtcctctggcttcgacggtgccatccagctggtctccctcggaggccgccagctgctgaccccggagcacgtgctgcggcaggtggacgtcacgtcctttgcaggtcacccctgcacccgggcctcaggccacccctgcctcaatggggcctcctgcgtcccgagggaggctgcctatgtgtgcctgtgtcccgggggattctcaggaccgcactgcgagaaggggctggtggagaagtcagcgggggacgtggataccttggcctttgacgggcggacctttgtcgagtacctcaacgctgtgaccgagagcgaactggccaatgagatccccgtccccgaaactctggattccggggcccttcacagcgagaaggcactgcagagcaaccactttgaactgagcctgcgcactgaggccacgcaggggctggtgctctggagtggcaaggccacggagcgggcagactatgtggcactggccattgtggacgggcacctgcaactgagctacaacctgggctcccagcccgtggtgctgcgttccaccgtgcccgtcaacaccaaccgctggttgcgggtcgtggcacatagggagcagagggaaggttccctgcaggtgggcaatgaggcccctgtgaccggctcctccccgctgggcgccacgcagctggacactgatggagccctgtggcttgggggcctgccggagctgcccgtgggcccagcactgcccaaggcctacggcacaggctttgtgggctgcttgcgggacgtggtggtgggccggcacccgctgcacctgctggaggacgccgtcaccaagccagagctgcggccctgccccaccccatgagctggcaccagagccccgcgcccgctgtaattattttctatttttgtaaacttgttgctttttgatatgattttcttgcctgagtgttggccggagggactgctggcccggcctcccttccgtccaggcagccgtgctgcagacagacctagtgccgagggatggacaggcgaggtggcagcgtggagggctcggcgtggatggcagcctcaggacacacacccctgcctcaaggtgctgagcccccgccttgcactgcgcctgccccacggtgtccccgccgggaagcagccccggctcctgaatcaccctcgctccgtcaggcgggactcgtgtcccagagaggaaggggctgctgaggtctgatggggcccttcctccgggtgaccccacagggcctttccaagcccccatttgagctgctccttcctgtgtgtgctctgggccctgcctcggcctcctgcgccaatactgtgacttccaaacaatgttactgctgggcacagctctgcgttgctcccgtgctgcctgcgccagccccaggctgctgaggagcagaggccagaccagggccgatctgggtgtcctgaccctcagctggccctgcccagccaccctggacgtgaccgtatccctctgccacaccccaggccctgcgaggggctatcgagaggagctcactgtgggatggggttgacctctgccgcctgcctgggtatctgggcctggccatggctgtgttcttcatgtgttgattttatttgacccctggagtggtgggtctcatctttcccatctcgcctgagagcggctgagggctgcctcactgcaaatcctccccacagcgtcagtgaaagtcgtccttgtctcagaatgaccaggggccagccagtgtctgaccaaggtcaaggggcaggtgcagaggtggcagggatggctccgaagccagaaatgccttaaactgcaacgtcccgtcccttccccacccccatcccatccccacccccagccccagcccagtcctcctaggagcaggacccgatgaagcgggcggcggtggggctgggtgccgtgttactaactctagtatgtttctgtgtcaatcgctgtgaaataaagtctgaaaacttt

SEQ ID NO: 1493 - DNA, 7323 bp, Homo sapiens
  source 1..7323: mol_type = unassigned DNA
cccgtccccggcgcggcccgcgcgctcctccgccgcctctcgcctgcgccatggccggccggtcccacccgggcccgctgcggccgctgctgccgctccttgtggtggccgcgtgcgtcctgcccggagccggcgggacatgcccggagcgcgcgctggagcggcgcgaggaggaggcgaacgtggtgctcaccgggacggtggaggagatcctcaacgtggacccggtgcagcacacgtactcctgcaaggttcgggtctggcggtacttgaagggcaaagacctggtggcccgggagagcctgctggacggcggcaacaaggtggtgatcagcggctttggagaccccctcatctgtgacaaccaggtgtccactggggacaccaggatcttctttgtgaaccctgcacccccatacctgtggccagcccacaagaacgagctgatgctcaactccagcctcatgcggatcaccctgcggaacctggaggaggtggagttctgtgtggaagataaacccgggacccacttcactccagtgcctccgacgcctcctgatgcgtgccggggaatgctgtgcggcttcggcgccgtgtgcgagcccaacgcggaggggccgggccgggcgtcctgcgtctgcaagaagagcccgtgccccagcgtggtggcgcctgtgtgtgggtcggacgcctccacctacagcaacgaatgcgagctgcagcgggcgcagtgcagccagcagcgccgcatccgcctgctcagccgcgggccgtgcggctcgcgggacccctgctccaacgtgacctgcagcttcggcagcacctgtgcgcgctcggccgacgggctgacggcctcgtgcctgtgccccgcgacctgccgtggcgcccccgaggggaccgtctgcggcagcgacggcgccgactaccccggcgagtgccagctcctgcgccgcgcctgcgcccgccaggagaatgtcttcaagaagttcgacggcccttgtgacccctgtcagggcgccctccctgacccgagccgcagctgccgtgtgaacccgcgcacgcggcgccctgagatgctcctacggcccgagagctgccctgcccggcaggcgccagtgtgtggggacgacggagtcacctacgaaaacgactgtgtcatgggccgatcgggggccgcccggggtctcctcctgcagaaagtgcgctccggccagtgccagggtcgagaccagtgcccggagccctgccggttcaatgccgtgtgcctgtcccgccgtggccgtccccgctgctcctgcgaccgcgtcacctgtgacggggcctacaggcccgtgtgtgcccaggacgggcgcacgtatgacagtgattgctggcggcagcaggctgagtgccggcagcagcgtgccatccccagcaagcaccagggcccgtgtgaccaggccccgtccccatgcctcggggtgcagtgtgcatttggggcgacgtgtgctgtgaagaacgggcaggcagcgtgtgaatgcctgcaggcgtgctcgagcctctacgatcctgtgtgcggcagcgacggcgtcacatacggcagcgcgtgcgagctggaggccacggcctgtaccctcgggcgggagatccaggtggcgcgcaaaggaccctgtgaccgctgcgggcagtgccgctttggagccctgtgcgaggccgagaccgggcgctgcgtgtgcccctctgaatgcgtggctttggcccagcccgtgtgtggctccgacgggcacacgtaccccagcgagtgcatgctgcacgtgcacgcctgcacacaccagatcagcctgcacgtggcctcagctggaccctgtgagacctgtggagatgccgtgtgtgcttttggggctgtgtgctccgcagggcagtgtgtgtgtccccggtgtgagcaccccccgcccggccccgtgtgtggcagcgacggtgtcacctacggcagtgcctgcgagctacgggaagccgcctgcctccagcagacacagatcgaggaggcccgggcagggccgtgcgagcaggccgagtgcggttccggaggctctggctctggggaggacggtgactgtgagcaggagctgtgccggcagcgcggtggcatctgggacgaggactcggaggacgggccgtgtgtctgtgacttcagctgccagagtgtcccaggcagcccggtgtgcggctcagatggggtcacctacagcaccgagtgtgagctgaagaaggccaggtgtgagtcacagcgagggctctacgtagcggcccagggagcctgccgaggccccaccttcgccccgctgccgcctgtggcccccttacactgtgcccagacgccctacggctgctgccaggacaatatcaccgcagcccggggcgtgggcctggctggctgccccagtgcctgccagtgcaacccccatggctcttacggcggcacctgtgacccagccacaggccagtgctcctgccgcccaggtgtggggggcctcaggtgtgaccgctgtgagcctggcttctggaactttcgaggcatcgtcaccgatggccggagtggctgtacaccctgcagctgtgatccccaaggcgccgtgcgggatgactgtgagcagatgacggggctgtgctcgtgtaagcccggggtggctggacccaagtgtgggcagtgtccagacggccgtgccctgggccccgcgggctgtgaagctgacgcttctgcgcctgcgacctgtgcggagatgcgctgtgagttcggtgcgcggtgcgtggaggagtctggctcagcccactgtgtctgcccgatgctcacctgtccagaggccaacgctaccaaggtctgtgggtcagatggagtcacatacggcaacgagtgtcagctgaagaccatcgcctgccgccagggcctgcaaatctctatccagagcctgggcccgtgccaggaggctgttgctcccagcactcacccgacatctgcctccgtgactgtgaccaccccagggctcctcctgagccaggcactgccggccccccccggcgccctccccctggctcccagcagtaccgcacacagccagaccacccctccgccctcatcacgacctcggaccactgccagcgtccccaggaccaccgtgtggcccgtgctgacggtgccccccacggcaccctcccctgcacccagcctggtggcgtccgcctttggtgaatctggcagcactgatggaagcagcgatgaggaactgagcggggaccaggaggccagtgggggtggctctggggggctcgagcccttggagggcagcagcgtggccacccctgggccacctgtcgagagggcttcctgctacaactccgcgttgggctgctgctctgatgggaagacgccctcgctggacgcagagggctccaactgccccgccaccaaggtgttccagggcgtcctggagctggagggcgtcgagggccaggagctgttctacacgcccgagatggctgaccccaagtcagaactgttcggggagacagccaggagcattgagagcaccctggacgacctcttccggaattcagacgtcaagaaggattttcggagtgtccgcttgcgggacctggggcccggcaaatccgtccgcgccattgtggatgtgcactttgaccccaccacagccttcagggcacccgacgtggcccgggccctgctccggcagatccaggtgtccaggcgccggtccttgggggtgaggcggccgctgcaggagcacgtgcgatttatggactttgactggtttcctgcgtttatcacgggggccacgtcaggagccattgctgcgggagccacggccagagccaccactgcatcgcgcctgccgtcctctgctgtgacccctcgggccccgcaccccagtcacacaagccagcccgttgccaagaccacggcagcccccaccacacgtcggccccccaccactgcccccagccgtgtgcccggacgtcggcccccggccccccagcagcctccaaagccctgtgactcacagccctgcttccacggggggacctgccaggactgggcattgggcgggggcttcacctgcagctgcccggcaggcaggggaggcgccgtctgtgagaaggtgcttggcgcccctgtgccggccttcgagggccgctccttcctggccttccccactctccgcgcctaccacacgctgcgcctggcactggaattccgggcgctggagcctcaggggctgctgctgtacaatggcaacgcccggggcaaggacttcctggcattggcgctgctagatggccgcgtgcagctcaggtttgacacaggttcggggccggcggtgctgaccagtgccgtgccggtagagccgggccagtggcaccgcctggagctgtcccggcactggcgccggggcaccctctcggtggatggtgagacccctgttctgggcgagagtcccagtggcaccgacggcctcaacctggacacagacctctttgtgggcggcgtacccgaggaccaggctgccgtggcgctggagcggaccttcgtgggcgccggcctgagggggtgcatccgtttgctggacgtcaacaaccagcgcctggagcttggcattgggccgggggctgccacccgaggctctggcgtgggcgagtgcggggaccacccctgcctgcccaacccctgccatggcggggccccatgccagaacctggaggctggaaggttccattgccagtgcccgcccggccgcgtcggaccaacctgtgccgatgagaagagcccctgccagcccaacccctgccatggggcggcgccctgccgtgtgctgcccgagggtggtgctcagtgcgagtgccccctggggcgtgagggcaccttctgccagacagcctcggggcaggacggctctgggcccttcctggctgacttcaacggcttctcccacctggagctgagaggcctgcacacctttgcacgggacctgggggagaagatggcgctggaggtcgtgttcctggcacgaggccccagcggcctcctgctctacaacgggcagaagacggacggcaagggggacttcgtgtcgctggcactgcgggaccgccgcctggagttccgctacgacctgggcaagggggcagcggtcatcaggagcagggagccagtcaccctgggagcctggaccagggtctcactggagcgaaacggccgcaagggtgccctgcgtgtgggcgacggcccccgtgtgttgggggagtccccggttccgcacaccgtcctcaacctgaaggagccgctctacgtagggggcgctcccgacttcagcaagctggcccgtgctgctgccgtgtcctctggcttcgacggtgccatccagctggtctccctcggaggccgccagctgctgaccccggagcacgtgctgcggcaggtggacgtcacgtcctttgcaggtcacccctgcacccgggcctcaggccacccctgcctcaatggggcctcctgcgtcccgagggaggctgcctatgtgtgcctgtgtcccgggggattctcaggaccgcactgcgagaaggggctggtggagaagtcagcgggggacgtggataccttggcctttgacgggcggacctttgtcgagtacctcaacgctgtgaccgagagcgagaaggcactgcagagcaaccactttgaactgagcctgcgcactgaggccacgcaggggctggtgctctggagtggcaaggccacggagcgggcagactatgtggcactggccattgtggacgggcacctgcaactgagctacaacctgggctcccagcccgtggtgctgcgttccaccgtgcccgtcaacaccaaccgctggttgcgggtcgtggcacatagggagcagagggaaggttccctgcaggtgggcaatgaggcccctgtgaccggctcctccccgctgggcgccacgcagctggacactgatggagccctgtggcttgggggcctgccggagctgcccgtgggcccagcactgcccaaggcctacggcacaggctttgtgggctgcttgcgggacgtggtggtgggccggcacccgctgcacctgctggaggacgccgtcaccaagccagagctgcggccctgccccaccccatgagctggcaccagagccccgcgcccgctgtaattattttctatttttgtaaacttgttgctttttgatatgattttcttgcctgagtgttggccggagggactgctggcccggcctcccttccgtccaggcagccgtgctgcagacagacctagtgccgagggatggacaggcgaggtggcagcgtggagggctcggcgtggatggcagcctcaggacacacacccctgcctcaaggtgctgagcccccgccttgcactgcgcctgccccacggtgtccccgccgggaagcagccccggctcctgaatcaccctcgctccgtcaggcgggactcgtgtcccagagaggaaggggctgctgaggtctgatggggcccttcctccgggtgaccccacagggcctttccaagcccccatttgagctgctccttcctgtgtgtgctctgggccctgcctcggcctcctgcgccaatactgtgacttccaaacaatgttactgctgggcacagctctgcgttgctcccgtgctgcctgcgccagccccaggctgctgaggagcagaggccagaccagggccgatctgggtgtcctgaccctcagctggccctgcccagccaccctggacgtgaccgtatccctctgccacaccccaggccctgcgaggggctatcgagaggagctcactgtgggatggggttgacctctgccgcctgcctgggtatctgggcctggccatggctgtgttcttcatgtgttgattttatttgacccctggagtggtgggtctcatctttcccatctcgcctgagagcggctgagggctgcctcactgcaaatcctccccacagcgtcagtgaaagtcgtccttgtctcagaatgaccaggggccagccagtgtctgaccaaggtcaaggggcaggtgcagaggtggcagggatggctccgaagccagaaatgccttaaactgcaacgtcccgtcccttccccacccccatcccatccccacccccagccccagcccagtcctcctaggagcaggacccgatgaagcgggcggcggtggggctgggtgccgtgttactaactctagtatgtttctgtgtcaatcgctgtgaaataaagtctgaaaactttaaaa

SEQ ID NO: 1494 - DNA, 813 bp, Homo sapiens
  source 1..813: mol_type = unassigned DNA
ccgctacgacctgggcaagggggcagcggtcatcaggagcagggagccagtcaccctgggagcctggaccagggtctcactggagcgaaacggccgcaagggtgccctgcgtgtgggcgacggcccccgtgtgttgggggagtccccgaaatcccgcaaggttccgcacaccgtcctcaacctgaaggagccgctctacgtagggggcgctcccgacttcagcaagctggcccgtgctgctgccgtgtcctctggcttcgacggtgccatccagctggtctccctcggaggccgccagctgctgaccccggagcacgtgctgcggcaggtggacgtcacgtcctttgcaggtcacccctgcacccgggcctcaggccacccctgcctcaatggggcctcctgcgtcccgagggaggctgcctatgtgtgcctgtgtcccgggggattctcaggaccgcactgcgagaaggggctggtggagaagtcagcgggggacgtggataccttggcctttgacgggcggacctttgtcgagtacctcaacgctgtgaccgagagcgaactggccaatgagatccccgtccccgaaactctggattccggggcccttcacagcgagaaggcactgcagagcaaccactttgaactgagcctgcgcactgaggccacgcaggggctggtgctctggagtggcaaggccacggagcgggcagactatgtggcactggccattgtggacgggcacctgcaactgagctacaacctgggctcccagcccgtggtgctgcgttccaccgtgcccgtcaacaccaa

SEQ ID NO: 1495 - DNA, 1440 bp, Homo sapiens
  source 1..1440: mol_type = unassigned DNA
gactgaaaactggatatttggtccccatggactttctggtcaccctgtgaagtggacttaactttttcttgaatcatgtggaaggattctgaagtcaaaagtttttaagactctcaggcttactgtggatctggattctaaggcaacacttccttgaagaaacaagcttacagtctgtggcccagacccaggcaagtggtaaatatttaccttcacgctggagccaagatcgctgcggggagtcccgtgaagcaccactgccctctaagaccttggaaggggaaacaccagaaggtgtgggtgctgagctccgctgcgtcagactgccaggacctgagtggaactcagtgctgaaacctgggttctcactgcagctggatagcagctctgcccggatggccctagtcttcgtgtacggcaccctgaagcggggtcagcccaaccacagggtcctgcgggacggcgcccacggctccgcagcctttcgggcgcgcggccgcacgctggagccctacccgttggtgatcgcgggggagcacaacatcccgtggctgctgcacctgcccggctcggggcgcctcgtggagggcgaggtctacgcggtagacgagcggatgctgcgctttctggatgacttcgagagttgcccggccctgtaccagcgcacggtgctgcgggtacagctgctggaggaccgggccccgggcgcagaggagccgccagcgcccaccgcggtgcagtgcttcgtgtacagcagggccaccttcccgccggagtgggcccagctcccgcaccatgacagctacgactccgaggggccgcacgggctgcgctacaacccccgggagaacagataagggggacgggcagggtgggcctaggtttgagagccctggggctccaagatgcgcccagcccatgctgggtgaaggcggaagccgaacagggccctttccaatgaatctgccggaaaggaaccaatctttcagtggcagctgattttacaaataatgttgagatacgaatagcaaggtgcttccctcccatctttctacctggtaagaaaaatttaggattttaactcccctaaatgacatttagagaactcgtgttatgcctaattcttcttcctcctcgtgttgtttctgctgttggctctgctttgagctcaagataataataaatatttaggatcagtgtaaagacttggtgttgccgctagattttagcagccctactatactgattctggcctgtaacccctgagaaagccgattttacacggctgggtagaatttgtagaaaagatccacagggcaagcatgctgtatatcagagtgcgtatagcaccattcttcctaattttcagatcaagcttcacagcaaatattaaagattatttaaatttgaagtcgatgttttgggaaatcagatataaaa

SEQ ID NO: 1496 - DNA, 1226 bp, Homo sapiens
  source 1..1226: mol_type = unassigned DNA
atttaccttcacgctggagccaagatcgctgcggggagtcccgtgaagcaccactgccctctaagaccttggaaggggaaacaccagaaggtgtgggtgctgagctccgctgcgtcagactgccaggacctgagtggaactcagtgctgaaacctgggttctcactgcagctggatagcagctctgcccggatggccctagtcttcgtgtacggcaccctgaagcggggtcagcccaaccacagggtcctgcgggacggcgcccacggctccgcagcctttcgggcgcgcggccgcacgctggagccctacccgttggtgatcgcgggggagcacaacatcccgtggctgctgcacctgcccggctcggggcgcctcgtggagggcgaggtctacgcggtagacgagcggatgctgcgctttctggatgacttcgagagttgcccggccctgtaccagcgcacggtgctgcgggtacagctgctggaggaccgggccccgggcgcagaggagccgccagcgcccaccgcggtgcagtgcttcgtgtacagcagggccaccttcccgccggagtgggcccagctcccgcaccatgacagctacgactccgaggggccgcacgggctgcgctacaacccccgggagaacagataagggggacgggcagggtgggcctaggtttgagagccctggggctccaagatgcgcccagcccatgctgggtgaaggcggaagccgaacagggccctttccaatgaatctgccggaaaggaaccaatctttcagtggcagctgattttacaaataatgttgagatacgaatagcaaggtgcttccctcccatctttctacctggtaagaaaaatttaggattttaactcccctaaatgacatttagagaactcgtgttatgcctaattcttcttcctcctcgtgttgtttctgctgttggctctgctttgagctcaagataataataaatatttaggatcagtgtaaagacttggtgttgccgctagattttagcagccctactatactgattctggcctgtaacccctgagaaagccgattttacacggctgggtagaatttgtagaaaagatccacagggcaagcatgctgtatatcagagtgcgtatagcaccattcttcctaattttcagatcaagcttcacagcaaatattaaagattatttaaatttgaagtcgatgttttgggaaatc

SEQ ID NO: 1497 - DNA, 2222 bp, Homo sapiens
  source 1..2222: mol_type = unassigned DNA
ggggtggggcggggcggggatcaagcaggggcagggctggcgctgcggcgggagatgctgtcgggccgcggcggcgcttggcagccaggagctctgcattgaaggcactggggtgaggcttactgcccggcaggctggtgggtaaagtgaatgccgaagacagaagatttggatgatacaccactgactttctttgtttggaatacacgttatgaaccctttctggagcatgtctacaagctctgtacgcaaacgatctgaaggtgaagagaagacattaacaggggacgtgaaaaccagtcctccacgaactgcaccaaagaaacagctgccttctattcccaaaaatgctttgcccataactaagcctacatctcctgccccagcagcacagtcaacaaatggcacgcatgcgtcctatggacccttctacctggaatactctcttcttgcagaatttaccttggttgtgaagcagaagctaccaggcgtctatgtgcagccatcttatcgctctgcattaatgtggtttggagtaatattcatacggcatggactttaccaagatggcgtatttaagtttacagtttacatccctgataactatccagatggtgactgtccacgcttggtgttcgatattcctgtctttcacccgctagttgatcccacctcaggtgagctggatgtgaagagagcatttgcaaaatggaggcggaaccataatcatatttggcaggtattaatgtatgcaaggagagttttctacaagattgatacagcaagccccctgaacccagaggctgcagtactgtatgaaaaagatattcagctttttaaaagtaaagttgttgacagtgttaaggtgtgcactgctcgtttgtttgaccaacctaaaatagaagacccctatgcaattagcttttctccatggaatccttctgtacatgatgaagccagagaaaagatgctgactcagaaaaagcctgaagaacagcacaataaaagtgttcatgttgctggcctgtcatgggtaaagcctggctcagtacagcctttcagtaaagaagagaaaacagtggcgacttaagagatggtgaatctggtgcaccatgcactttcctgctagactctggcctagttcaagctgaccaatggcagaggactgcctgaagagtaaaactgtgtgaacaatgactgactgccagtgttttccatgtatgcataggttctaacagcagggtttggaaacctgtctctaagtaatgcattacttctgtcagaagtgtcttagggtggttatctagttcagtactccaaattattggggaccttgaggcttaagtaagtatttttctgaatataatgctaaaggtaagttgcattcatttaaactaatagagcagacagaattcagcactacttaatagtttataaatcagtggtttcagttgtatatatgttaggaaatggagaggtatagagagagcaggttccatagctcagcacttttaagtggaagatcatttgaatctcagtcttcagcctgcactgatttgtagcctgcactgtcttactgatttacaaactgaaatcactgagaaatgtctttagttcagtgagaagaaaccagaacacttgttcctagtgttgtgttgttttttttaagcaaattacttactgtatttttatggcaggagggagaaaaagtgttacaacggtttctaatgaagtccggtatttaaatgataaatgactaatgtgtttagtagagacaaaataaaccaataaatgattgttctttgccatttatgcaggaaactacccttttctcaatataaccaaacaaaggctaatttataaatgctttattgaaaaatacacttatcttcatataaaattacagtagcagtatcttgagaagttttataaatatttttgcagaacactattctaattgaacaatgtaagttccatatttctctcagcaatatgaagttacctagtaactttgtttatactgattcaatttacaattgaattttctccctaataagattattaatttgacttgaaaactgctggaacaatagtgattaataaagatatgtatagataattcagctgttaaataacattttctaatttgtataaatggtactatggtactaataaaaacctaaattctccaaccaatttttttaaactgccaggaacaccca

SEQ ID NO: 1498 - DNA, 2426 bp, Homo sapiens
  source 1..2426: mol_type = unassigned DNA
ggcggggcggggatcaagcaggggcagggctggcgctgcggcgggagatgctgtcgggccgcggcggcgcttggcagccaggagctctgcattgaaggcactggggtaaagtgaatgccgaagacagaagatttggatgatacaccactgactttctttgtttggaatacacgttatgaaccctttctggagcatgtctacaagctctgtacgcaaacgatctgaaggtgaagagaagacattaacaggggacgtgaaaaccagtcctccacgaactgcaccaaagaaacagctgccttctattcccaaaaatgctttgcccataactaagcctacatctcctgccccagcagcacagtcaacaaatggcacgcatgcgtcctatggacccttctacctggaatactctcttcttgcagaatttaccttggttgtgaagcagaagctaccaggcgtctatgtgcagccatcttatcgctctgcattaatgtggtttggagtaatattcatacggcatggactttaccaagatggcgtatttaagtttacagtttacatccctgataactatccagatggtgactgtccacgcttggtgttcgatattcctgtctttcacccgctagttgatcccacctcaggtgagctggatgtgaagagagcatttgcaaaatggaggcggaaccataatcatatttggcaggtattaatgtatgcaaggagagttttctacaagattgatacagcaagccccctgaacccagaggctgcagtactgtatgaaaaagatattcagctttttaaaagtaaagttgttgacagtgttaaggtgtgcactgctcgtttgtttgaccaacctaaaatagaagacccctatgcaattagcttttctccatggaatccttctgtacatgatgaagccagagaaaagatgctgactcagaaaaagcctgaagaacagcacaataaaagtgttcatgttgctggcctgtcatgggtaaagcctggctcagtacagcctttcagtaaagaagagaaaacagtggcgacttaagagatggtgaatctggtgcaccatgcactttcctgctagactctggcctagttcaagctgaccaatggcagaggactgcctgaagagtaaaactgtgtgaacaatgactgactgccagtgttttccatgtatgcataggttctaacagcagggtttggaaacctgtctctaagtaatgcattacttctgtcagaagtgtcttagggtggttatctagttcagtactccaaattattggggaccttgaggcttaagtaagtatttttctgaatataatgctaaaggtaagttgcattcatttaaactaatagagcagacagaattcagcactacttaatagtttataaatcagtggtttcagttgtatatatgttaggaaatggagaggtatagagagagcaggttccatagctcagcacttttaagtggaagatcatttgaatctcagtcttcagcctgcactgatttgtagcctgcactgtcttactgatttacaaactgaaatcactgagaaatgtctttagttcagtgagaagaaaccagaacacttgttcctagtgttgtgttgttttttttaagcaaattacttactgtatttttatggcaggagggagaaaaagtgttacaacggtttctaatgaagtccggtatttaaatgataaatgactaatgtgtttagtagagacaaaataaaccaataaatgattgttctttgccatttatgcaggaaactacccttttctcaatataaccaaacaaaggctaatttataaatgctttattgaaaaatacacttatcttcatataaaattacagtagcagtatcttgagaagttttataaatatttttgcagaacactattctaattgaacaatgtaagttccatatttctctcagcaatatgaagttacctagtaactttgtttatactgattcaatttacaattgaattttctccctaataagattattaatttgacttgaaaactgctggaacaatagtgattaataaagatatgtatagataattcagctgttaaataacattttctaatttgtataaatggtactatggtactaataaaaacctaaattctccaaccaatttttttaaactgccaggaacacccaaaaatatttttaaatatatcaccttaatagacatttcttttagataactccctcctaaaggaagaggtcataagttttcatattaatcccctcaattcaacttgattaaaatcttttcttagctggttgatccctatataacaaaaaactggagaatttaaaacattcccaaaaggtggctataggggttttaacattttaaaaaaatataaaagcattaaagaaaatattggatgttta

SEQ ID NO: 1499 - DNA, 1865 bp, Homo sapiens
  source 1..1865: mol_type = unassigned DNA
gcctgccaagcctcaattatctgtgctccgaccctttaagaaacacttctctcacccctgagctaagcagaataagaggggctggacgtgcaggactcagagtgggagcgaggagggctggggtgaggacagctttgtcacactctgtttttctgtcactcagccctgggggctccctctgcctgagggcttcgtcccctgctgcctggccgtgacccgcagcacaagcacagataagcctcagggaacaaaaggcagggctgccacggaagcccatccaccaatcctcacctctcacctctgtgtccgccctgctgggaaatattccaggctttggccaaggccagtgcagccccaggttcccgagcggcaggttgggtgcggaccatggcctctcacaagctgctggtgaccccccccaaggccctgctcaagcccctctccatccccaaccagctcctgctggggcctggtccttccaacctgcctcctcgcatcatggcagccggggggctgcagatgatcgggtccatgagcaaggatatgtaccagatcatggacgagatcaaggaaggcatccagtacgtgttccagaccaggaacccactcacactggtcatctctggctcgggacactgtgccctggaggccgccctggtcaatgtgctggagcctggggactccttcctggttggggccaatggcatttgggggcagcgagccgtggacatcggggagcgcataggagcccgagtgcacccgatgaccaaggaccctggaggccactacacactgcaggaggtggaggagggcctggcccagcacaagccagtgctgctgttcttaacccacggggagtcgtccaccggcgtgctgcagccccttgatggcttcggggaactctgccacaggtacaagtgcctgctcctggtggattcggtggcatccctgggcgggacccccctttacatggaccggcaaggcatcgacatcctgtactcgggctcccagaaggccctgaacgcccctccagggacctcgctcatctccttcagtgacaaggccaaaaagaagatgtactcccgcaagacgaagcccttctccttctacctggacatcaagtggctggccaacttctggggctgtgacgaccagcccaggatgtaccatcacacaatccccgtcatcagcctgtacagcctgagagagagcctggccctcattgcggaacagggcctggagaacagctggcgccagcaccgcgaggccgcggcgtatctgcatgggcgcctgcaggcactggggctgcagctcttcgtgaaggacccggcgctccggcttcccacagtcaccactgtggctgtacccgctggctatgactggagagacatcgtcagctacgtcatagaccacttcgacattgagatcatgggtggccttgggccctccacggggaaggtgctgcggatcggcctgctgggctgcaatgccacccgcgagaatgtggaccgcgtgacggaggccctgagggcggccctgcagcactgccccaagaagaagctgtgacctgcccactggcacacagctggcactggcacacacctgtcccatgcccaccctgagggatcaggagcaaacagaccctgcaaggtcctccaggcctggggacaggaaagccactgacccagcccgggaggcagaaccaggcagcctccctggccccaggcagcccttttccctccagtggcacctcctggaaacagtccacttgggcgcaaaacccagtgccttccaaatgagctgcagtccccaggccatgagcctcccgggaatgtttaataaagggcctggccaactctcctcac

SEQ ID NO: 1500 - DNA, 2364 bp, Homo sapiens
  source 1..2364: mol_type = unassigned DNA
ctctttttctcccccttgaaggcactgttactagaaatagagagctctggggcttgcctgaagccatgggcagtcaccactccaggattccccttttagcgcctcctccccatcttaatctcaaagtccagcaggatagtgagcagttagagcccggcctccaatctgcttccatgggggttggctttctgagtgggagaaatgactctaatctggagacatttgctgagacccttgtgcctggtcacttccgctcccaggatccttgagatgcatcctttcctgagcctaggtacttcccggacatcagtaaccaagctcagtcttcatacaaagcccagaatgcctccatgtgacttcatgcctgaaagataccagtcccttggctacaaccgtgtcctggaaatccacaaggaacatctttctcctgtggtgacggcatatttccagaaacccctgctgctccaccaggggcacatggagtggctctttgatgctgaaggaagcagatacctggatttcttttccgggattgttactgtcagtgttggccattgccacccaaaggtgaatgcagtggcacaaaagcagctcggccgcctgtggcatacaagcaccgtcttcttccaccctccaatgcatgaatatgcagagaagcttgccgcacttcttcctgagcctcttaaggtcattttcttggtgaacagtggctcagaagccaatgagctggccatgctgatggccagggcgcactcaaacaacatagacatcatttctttcagaggagcctaccatggatgcagtccttacacacttggcttgacaaacgtagggacctacaagatggaactccctggtgggacaggttgccaaccaacaatgtgtccagatgtttttcgtggcccttggggaggaagccactgtcgagattctccagtgcaaacaatcaggaagtgcagctgtgcaccagactgctgccaagctaaagatcagtatattgagcaattcaaagatacgctgagcacatctgtggccaagtcaattgctggatttttcgcagaacctattcaaggtgtgaatggagttgtccagtacccaaaggggtttctaaaggaagcctttgagctggtgcgagcaaggggaggcgtgtgcattgcagatgaagtgcagacaggatttggaaggttgggctctcacttctggggcttccaaacccacgatgtcctgcctgacattgtcaccatggctaaagggattgggaatggctttcccatggcagcagtcataaccactccagagattgccaaatctttggcgaaatgcctgcagcacttcaacacctttggagggaaccccatggcctgtgccattggatctgctgtgcttgaggtgattaaagaagaaaatctacaggaaaacagtcaagaagttgggacctacatgttactaaagtttgctaagctgcgggatgaatttgaaattgttggagacgtccgaggcaaaggtctcatgataggcatagaaatggtgcaggataagataagctgtcggcctcttccccgtgaagaagtaaatcagatccatgaggactgcaagcacatgggactcctcgttggcagaggcagcattttttctcagacatttcgcattgcgccctcaatgtgcatcactaaaccagaagttgattttgcagtagaagtatttcgttctgccttaacccaacacatggaaagaagagctaagtaacattgtcagaaataaataaaaccacaagtctcaagaatttgccacgtatgttcaagggtgaatttgaagaatttcagaaccactggtatccagagaaagcctgcagctctccacaggagctgtaaaagtcatggttgactgcctaccaaccatatttgttagcagagcccctcttatcttgagaactccattcttcagggaaaggatctccctagctcagagaataaatcctaattagtttatgttaggtatggtaatttgattcccctttgcagtgattggtttatgcatgaatatgtgatgtatttttgtccagtgaatcttgaagaaaaatcttttggtggaggtgccttcagggaaagttttcttcaccctcactcttcagttcaagaagagatgtcttcttgttgcgctgagaacaccatatgttcatgacgagattcctggcaccatgtcagccggcttgtagtcatgaggacaaccctttttggtgaggttggaagatggatggaagccaagtgcttagtgatgtcaaagaagcactcacttaagcattcctggagccaccctacctcagggcctcttgatatttgaggtaataaattcattgttctgtat

SEQ ID NO: 1501 - DNA, 3344 bp, Homo sapiens
  source 1..3344: mol_type = unassigned DNA
ggtacagctgcgcgtctgcgggaataggtgcagcgggcccttggcgggggactctgagggaggagctggggacggcgaccctaggagagttctttggggtgactttcaagatggactctactctaacagcaagtgaaatccggcagcgatttatagatttcttcaagaggaacgagcatacgtatgttcactcgtctgccaccatcccattggatgaccccactttgctctttgccaatgcaggcatgaaccagtttaaacccattttcctgaacacaattgacccatctcaccccatggcaaagctgagcagagctgccaatacccagaagtgcatccgggctgggggcaaacataatgacctggacgatgtgggcaaggatgtctatcatcacaccttcttcgagatgctgggctcttggtcttttggagattactttaaggaattggcatgtaagatggctctggaactcctcacccaagagtttggcattcccattgaaagactttatgttacttactttggcggggatgaagcagctggcttagaagcagatctggaatgcaaacagatctggcaaaatttggggctggatgacaccaaaatcctcccaggcaacatgaaggataacttctgggagatgggtgacacgggcccctgtggtccttgcagtgagatccactacgaccggattggtggtcgggacgccgcacatcttgtcaaccaggacgaccctaatgtgctggagatctggaaccttgtgttcatccagtataacagggaagctgatggcattctgaaacctcttcccaagaaaagcattgacacagggatgggcctggaacgactggtatctgtgctgcagaataagatgtccaactatgacactgacctttttgtcccttactttgaagccattcagaagggcacaggtgcccgaccatacactgggaaagttggtgctgaggatgccgatgggattgacatggcctaccgggtgctggctgaccacgctcggaccatcactgtggcactggctgatggtggccggcctgacaacacagggcgtggatatgtgttgagacggattctccgccgagctgtccgatacgcccatgaaaagctcaatgccagcaggggcttctttgctacgttagtggatgttgtcgtccagtccctgggagatgcatttcctgagctgaagaaggacccagacatggtgaaggacatcattaatgaagaagaggtgcagtttctcaagactctcagcagagggcgtcgcatcctggacaggaaaattcagagcctgggagacagcaagaccattcccggagacactgcttggctcctctatgacacctatgggtttccagtggatctgactggactgattgctgaagagaagggcctggtggtagacatggatggctttgaagaggagaggaaactggcccagctgaaatcacagggcaagggagctggtggggaagacctcattatgctggacatttacgctatcgaagagctccgggcacggggtctggaggtcacagatgattccccaaagtacaattaccatttggactccagtggtagctatgtatttgagaacacagtggctacggtgatggctctgcgcagggagaagatgttcgtggaagaggtgtccacaggccaggagtgtggagtggtgctggacaagacctgtttctatgctgagcaaggaggccagatctatgacgaaggctacctggtgaaggtggatgacagcagtgaagataaaacagagtttacagtgaagaatgctcaggtccgaggagggtatgtgctacacattggaaccatctacggtgacctgaaagtgggggatcaggtctggctgtttattgatgagccccgacgaagacccatcatgagcaaccacacagctacgcacattctgaacttcgccctgcgctcagtgcttggggaagctgaccagaaaggctcattggttgctcctgaccgcctcagatttgactttactgccaagggagccatgtccacccaacagatcaagaaggctgaagagattgctaatgagatgattgaggcagccaaggccgtctatacccaggattgccccctggcagcagcgaaagccatccagggcctacgggctgtgtttgatgagacctatcctgaccctgtgcgagtcgtctccattggggtcccggtgtccgagttgctggatgacccctctgggcctgctggctccctgacttctgttgagttctgtgggggaacgcacctgcggaactcgagtcatgcaggagcttttgtgatcgtgacggaagaagccattgccaagggtatccggaggattgtggctgtcacaggtgccgaggcccagaaggccctcaggaaagcagagagcttgaagaaatgtctctctgtcatggaagccaaagtgaaggctcagactgctccaaacaaggatgtgcagagggagatcgctgaccttggagaggccctggccactgcagtcatcccccagtggcagaaggatgaattgcgggagactctcaaatccctaaagaaggtcatggatgacttggaccgagccagcaaagccgatgtccagaaacgagtgttagagaagacgaagcagttcatcgacagcaaccccaaccagcctcttgtcatcctggagatggagagcggcgcctcagccaaggccctgaatgaagccttgaagctcttcaagatgcactcccctcagacttctgccatgctcttcacggtggacaatgaggctggcaagatcacgtgcctgtgtcaagttccccagaatgcagccaatcggggcttaaaagccagcgagtgggtgcagcaggtgtcaggcttgatggacggtaaaggtggtggcaaggatgtgtctgcacaggccacaggcaagaacgttggctgcctgcaggaggcgctgcagctggccacttccttcgcccagctgcgcctcggggatgtaaagaactgagtggggaaggaggaggctcccactggatccatccgtccagccaagagctcttcatctgctacaagaacatttgaatcttgggacctttaaagagcccctcctaacccagcagtaactggaacacacttgggagcagtcctatgtctcagtgccccttaaatttctgccctgagccctccacgtcagtgccatcggtctagaaccactaaccccgcattgctgttgatcgtcacgctcgcatctatagataacggctctccagacctgagctttccgcgtcagcaagtaggaatcgtttttgctgcagagaataaaaggaccacgtgc

SEQ ID NO: 1502 - DNA, 3854 bp, Homo sapiens
  source 1..3854: mol_type = unassigned DNA
acgatggcagcgtcagtggcagctgcagcccggaggctgcggcgggccattcgaaggtcgcccgcatggcggggcctcagccatcggccgctctcatcggagccccctgcagccaaggcctcggccgtgagggccgcctttctgaacttctttcgggaccgccatggccaccggctggtgccctccgcttccgtgcggccccgcggcgaccccagtttgctttttgtcaatgcgggcatgaaccagttcaagccaatctttctgggcaccgtggatccacgaagcgagatggcaggcttccgacgtgtggccaacagccagaaatgtgtgagagctggaggacaccataacgacctggaagatgtgggtcgagacctttcccatcataccttctttgaaatgcttggcaattgggcctttgggggtgaatattttaaggaggaggcttgtaacatggcctgggaactgctgactcaggtctatgggatccctgaggaaaggctctggatctcctactttgatggtgaccccaaggcagggctggacccagacctggagaccagggacatctggctgagcttaggggtgcctgctagccgtgtgctttcctttggaccacaagagaacttctgggagatgggggatactggcccttgtgggccctgtactgagatccactacgaccttgctggtggggtgggagccccccagctggtagagctttggaacctggtcttcatgcaacacaacagagaggcagatggaagcctgcagcccctgccccagcggcatgtggacacaggaatgggcctggaaaggctggtggctgtgctgcaaggcaaacactccacctatgacactgacctcttttccccgctgctcaacgccatacagcagggctgcagggcacccccttacttgggccgagtaggggtggcagacgaggggcgcacagacacagcgtaccgcgtggtggctgaccacatccgcacactcagtgtctgcatctctgatggcatcttccctgggatgtcaggtcccccgctggttcttcgtcggatcctgcgtcgagctgtgcgtttctccatggagatcttaaaggcaccacctggcttcctaggcagcctggtacctgtagtggtggagacactgggagatgcttatccagaactgcaaaggaactcagcccagatcgccaacctggtgtcagaggacgaggcagccttcctggcctccctggagcggggtaggcggatcattgatcggactctgaggaccctggggccttcagatatgttccctgctgaagtggcctggtccttgtcactgtgtggagacctgggactccccttggacatggtagagctgatgctggaggagaaaggggtccagctagactccgctggactggagcggttggcccaagaggaggcccagcaccgggcacggcaggctgagccagttcagaagcagggattgtggcttgatgtccatgcgcttggggagctgcagcgccaaggagtgcccccaactgacgacagccccaagtacaactactccctgcgacccagcggaagttatgagttcggcacctgtgaggcccaggtgttgcaactgtatacagaggacgggacagcagtggcctccgtggggaaaggccagcgctgtggcctcctcttggacaggaccaacttctacgcagaacaggggggccaggcttcagaccgtggctacctggtgcgggcagggcaagaggacgtgctgttcccagtagcccgggcccaggtctgtggaggtttcatcctgcatgaggcagtagcccctgagtgcctgcggttaggggaccaggtgcagctgcatgtggatgaggcctggcgtctaggctgcatggcgaagcatacggccacccacctgctgaactgggcactgaggcagaccctgggccctggcacagagcagcagggctcccatctcaatcctgagcagctgcgcttggatgtgaccacccagaccccattgaccccagagcagctccgggcagtggagaacactgtgcaggaggccgtggggcaggatgaggctgtgtacatggaggaggtgcccctggcgctcactgcccaggtccctggcctgcgctctctggatgaggtttacccagaccctgtgcgggtggtatcagtgggggtgcccgtggcccatgcattggacccagcctcccaagccgcactgcagacctctgtggagctatgctgtgggacgcacctgttacgtactggggctgtaggggacctggttatcatcggggaccgccagctttccaagggcactacccgcctgctggccgtcactggggagcaggcccagcaggcccgagagctaggccagagcctggcccaggaagtgaaagcggccactgagcggctgagtctggggagccgggatgtggcggaggcactgaggctgtccaaggacataggacgactcattgaagctgtggaaactgctgtgatgccccagtggcagcggcgggagctgctggccacagtgaagatgctgcagcggcgtgccaacactgccatccgtaagctgcaaatgggacaggctgcaaagaaaactcaggagctgctggagcggcactcgaaggggcctctgattgtggacacagtctctgctgagtctctctcagtgctggtgaaggtggtacggcagctgtgtgagcaggcccccagcacgtctgtgctcctactcagcccccagcccatggggaaggtgctgtgtgcctgtcaggtggcccagggtgccatgcccaccttcacagcagaggcctgggcactggcagtgtgcagccacatggggggcaaggcgtggggctcacgagtggtggcccaaggcaccggaagcactactgacctggaagctgccctcagtatagcccaaacctatgccctcagccagctctgacccaggtccgcccagggacccacatggactaaaggcaatgccaggagccctgaaggagccagcagaaccttcccacatgctgaagcgaggactagaggctggaggccaagcagctgagccaaagaagatcacctgggccagggcctacgtgacacaaggagacatgggctagggaaggcagaactgggcccaaagacacacacccccttggtgaaagagaagacatggacaattatggctgtgactgcacattagaaattatttcactggccgggtgtggtggttcacacctgtaatccaagcactttgggaggccgaggcaggtagatcatgaggtcaggagatcaaaaccatcctggctaacatggtgaaaccccatctctactaaaaatacaaaaaattagccgggtgtggtggcacacgcctgtagtcccagctactcgggaggctgaggcagaagaatcgcttgaacctgggaggtggaggttgcagtgggccaagatcgcaccactgcactccagcctgggtgacagagcgagactctgtctcaaataattatttcacagaggatagcaagctccagaaggttctattacctttaaaaaagagtagttttgcccctcccagcaacctaagaccagtctgaactcacactgtctgaaaggccacccaggatccaaatcgggccatcttcattgccatgagtgttcggacaggctctgcgtgccaggcaacagtgggcagacaaagggctccctggctactgggaagatacagaaccatcctgtgaaaatcatttcagcactggagaccttctttgctattacttctttcattaacaatgacctctaatttaaattgggccctgctggtttgttgatgaattgagcaac

SEQ ID NO: 1503 - DNA, 1790 bp, Homo sapiens
  source 1..1790: mol_type = unassigned DNA
tggagattccctgctccaagtcttctgggcgctccaggttctgtgaggccccacgggagccccggacccctggtctctgtaactgtggggtgagggaaggcagcacgcccggaccttgtggtacgacaggcccaggtatgtgttcatggagttttgtgttgaggacagcaccgatgtccacgtgcttattgaggatcaccgcattgtgttcagctgcaagaatgccgatggagtggagttgtacaatgagattgagttctatgccaaagtgaactccaaggactcccaggataagcgctcttcccgctctattacttgttttgtgagaaaatggaaggaaaaggtggcctggccgcggcttaccaaggaggatatcaagccagtgtggctgtctgtggactttgataactggagagactgggaaggggatgaagagatggagctggctcatgtggaacattatgcagagcttttgaagaaggtcagcaccaagagacctccacctgccatggatgatttggatttcaccaccaccgtggtctcctgctgtcccgcggagctgcagactgaagggagcaacggcaagaaagaagtgctgagcggtttccaagtggtgctggaagacacagtgcttttccctgagggcgggggacagcctgatgaccgtggtacaatcaatgacatctctgtgctgagagtgactcgccgtggggaacaggctgatcatttcacccagacacccctggatccaggaagccaggttctggtccgggtagattgggagcggaggtttgaccacatgcagcagcattcagggcagcatctcatcacggcagttgctgaccatctatttaagctgaagacaacatcatgggagttagggagatttcggagtgcgattgagctggacaccccctctatgactgcagagcaagtagctgccattgagcagagcgtcaatgaaaaaatcagagatcggctgcctgtgaatgtccgagaactgagcctggatgatcctgaggtggagcaggtgagtggccggggtttgcctgatgatcatgctgggcccattcgggttgttaacatcgagggcgttgattccaacatgtgctgtgggacccatgtgagcaatctcagtgaccttcaggtcattaagattctgggcactgagaaggggaaaaagaacagaaccaacctgatatttctgtctgggaaccgggtgctgaagtggatggagagaagtcatggaactgaaaaagcactgactgctctgcttaagtgtggagcagaggatcatgtggaagcagtgaaaaagctccagaactccaccaagatcctgcagaagaataacctgaatctgctcagagacctggctgtgcacattgcccatagcctcaggaacagtccagactggggaggtgtggtcatattacacaggaaggagggtgattcagagttcatgaatatcattgccaatgagattgggtcagaggagaccctcctgttcttaactgtgggcgatgagaaaggtggtggactcttcttactggcagggccacctgcgtctgtggagaccctggggcccagggtggctgaggtcctggaaggcaaaggagcagggaagaaaggccgttttcagggcaaggccaccaagatgagccggcggatggaggcgcaggcgcttctccaggactacatcagcacgcagagtgctaaggagtgagggcttagggcactcacctcctgtttccacaggaatcttttggtcaataaaatagattgactcagaa

SEQ ID NO: 1504 - DNA, 2042 bp, Homo sapiens
  source 1..2042: mol_type = unassigned DNA
ggcggggcctgaagtacccaagtccccgagggcgcgccttccccgggaatttaattcaggacaataatgttttattgagcgcctattgtgaatcagacactgagcagtaagcgtcggagaaacagtctatgcatttctgaagaccccacggtgaagggctgcaaggatgaagctgtcccagagtatctccagagtgcagatcccttggctgccaggtcatgttctctcttcctctcaactgctctcccgaccatataaggagaggcagctgctgggggcgtccccaggatctaaagatagcggcccctgcctggaactctaaatgccaccctggagcgggagccgcaatggcacggcagcacgcccggaccttgtggtacgacaggcccaggtatgtgttcatggagttttgtgttgaggacagcaccgatgtccacgtgcttattgaggatcaccgcattgtgttcagctgcaagaatgccgatggagtggagttgtacaatgagattgagttctatgccaaagtgaactccaaggactcccaggataagcgctcttcccgctctattacttgttttgtgagaaaatggaaggaaaaggtggcctggccgcggcttaccaaggaggatatcaagccagtgtggctgtctgtggactttgataactggagagactgggaaggggatgaagagatggagctggctcatgtggaacattatgcagagcttttgaagaaggtcagcaccaagagacctccacctgccatggatgatttggatttcaccaccaccgtggtctcctgctgtcccgcggagctgcagactgaagggagcaacggcaagaaagaagtgctgagcggtttccaagtggtgctggaagacacagtgcttttccctgagggcgggggacagcctgatgaccgtggtacaatcaatgacatctctgtgctgagagtgactcgccgtggggaacaggctgatcatttcacccagacacccctggatccaggaagccaggttctggtccgggtagattgggagcggaggtttgaccacatgcagcagcattcagggcagcatctcatcacggcagttgctgaccatctatttaagctgaagacaacatcatgggagttagggagatttcggagtgcgattgagctggacaccccctctatgactgcagagcaagtagctgccattgagcagagcgtcaatgaaaaaatcagagatcggctgcctgtgaatgtccgagaactgagcctggatgatcctgaggtggagcaggtgagtggccggggtttgcctgatgatcatgctgggcccattcgggttgttaacatcgagggcgttgattccaacatgtgctgtgggacccatgtgagcaatctcagtgaccttcaggtcattaagattctgggcactgagaaggggaaaaagaacagaaccaacctgatatttctgtctgggaaccgggtgctgaagtggatggagagaagtcatggaactgaaaaagcactgactgctctgcttaagtgtggagcagaggatcatgtggaagcagtgaaaaagctccagaactccaccaagatcctgcagaagaataacctgaatctgctcagagacctggctgtgcacattgcccatagcctcaggaacagtccagactggggaggtgtggtcatattacacaggaaggagggtgattcagagttcatgaatatcattgccaatgagattgggtcagaggagaccctcctgttcttaactgtgggcgatgagaaaggtggtggactcttcttactggcagggccacctgcgtctgtggagaccctggggcccagggtggctgaggtcctggaaggcaaaggagcagggaagaaaggccgttttcagggcaaggccaccaagatgagccggcggatggaggcgcaggcgcttctccaggactacatcagcacgcagagtgctaaggagtgagggcttagggcactcacctcctgtttccacaggaatcttttggtcaataaaatagattgactc

SEQ ID NO: 1505 - DNA, 2170 bp, Homo sapiens
  source 1..2170: mol_type = unassigned DNA
gcaacggcgcggtggcctggaaccccaggggagtggtgggcggggcctgaagtacccaagtccccgagggcgcgccttccccgggaatttaattcaggacaataatgttttattgagcgcctattgtgaatcagacactgagcagtaagcgtcggagaaacaggtgaatgataccggggaaaagtcattccctgtgtgtagcgtctagggcagcctttgccctggttccagcagatgggttgtctcttcatagtctatgcatttctgaagaccccacggtgaagggctgcaaggatgaagctgtcccagagtatctccagagtgcagatcccttggctgccaggtcatgttctctcttcctctcaactgctctcccgaccatataaggagaggcagctgctgggggcgtccccaggatctaaagatagcggcccctgcctggaactctaaatgccaccctggagcgggagccgcaatggcacggcagcacgcccggaccttgtggtacgacaggcccaggtatgtgttcatggagttttgtgttgaggacagcaccgatgtccacgtgcttattgaggatcaccgcattgtgttcagctgcaagaatgccgatggagtggagttgtacaatgagattgagttctatgccaaagtgaactccaaggactcccaggataagcgctcttcccgctctattacttgttttgtgagaaaatggaaggaaaaggtggcctggccgcggcttaccaaggaggatatcaagccagtgtggctgtctgtggactttgataactggagagactgggaaggggatgaagagatggagctggctcatgtggaacattatgcagagcttttgaagaaggtcagcaccaagagacctccacctgccatggatgatttggatttcaccaccaccgtggtctcctgctgtcccgcggagctgcagactgaagggagcaacggcaagaaagaagtgctgagcggtttccaagtggtgctggaagacacagtgcttttccctgagggcgggggacagcctgatgaccgtggtacaatcaatgacatctctgtgctgagagtgactcgccgtggggaacaggctgatcatttcacccagacacccctggatccaggaagccaggttctggtccgggtagattgggagcggaggtttgaccacatgcagcagcattcagggcagcatctcatcacggcagttgctgaccatctatttaagctgaagacaacatcatgggagttagggagatttcggagtgcgattgagctggacaccccctctatgactgcagagcaagtagctgccattgagcagagcgtcaatgaaaaaatcagagatcggctgcctgtgaatgtccgagaactgagcctggatgatcctgaggtggagcaggtgagtggccggggtttgcctgatgatcatgctgggcccattcgggttgttaacatcgagggcgttgattccaacatgtgctgtgggacccatgtgagcaatctcagtgaccttcaggtcattaagattctgggcactgagaaggggaaaaagaacagaaccaacctgatatttctgtctgggaaccgggtgctgaagtggatggagagaagtcatggaactgaaaaagcactgactgctctgcttaagtgtggagcagaggatcatgtggaagcagtgaaaaagctccagaactccaccaagatcctgcagaagaataacctgaatctgctcagagacctggctgtgcacattgcccatagcctcaggaacagtccagactggggaggtgtggtcatattacacaggaaggagggtgattcagagttcatgaatatcattgccaatgagattgggtcagaggagaccctcctgttcttaactgtgggcgatgagaaaggtggtggactcttcttactggcagggccacctgcgtctgtggagaccctggggcccagggtggctgaggtcctggaaggcaaaggagcagggaagaaaggccgttttcagggcaaggccaccaagatgagccggcggatggaggcgcaggcgcttctccaggactacatcagcacgcagagtgctaaggagtgagggcttagggcactcacctcctgtttccacaggaatcttttggtcaataaaatagattgactc

SEQ ID NO: 1506 - DNA, 1302 bp, Homo sapiens
  source 1..1302: mol_type = unassigned DNA
atggcgttctggtgtcagcgtgacagttatgcccgagagttcaccaccaccgtggtctcctgctgtcccgcggagctgcagactgaagggagcaacggcaagaaagaagtgctgagcggtttccaagtggtgctggaagacacagtgcttttccctgagggcgggggacagcctgatgaccgtggtacaatcaatgacatctctgtgctgagagtgactcgccgtggggaacaggctgatcatttcacccagacacccctggatccaggaagccaggttctggtccgggtagattgggagcggaggtttgaccacatgcagcagcattcagggcagcatctcatcacggcagttgctgaccatctatttaagctgaagacaacatcatgggagttagggagatttcggagtgcgattgagctggacaccccctctatgactgcagagcaagtagctgccattgagcagagcgtcaatgaaaaaatcagagatcggctgcctgtgaatgtccgagaactgagcctggatgatcctgaggtggagcaggtgagtggccggggtttgcctgatgatcatgctgggcccattcgggttgttaacatcgagggcgttgattccaacatgtgctgtgggacccatgtgagcaatctcagtgaccttcaggtcattaagattctgggcactgagaaggggaaaaagaacagaaccaacctgatatttctgtctgggaaccgggtgctgaagtggatggagagaagtcatggaactgaaaaagcactgactgctctgcttaagtgtggagcagaggatcatgtggaagcagtgaaaaagctccagaactccaccaagatcctgcagaagaataacctgaatctgctcagagacctggctgtgcacattgcccatagcctcaggaacagtccagactggggaggtgtggtcatattacacaggaaggagggtgattcagagttcatgaatatcattgccaatgagattgggtcagaggagaccctcctgttcttaactgtgggcgatgagaaaggtggtggactcttcttactggcagggccacctgcgtctgtggagaccctggggcccagggtggctgaggtcctggaaggcaaaggagcagggaagaaaggccgttttcagggcaaggccaccaagatgagccggcggatggaggcgcaggcgcttctccaggactacatcagcacgcagagtgctaaggagtgagggcttagggcactcacctcctgtttccacaggaatcttttggtcaataaaatagattgactc

SEQ ID NO: 1507 - DNA, 1905 bp, Homo sapiens
  source 1..1905: mol_type = unassigned DNA
gcaacggcgcggtggcctggaaccccaggggagtggtgggcggggcctgaagtacccaagtccccgagggcgcgccttccccgggaatttaattcaggacaataatgttttattgagcgcctattgtgaatcagacactgagcagtaagcgtcggagaaacaggtgaatgataccggggaaaagtcattccctgtgtgtagcgtctagggcagcctttgccctggttccagcagatgggttgtctcttcatagtctatgcatttctgaagaccccacggtgaagggctgcaaggatgaagctgtcccagagtatctccagagtgcagatcccttggctgccaggtcatgttctctcttcctctcaactgctctcccgaccatataaggagaggcagctgctgggggcgtccccaggatctaaagatagcggcccctgcctggaactctaaatgccaccctggagcgggagccgcaatggcacggcagcacgcccggaccttgtggtacgacaggcccaggtatgtgttcatggagttttgtgttgaggacagcaccgatgtccacgtgcttattgaggatcaccgcattgtgttcagctgcaagaatgccgatggagtggagttgtacaatgagattgagttctatgccaaagtgaactccaagccagtgtggctgtctgtggactttgataactggagagactgggaaggggatgaagagatggagctggctcatgtggaacattatgcagagcttttgaagaaggtcagcaccaagagacctccacctgccatggatgatttggatgatgattctgacagtgctgatgatgcaacaagtaattaactttctgtgacgcaaagctgggaaggcagctgtggctattttccagttgttctagaaagctagcgcctaggcctttgtcagcgctttggctgtgcaccaagttcttctgagatctctgaactttcctagaagctctttattaagggtcgtccttcaagcttgtcttcctcctaggcacttgactatggctccacatcagatgcagggtcggggaggggtagactggtagggcttctgatttcttactgattggtttctaatctctgtgtttaggccacttgattatttgagtatgtgtgtgtatgtggcaaaacaaaagccaaagaagaatgcagattatagaaatctctactatgtgtgcatatggggcaaagcaaaaagccaaagaagaaacagattataataaatctctaggaactgttctctgtctgtttccttcttgtacttattcctcctggtggcaagcctcttctccctctagtaaccaagctggggtgcttcctcttgcccagatttgtgctctgatttcttacagctaattctgtcatctctagaaccagccacttcagcttcctgcacactctagaaatctctttatactttttttttttttttccgagatggagtcttgctctgtcgcccaggctggagtgcagtggtgcagtctctgttcactgcaacctccaccttctgggttcaagcaattctcctgcctcagcctcccaagtagatgggactacagatgtgcaccaccaggcccagctaatttttgtatttttagcagagatggggtttcaccatgttggccaggctggtctcgaactcctgacctcaagtaatccacccacctcagcctcccaaagtgctaggattacatgtatgagccaccacacccggccctctttatacttttaaaactgattgttactctagttaatgtctatgtttatttgtccaacagctattctatttgtccataaacttttttgagtgcctaatatgtacagttgactgtaacttaaacaaaataaatgcattgcctatagactttgctcttg

SEQ ID NO: 1508 - DNA, 594 bp, Homo sapiens
  source 1..594: mol_type = unassigned DNA
aactctaaatgccaccctggagcgggagccgcaatggcacgctccactttgaaaaaactgtggcatcaaaggtccctgggtagtcccttcccaaatgacctcagtcttccctctcccacccctatgaagccacacctcaacttctcttcaggcagcacgcccggaccttgtggtacgacaggcccaggtatgtgttcatggagttttgtgttgaggacagcaccgatgtccacgtgcttattgaggatcaccgcattgtgttcagctgcaagaatgccgatggagtggagttgtacaatgagattgagttctatgccaaagtgaactccaaggactcccaggataagcgctcttcccgctctattacttgttttgtgagaaaatggaaggaaaaggtggcctggccgcggcttaccaaggaggatatcaagccagtgtggctgtctgtggactttgataactggagagactgggaaggggatgaagagatggagctggctcatgtggaacattatgcagagcttttgaagaaggtcagcaccaagagacctccacctgccatggatgatttggatttcaccaccaccgtggtct

SEQ ID NO: 1509 - DNA, 2263 bp, Homo sapiens
  source 1..2263: mol_type = unassigned DNA
aattattggttaaagaagtatattagtgctaatttccctccgtttgtcctagcttttctcttctgtcaaccccacacgcctttggcacaatgaagtgggtaacctttatttcccttctttttctctttagctcggcttattccaggggtgtgtttcgtcgagatgcacacaagagtgaggttgctcatcggtttaaagatttgggagaagaaaatttcaaagccttggtgttgattgcctttgctcagtatcttcagcagtgtccatttgaagatcatgtaaaattagtgaatgaagtaactgaatttgcaaaaacatgtgttgctgatgagtcagctgaaaattgtgacaaatcacttcataccctttttggagacaaattatgcacagttgcaactcttcgtgaaacctatggtgaaatggctgactgctgtgcaaaacaagaacctgagagaaatgaatgcttcttgcaacacaaagatgacaacccaaacctcccccgattggtgagaccagaggttgatgtgatgtgcactgcttttcatgacaatgaagagacatttttgaaaaaatacttatatgaaattgccagaagacatccttacttttatgccccggaactccttttctttgctaaaaggtataaagctgcttttacagaatgttgccaagctgctgataaagctgcctgcctgttgccaaagctcgatgaacttcgggatgaagggaaggcttcgtctgccaaacagagactcaagtgtgccagtctccaaaaatttggagaaagagctttcaaagcatgggcagtagctcgcctgagccagagatttcccaaagctgagtttgcagaagtttccaagttagtgacagatcttaccaaagtccacacggaatgctgccatggagatctgcttgaatgtgctgatgacagggcggaccttgccaagtatatctgtgaaaatcaagattcgatctccagtaaactgaaggaatgctgtgaaaaacctctgttggaaaaatcccactgcattgccgaagtggaaaatgatgagatgcctgctgacttgccttcattagctgctgattttgttgaaagtaaggatgtttgcaaaaactatgctgaggcaaaggatgtcttcctgggcatgtttttgtatgaatatgcaagaaggcatcctgattactctgtcgtgctgctgctgagacttgccaagacatatgaaaccactctagagaagtgctgtgccgctgcagatcctcatgaatgctatgccaaagtgttcgatgaatttaaacctcttgtggaagagcctcagaatttaatcaaacaaaattgtgagctttttgagcagcttggagagtacaaattccagaatgcgctattagttcgttacaccaagaaagtaccccaagtgtcaactccaactcttgtagaggtctcaagaaacctaggaaaagtgggcagcaaatgttgtaaacatcctgaagcaaaaagaatgccctgtgcagaagactatctatccgtggtcctgaaccagttatgtgtgttgcatgagaaaacgccagtaagtgacagagtcaccaaatgctgcacagaatccttggtgaacaggcgaccatgcttttcagctctggaagtcgatgaaacatacgttcccaaagagtttaatgctgaaacattcaccttccatgcagatatatgcacactttctgagaaggagagacaaatcaagaaacaaactgcacttgttgagctcgtgaaacacaagcccaaggcaacaaaagagcaactgaaagctgttatggatgatttcgcagcttttgtagagaagtgctgcaaggctgacgataaggagacctgctttgccgaggagggtaaaaaacttgttgctgcaagtcaagctgccttaggcttataacatcacatttaaaagcatctcagcctaccatgagaataagagaaagaaaatgaagatcaaaagcttattcatctgtttttctttttcgttggtgtaaagccaacaccctgtctaaaaaacataaatttctttaatcattttgcctcttttctctgtgcttcaattaataaaaaatggaaagaatctaatagagtggtacagcactgttatttttcaaagatgtgttgctatcctgaaaattctgtaggttctgtggaagttccagtgttctctcttattccacttcggtagaggatttctagtttcttgtgggctaattaaataaatcattaatactcttctaa

SEQ ID NO: 1510 - DNA, 1418 bp, Homo sapiens
  source 1..1418: mol_type = unassigned DNA
ctagcttttctcttctgtcaaccccacacgcctttggcacaatgaagtgggtaacctttatttcccttctttttctctttagctcggcttattccaggggtgtgtttcgtcgagatgcacacaagagtgaggttgctcatcggtttaaagatttgggagaagaaaatttcaaagccttggtgttgattgcctttgctcagtatcttcagcagtgtccatttgaagatcatgtaaaattagtgaatgaagtaactgaatttgcaaaaacatgtgttgctgatgagtcagctgaaaattgtgacaaatcacttcataccctttttggagacaaattatgcacagttgcaactcttcgtgaaacctatggtgaaatggctgactgctgtgcaaaacaagaacctgagagaaatgaatgcttcttgcaacacaaagatgacaacccaaacctcccccgattggtgagaccagaggttgatgtgatgtgcactgcttttcatgacaatgaagagacatttttgaaaaaatacttatatgaaaccactctagagaagtgctgtgccgctgcagatcctcatgaatgctatgccaaagtgttcgatgaatttaaacctcttgtggaagagcctcagaatttaatcaaacaaaattgtgagctttttgagcagcttggagagtacaaattccagaatgcgctattagttcgttacaccaagaaagtaccccaagtgtcaactccaactcttgtagaggtctcaagaaacctaggaaaagtgggcagcaaatgttgtaaacatcctgaagcaaaaagaatgccctgtgcagaagactatctatccgtggtcctgaaccagttatgtgtgttgcatgagaaaacgccagtaagtgacagagtcaccaaatgctgcacagaatccttggtgaacaggcgaccatgcttttcagctctggaagtcgatgaaacatacgttcccaaagagtttaatgctgaaacattcaccttccatgcagatatatgcacactttctgagaaggagagacaaatcaagaaacaaactgcacttgttgagctcgtgaaacacaagcccaaggcaacaaaagagcaactgaaagctgttatggatgatttcgcagcttttgtagagaagtgctgcaaggctgacgataaggagacctgctttgccgaggagggtaaaaaacttgttgctgcaagtcaagctgccttaggcttataacatcacatttaaaagcatctcagcctaccatgagaataagagaaagaaaatgaagatcaaaagcttattcatctgtttttctttttcgttggtgtaaagccaacaccctgtctaaaaaacataaatttctttaatcattttgcctcttttctctgtgcttcaattaataaaaaatggaaagaatct

SEQ ID NO: 1511 - DNA, 1483 bp, Homo sapiens
  source 1..1483: mol_type = unassigned DNA
ctagcttttctcttctgtcaaccccacacgcctttggcacaatgaagtgggtaacctttatttcccttctttttctctttagctcggcttattccaggggtgtgtttcgtcgagatgcacacaagagtgaggttgctcatcggtttaaagatttgggagaagaaaatttcaaagccttggcagtagctcgcctgagccagagatttcccaaagctgagtttgcagaagtttccaagttagtgacagatcttaccaaagtccacacggaatgctgccatggagatctgcttgaatgtgctgatgacagggcggaccttgccaagtatatctgtgaaaatcaagattcgatctccagtaaactgaaggaatgctgtgaaaaacctctgttggaaaaatcccactgcattgccgaagtggaaaatgatgagatgcctgctgacttgccttcattagctgctgattttgttgaaagtaaggatgtttgcaaaaactatgctgaggcaaaggatgtcttcctgggcatgtttttgtatgaatatgcaagaaggcatcctgattactctgtcgtgctgctgctgagacttgccaagacatatgaaaccactctagagaagtgctgtgccgctgcagatcctcatgaatgctatgccaaagtgttcgatgaatttaaacctcttgtggaagagcctcagaatttaatcaaacaaaattgtgagctttttgagcagcttggagagtacaaattccagaatgcgctattagttcgttacaccaagaaagtaccccaagtgtcaactccaactcttgtagaggtctcaagaaacctaggaaaagtgggcagcaaatgttgtaaacatcctgaagcaaaaagaatgccctgtgcagaagactatctatccgtggtcctgaaccagttatgtgtgttgcatgagaaaacgccagtaagtgacagagtcaccaaatgctgcacagaatccttggtgaacaggcgaccatgcttttcagctctggaagtcgatgaaacatacgttcccaaagagtttaatgctgaaacattcaccttccatgcagatatatgcacactttctgagaaggagagacaaatcaagaaacaaactgcacttgttgagctcgtgaaacacaagcccaaggcaacaaaagagcaactgaaagctgttatggatgatttcgcagcttttgtagagaagtgctgcaaggctgacgataaggagacctgctttgccgaggagggtaaaaaacttgttgctgcaagtcaagctgccttaggcttataacatcacatttaaaagcatctcagcctaccatgagaataagagaaagaaaatgaagatcaaaagcttattcatctgtttttctttttcgttggtgtaaagccaacaccctgtctaaaaaacataaatttctttaatcattttgcctcttttctctgtgcttcaattaataaaaaatggaaagaatctaa

SEQ ID NO: 1512 - DNA, 1911 bp, Homo sapiens
  source 1..1911: mol_type = unassigned DNA
cctttggcacaatgaagtgggtaacctttatttcccttctttttctctttagctcggcttattccaggggtgtgtttcgtcgagatgcactattcttgtttttcttcccttgcccagacaagagtgaggttgctcatcggtttaaagatttgggagaagaaaatttcaaagccttggtgttgattgcctttgctcagtatcttcagcagtgtccatttgaagatcatgtaaaattagtgaatgaagtaactgaatttgcaaaaacatgtgttgctgatgagtcagctgaaaattgtgacaaatcacttcataccctttttggagacaaattatgcacagttgcaactcttcgtgaaacctatggtgaaatggctgactgctgtgcaaaacaagaacctgagagaaatgaatgcttcttgcaacacaaagatgacaacccaaacctcccccgattggtgagaccagaggttgatgtgatgtgcactgcttttcatgacaatgaagagacatttttgaaaaaatacttatatgaaattgccagaagacatccttacttttatgccccggaactccttttctttgctaaaaggtataaagctgcttttacagaatgttgccaagctgctgataaagctgcctgcctgttgccaaagctcgatgaacttcgggatgaagggaaggcttcgtctgccaaacagagactcaagtgtgccagtctccaaaaatttggagaaagagctttcaaagcatgggcagtagctcgcctgagccagagatttcccaaagctgagtttgcagaagtttccaagttagtgacagatcttaccaaagtccacacggaatgctgccatggagatctgcttgaatgtgctgatgacagggcggaccttgccaagtatatctgtgaaaatcaagattcgatctccagtaaactgaaggaatgctgtgaaaaacctctgttggaaaaatcccactgcattgccgaagtggaaaatgatgagatgcctgctgacttgccttcattagctgctgattttgttgaaagtaaggatgtttgcaaaaactatgctgaggcaaaggatgtcttcctgggcatgtttttgtatgaatatgcaagaaggcatcctgattactctgtcgtgctgctgctgagacttgccaagacatatgaaaccactctagagaagtgctgtgccgctgcagatcctcatgaatgctatgccaaagtgttcgatgaatttaaacctcttgtggaagagcctcagaatttaatcaaacaaaattgtgagctttttgagcagcttggagagtacaaattccagaatgcgctattagttcgttacaccaagaaagtaccccaagtgtcaactccaactcttgtagaggtctcaagaaacctaggaaaagtgggcagcaaatgttgtaaacatcctgaagcaaaaagaatgccctgtgcagaagactatctatccgtggtcctgaaccagttatgtgtgttgcatgagaaaacgccagtaagtgacagagtcaccaaatgctgcacagaatccttggtgaacaggcgaccatgcttttcagctctggaagtcgatgaaacatacgttcccaaagagtttaatgctgaaacattcaccttccatgcagatatatgcacactttctgagaaggagagacaaatcaagaaacaaactgcacttgttgagctcgtgaaacacaagcccaaggcaacaaaagagcaactgaaagctgttatggatgatttcgcagcttttgtagagaagtgctgcaaggctgacgataaggagacctgctttgccgaggagggtaaaaaacttgttgctgcaagtcaagctgccttaggcttataacatcacatttaaaagcatctcagcctaccatgagaataagaga

SEQ ID NO: 1513 - DNA, 1499 bp, Homo sapiens
  source 1..1499: mol_type = unassigned DNA
aagcaaaaaaaataaataaatacctatgcaatacacctgctttatgcacttgagcagggaagaaatccacaaggactcaccagtctcctggtctgcagagaagacagaatcaacatgagcacagcaggaaaagtaatcaaatgcaaagcagctgtgctatgggagttaaagaaacccttttccattgaggaggtggaggttgcacctcctaaggcccatgaagttcgtattaagatggtggctgtaggaatctgtggcacagatgaccacgtggttagtggtaccatggtgaccccacttcctgtgattttaggccatgaggcagccggcatcgtggagagtgttggagaaggggtgactacagtcaaaccaggtgataaagtcatcccactcgctattcctcagtgtggaaaatgcagaatttgtaaaaacccggagagcaactactgcttgaaaaacgatgtaagcaatcctcaggggaccctgcaggatggcaccagcaggttcacctgcaggaggaagcccatccaccacttccttggcatcagcaccttctcacagtacacagtggtggatgaaaatgcagtagccaaaattgatgcagcctcgcctctagagaaagtctgtctcattggctgtggattttcaactggttatgggtctgcagtcaatgttgccaaggtcaccccaggctctacctgtgctgtgtttggcctgggaggggtcggcctatctgctattatgggctgtaaagcagctggggcagccagaatcattgcggtggacatcaacaaggacaaatttgcaaaggccaaagagttgggtgccactgaatgcatcaaccctcaagactacaagaaacccatccaggaggtgctaaaggaaatgactgatggaggtgtggatttttcatttgaagtcatcggtcggcttgacaccatgatggcttccctgttatgttgtcatgaggcatgtggcacaagtgtcatcgtaggggtacctcctgattcccaaaacctctcaatgaaccctatgctgctactgactggacgtacctggaagggagctattcttggtggctttaaaagtaaagaatgtgtcccaaaacttgtggctgattttatggctaagaagttttcattggatgcattaataacccatgttttaccttttgaaaaaataaatgaaggatttgacctgcttcactctgggaaaagtatccgtaccattctgatgttttgagacaatacagatgttttcccttgtggcagtcttcagcctcctctaccctacatgatctggagcaacagctgggaaatatcattaattctgctcatcacagattttatcaataaattacatttgggggctttccaaagaaatggaaattgatgtaaaattatttttcaagcaaatgtttaaaatccaaatgagaactaaataaagtgttgaacatcagctggggaattgaagccaataaaccttccttcttaaccatt

SEQ ID NO: 1514 - DNA, 4072 bp, Homo sapiens
  source 1..4072: mol_type = unassigned DNA
gcactcaagcagagaagaaatccacaaagactcacagtctgctggtgggcagagaagacagaaacgacatgagcacagcaggaaaagtaatcaaatgcaaagcagctgtgctatgggaggtaaagaaacccttttccattgaggatgtggaggttgcacctcctaaggcttatgaagttcgcattaagatggtggctgtaggaatctgtcacacagatgaccacgtggttagtggcaacctggtgaccccccttcctgtgattttaggccatgaggcagccggcatcgtggagagtgttggagaaggggtgactacagtcaaaccaggtgataaagtcatcccgctctttactcctcagtgtggaaaatgcagagtttgtaaaaacccggagagcaactactgcttgaaaaatgatctaggcaatcctcgggggaccctgcaggatggcaccaggaggttcacctgcagggggaagcccattcaccacttccttggcaccagcaccttctcccagtacacggtggtggatgagaatgcagtggccaaaattgatgcagcctcgcccctggagaaagtctgcctcattggctgtggattctcgactggttatgggtctgcagttaacgttgccaaggtcaccccaggctctacctgtgctgtgtttggcctgggaggggtcggcctatctgctgttatgggctgtaaagcagctggagcagccagaatcattgcggtggacatcaacaaggacaaatttgcaaaggccaaagagttgggtgccactgaatgcatcaaccctcaagactacaagaaacccattcaggaagtgctaaaggaaatgactgatggaggtgtggatttttcgtttgaagtcatcggtcggcttgacaccatgatggcttccctgttatgttgtcatgaggcatgtggcacaagcgtcatcgtaggggtacctcctgcttcccagaacctctcaataaaccctatgctgctactgactggacgcacctggaagggggctgtttatggtggctttaagagtaaagaaggtatcccaaaacttgtggctgattttatggctaagaagttttcactggatgcgttaataacccatgttttaccttttgaaaaaataaatgaaggatttgacctgcttcactctgggaaaagtatccgtaccgtcctgacgttttgaggcaatagagatgccttcccctgtagcagtcttcagcctcctctaccctacaagatctggagcaacagctaggaaatatcattaattcagctcttcagagatgttatcaataaattacacatgggggctttccaaagaaatggaaattgatgggaaattatttttcaggaaaatttaaaattcaagtgagaagtaaataaagtgttgaacatcagctggggaattgaagccaacaaaccttccttcttaaccattctactgtgtcacctttgccattgaggaaaaatattcctgtgacttcttgcatttttggtatcttcataatctttagtcatcgaatcccagtggaggggacccttttacttgccctgaacatacacatgctgggccattgtgattgaagtcttctaactctgtctcagttttcactgtcgacattttcctttttctaataaaaatgtaccaaatccctggggtaaaagctagggtaaggtaaaggatagactcacatttacaagtagtgaaggtccaagagttctaaatacaggaaatttcttaggaactcaaataaaatgccccacattttactacagtaaatggcagtgtttttatgacttttatactatttctttatggtcgatatacaattgattttttaaaataatagcagatttcttgcttcatatgacaaagcctcaattactaattgtaaaaactgaactattcccagaatcatgttcaaaaaatctgtaatttttgctgatgaaagtgcttcattgactaaacagtattagtttgtggctataaatgattatttagatgatgactgaaaatgtgtataaagtaattaaaagtaatatggtggctttaagtgtagagatgggatggcaaatgctgtgaatgcagaatgtaaaattggtaactaagaaatggcacaaacaccttaagcaatatattttcctagtagatatatatatacacatacatatatacacatatacaaatgtatatttttgcaaaattgttttcaatctagaacttttctattaactaccatgtcttaaaatcaagtctataatcctagcattagtttaatattttgaatatgtaaagacctgtgttaatgctttgttaatgcttttcccactctcatttgttaatgctttcccactctcaggggaaggatttgcattttgagctttatctctaaatgtgacatgcaaagattattcctggtaaaggaggtagctgtctccaaaaatgctattgttgcaatatctacattctatttcatattatgaaagaccttagacataaagtaaaatagtttatcatttactgtgtgatcttcagtaagtctctcaggctctctgagcttgttcatcctttgttttgaaaaaattactcaaccaatccattacagcttaaccaagattaaatgggatgatgttaatgaaagagcttcgccaattaagaagggccatgtaaatgtgggtaacctgattgttttgtcaaaaatgctaaagcggggtggggggtggcgcagtggcttatccctgtaatcccagcactttgggaggtcaagacgggtggatgacctgaggtcaggagtttgagaccagcctggtcaacatggtgaaaccccatctctactaaaaatacaaaaatttgccaggcatggtggcaggtggctgtaatcccagctactcaggaggctgaggcaagagaatcgctggagcctgggaggcggaggttgcagtgagcagaaatcttgccactgcacagcagcctaggcgacaagagcaaaactctgtcaaaagaaaagaaaagaaaatgctgaaggagttactcagggtcaagaaagttttcagaatgtccgtaagataacatcatcatgggacactacctgttgctgggtgctctgcggcttttacactgatgctgattgtgtgagatccagaaaaagaaaatggagttctacatgcccatctcacagcagggtcatcaaatcctgctagtgacacagaagctgacatccagctcccacccgccttcctcccaggttcggggagcaggtagagtgggagccattaggtgggctctgccagtgttgtcatagagtggcaagtcctccatgggatgggagtggcatgtgggagccttctgcatcatgcactatgaaaaaagaaaatttactatggggcaagtggttcatatagttaagtgattgtatatatatatatatatatatatatatatatatatatatatatatatacactatggggcaagtggttcatatagttaagtgattgtatatatatatatatatatatatgtattccagtgtagaaagtattggctgggtctgtaatcaagtattccacagaagtgccttcataggtgctgaaacaggattatgagagtgacagacacaggactgaagacagggagaaaatgtgcatggctgtgagaatatattgctttgattctttgacttctcatgatatatgaaaacaaataaagtgggggggggtgacttcaataatatcacgaacatatttaaaatgaaattctgagcatggagaaaaatttcaaattctggtataaacaaataatctaaaaatatagataaggaaaaaatgttttcatttttttggtcatattgatttgggtcatatatgattgaccaaaaaaaaagatatttctaaaatcctggtgctttttcatttaaaaatagacaaccaaagaggaaaatgaacaatgatggaaattcgtggaagaggaaactaaaatggcaaaatagcatattaaatggcactgagccttggtgtgatcaaaaaaaaaaataaagcaaaatgagatattactgctta

SEQ ID NO: 1515 - DNA, 4059 bp, Homo sapiens
  source 1..4059: mol_type = unassigned DNA
gcactcaagcagagaagaaatccacaaagactcacagtctgctggtgggcagagaagacagaaacgacatgagcacagcaggaaaagtaatcaaatgcaaagcagctgtgctatgggaggtaaagaaacccttttccattgaggatgtggaggttgcacctcctaaggcttatgaagttcgcattaagatggtggctgtaggaatctgtcacacagatgaccacgtggttagtggcaacctggtgaccccccttcctgtgattttaggccatgaggcagccggcatcgtggagagtgttggagaaggggtgactacagtcaaaccaggtgataaagtcatcccgctctttactcctcagtgtggaaaatgcagagtttgtaaaaacccggagagcaactactgcttgaaaaatgatctaggcaatcctcgggggaccctgcaggatggcaccaggaggttcacctgcagggggaagcccattcaccacttccttggcaccagcaccttctcccagtacacggtggtggatgagaatgcagtggccaaaattgatgcagcctcgcccctggagaaagtctgcctcattggctgtggattctcgactggttatgggtctgcagttaacgttgccaaggtcaccccaggctctacctgtgctgtgtttggcctgggaggggtcggcctatctgctgttatgggctgtaaagcagctggagcagccagaatcattgcggtggacatcaacaaggacaaatttgcaaaggccaaagagttgggtgccactgaatgcatcaaccctcaagactacaagaaacccattcaggaagtgctaaaggaaatgactgatggaggtgtggatttttcgtttgaagtcatcggtcggcttgacaccatgatggcttccctgttatgttgtcatgaggcatgtggcacaagcgtcatcgtaggggtacctcctgcttcccagaacctctcaataaaccctatgctgctactgactggacgcacctggaagggggctgtttatggtggctttaagagtaaagaaggtatcccaaaacttgtggctgattttatggctaagaagttttcactggatgcgttaataacccatgttttaccttttgaaaaaataaatgaaggatttgacctgcttcactctgggaaaagtatccgtaccgtcctgacgttttgaggcaatagagatgccttcccctgtagcagtcttcagcctcctctaccctacaagatctggagcaacagctaggaaatatcattaattcagctcttcagagatgttatcaataaattacacatgggggctttccaaagaaatggaaattgatgggaaattatttttcaggaaaatttaaaattcaagtgagaagtaaataaagtgttgaacatcagctggggaattgaagccaacaaaccttccttcttaaccattctactgtgtcacctttgccattgaggaaaaatattcctgtgacttcttgcatttttggtatcttcataatctttagtcatcgaatcccagtggaggggacccttttacttgccctgaacatacacatgctgggccattgtgattgaagtcttctaactctgtctcagttttcactgtcgacattttcctttttctaataaaaatgtaccaaatccctggggtaaaagctagggtaaggtaaaggatagactcacatttacaagtagtgaaggtccaagagttctaaatacaggaaatttcttaggaactcaaataaaatgccccacattttactacagtaaatggcagtgtttttatgacttttatactatttctttatggtcgatatacaattgattttttaaaataatagcagatttcttgcttcatatgacaaagcctcaattactaattgtaaaaactgaactattcccagaatcatgttcaaaaaatctgtaatttttgctgatgaaagtgcttcattgactaaacagtattagtttgtggctataaatgattatttagatgatgactgaaaatgtgtataaagtaattaaaagtaatatggtggctttaagtgtagagatgggatggcaaatgctgtgaatgcagaatgtaaaattggtaactaagaaatggcacaaacaccttaagcaatatattttcctagtagatatatatatacacatacatatatacacatatacaaatgtatatttttgcaaaattgttttcaatctagaacttttctattaactaccatgtcttaaaatcaagtctataatcctagcattagtttaatattttgaatatgtaaagacctgtgttaatgctttgttaatgcttttcccactctcatttgttaatgctttcccactctcaggggaaggatttgcattttgagctttatctctaaatgtgacatgcaaagattattcctggtaaaggaggtagctgtctccaaaaatgctattgttgcaatatctacattctatttcatattatgaaagaccttagacataaagtaaaatagtttatcatttactgtgtgatcttcagtaagtctctcaggctctctgagcttgttcatcctttgttttgaaaaaattactcaaccaatccattacagcttaaccaagattaaatgggatgatgttaatgaaagagcttcgccaattaagaagggccatgtaaatgtgggtaacctgattgttttgtcaaaaatgctaaagcggggtggggggtggcgcagtggcttatccctgtaatcccagcactttgggaggtcaagacgggtggatgacctgaggtcaggagtttgagaccagcctggtcaacatggtgaaaccccatctctactaaaaatacaaaaatttgccaggcatggtggcaggtggctgtaatcccagctactcaggaggctgaggcaagagaatcgctggagcctgggaggcggaggttgcagtgagcagaaatcttgccactgcacagcagcctaggcgacaagagcaaaactctgtcaaaagaaaagaaaagaaaatgctgaaggagttactcagggtcaagaaagttttcagaatgtccgtaagataacatcatcatgggacactacctgttgctgggtgctctgcggcttttacactgatgctgattgtgtgagatccagaaaaagaaaatggagttctacatgcccatctcacagcagggtcatcaaatcctgctagtgacacagaagctgacatccagctcccacccgccttcctcccaggttcggggagcaggtagagtgggagccattaggtgggctctgccagtgttgtcatagagtggcaagtcctccatgggatgggagtggcatgtgggagccttctgcatcatgcactatgaaaaaagaaaatttactatggggcaagtggttcatatagttaagtgattgtatatatatatatatatatatatatatatatatatatatatatatatacactatggggcaagtggttcatatagttaagtgattgtatatatatatatatatatatatgtattccagtgtagaaagtattggctgggtctgtaatcaagtattccacagaagtgccttcataggtgctgaaacaggattatgagagtgacagacacaggactgaagacagggagaaaatgtgcatggctgtgagaatatattgctttgattctttgacttctcatgatatatgaaaacaaataaagtgggggggggtgacttcaataatatcacgaacatatttaaaatgaaattctgagcatggagaaaaatttcaaattctggtataaacaaataatctaaaaatatagataaggaaaaaatgttttcatttttttggtcatattgatttgggtcatatatgattgaccaaaaaaaaagatatttctaaaatcctggtgctttttcatttaaaaatagacaaccaaagaggaaaatgaacaatgatggaaattcgtggaagaggaaactaaaatggcaaaatagcatattaaatggcactgagccttggtgtgatcaaaaaaaaaaataaagcaaaatgag

SEQ ID NO: 1516 - DNA, 1231 bp, Homo sapiens
  source 1..1231: mol_type = unassigned DNA
gcactcaagcagagaagaaatccacaaagactcacagtctgctggtgggcagagaagacagaaacgacatgagcacagcaggaaaagtaatcaaatgcaaagcagctgtgctatgggaggtaaagaaacccttttccattgaggatgtggaggttgcacctcctaaggcttatgaagttcgcattaagatggtggctgtaggaatctgtcacacagatgaccacgtggttagtggcaacctggtgaccccccttcctgtgattttaggccatgaggcagccggcatcgtggagagtgttggagaaggggtgactacagtcaaaccaggtgataaagtcatcccgctctttactcctcagtgtggaaaatgcagagtttgtaaaaacccggagagcaactactgcttgaaaaatgatctaggcaatcctcgggggaagcccattcaccacttccttggcaccagcaccttctcccagtacacggtggtggatgagaatgcagtggccaaaattgatgcagcctcgcccctggagaaagtctgcctcattggctgtggattctcgactggttatgggtctgcagttaacgttgccaaggtcaccccaggctctacctgtgctgtgtttggcctgggaggggtcggcctatctgctgttatgggctgtaaagcagctggagcagccagaatcattgcggtggacatcaacaaggacaaatttgcaaaggccaaagagttgggtgccactgaatgcatcaaccctcaagactacaagaaacccattcaggaagtgctaaaggaaatgactgatggaggtgtggatttttcgtttgaagtcatcggtcggcttgacaccatgatggcttccctgttatgttgtcatgaggcatgtggcacaagcgtcatcgtaggggtacctcctgcttcccagaacctctcaataaaccctatgctgctactgactggacgcacctggaagggggctgtttatggtggctttaagagtaaagaaggtatcccaaaacttgtggctgattttatggctaagaagttttcactggatgcgttaataacccatgttttaccttttgaaaaaataaatgaaggatttgacctgcttcactctgggaaaagtatccgtaccgtcctgacgttttgaggcaatagagatgccttcccctgtagcagtcttcagcctcctctaccctacaagatctggagcaacagctagga

SEQ ID NO: 1517 - DNA, 1993 bp, Homo sapiens
  source 1..1993: mol_type = unassigned DNA
acggaactccctgggtaggagtttgaagctttcttaactcagaaagaaacttccaacacagtttcccaaagaaaaatgggcaccaagggcaaagttattaaatgcaaagcagccatcgcctgggaagcaggcaagcccctttgcattgaagaggttgaagtagctccccccaaggctcatgaagttcgcattcagatcattgctacctctctgtgccatactgatgccactgttatcgattctaaatttgagggcctagctttcccagtgatcgttggccatgaggctgcaggtattgtggaaagtattgggccaggagtgaccaacgtcaaaccaggtgacaaagtaattccactttatgcacctctatgtagaaaatgcaagttttgtctgagtccactcacaaatttgtgtgggaaaatcagtaatctcaaaagtcctgctagtgatcaacaactaatggaagacaaaaccagcaggtttacctgcaaaggaaaaccagtttaccatttctttggaaccagtacattctctcagtacactgtggtgtcagatatcaatcttgccaaaatagatgatgatgcaaatttagagagagtttgtctgcttggatgtgggttttcaactggctatggggctgcaatcaacaatgccaaggtcacccctggttcgacttgtgctgtctttggcctaggaggtgtgggtctttctgctgtaatgggttgtaaagcagcaggagcttccagaatcataggtattgacatcaacagtgagaagtttgtgaaggctaaagccctgggagccactgactgcctcaatcctagagacttacataaaccgatccaggaagttatcattgaattgaccaagggaggtgtggattttgcccttgactgtgcaggtggatctgaaaccatgaaagcagccctggactgtacaaccgcaggctggggatcatgtactttcattggagtagctgctggtagcaaaggattgactatttttccagaggagctaataatcggccgtactataaatggaacattctttggtggttggaaaagtgtagattctatcccaaagctggtcactgactataagaataagaaattcaatctggatgcactggtgacccataccctgccttttgacaaaatcagtgaggcatttgacctaatgaaccaaggaaaaagcgtccgaacaatcctcatcttttgaagatgccaggagcaattcagaatactatctgattgaatgtgaacctgcctggttaatttattacctgatttgatgaaccaaggaaagccatgagtttaaacaaatatttacatttaatatgggaacataaaagagctttaaatattatagactttgtacctgttatatatatgaatattccctatgttaaataataataataactagtgtttatgaatagaatcatatcatctttagaaattgtttaaaattagttctgggaagttgaaagtggggaatgaagagataataaataaaactagattggccatatgtttataatttttttagattgggtaatgaatacatggagtttcattatacttttctctccacttttgtctatgttgaaaattttctgggagctaaatgatgagaacacatggacacatgatggggaacaacacacactggggcctgttgagggcagggagtcggcagagagagagcatcaggaagaatagctaatggatgctgggcttcatacctgggtgatgagatgatctgtgcagcaaagcaccatggtacatgtttacctatgtaacaaacctgcacatcctgcacatgtaccctggaacttaataaaagttggaaatttttaaaaagaatgaataagacctggtatttgatagcacaacagggagactatagtcaacagcaatttaattgtatattttaatatgactaaaagagtataatggattgtttgtaacacaaataaatgcttgaggagatg

SEQ ID NO: 1518 - DNA, 1961 bp, Homo sapiens
  source 1..1961: mol_type = unassigned DNA
atgcttgtccgaggaccacacttcgagttgcagagatgtaaaacacatctattctccagcaattatctgactcaggttattaaatgcaaagcagccatcgcctgggaagcaggcaagcccctttgcattgaagaggttgaagtagctccccccaaggctcatgaagttcgcattcagatcattgctacctctctgtgccatactgatgccactgttatcgattctaaatttgagggcctagctttcccagtgatcgttggccatgaggctgcaggtattgtggaaagtattgggccaggagtgaccaacgtcaaaccaggtgacaaagtaattccactttatgcacctctatgtagaaaatgcaagttttgtctgagtccactcacaaatttgtgtgggaaaatcagtaatctcaaaagtcctgctagtgatcaacaactaatggaagacaaaaccagcaggtttacctgcaaaggaaaaccagtttaccatttctttggaaccagtacattctctcagtacactgtggtgtcagatatcaatcttgccaaaatagatgatgatgcaaatttagagagagtttgtctgcttggatgtgggttttcaactggctatggggctgcaatcaacaatgccaaggtcacccctggttcgacttgtgctgtctttggcctaggaggtgtgggtctttctgctgtaatgggttgtaaagcagcaggagcttccagaatcataggtattgacatcaacagtgagaagtttgtgaaggctaaagccctgggagccactgactgcctcaatcctagagacttacataaaccgatccaggaagttatcattgaattgaccaagggaggtgtggattttgcccttgactgtgcaggtggatctgaaaccatgaaagcagccctggactgtacaaccgcaggctggggatcatgtactttcattggagtagctgctggtagcaaaggattgactatttttccagaggagctaataatcggccgtactataaatggaacattctttggtggttggaaaagtgtagattctatcccaaagctggtcactgactataagaataagaaattcaatctggatgcactggtgacccataccctgccttttgacaaaatcagtgaggcatttgacctaatgaaccaaggaaaaagcgtccgaacaatcctcatcttttgaagatgccaggagcaattcagaatactatctgattgaatgtgaacctgcctggttaatttattacctgatttgatgaaccaaggaaagccatgagtttaaacaaatatttacatttaatatgggaacataaaagagctttaaatattatagactttgtacctgttatatatatgaatattccctatgttaaataataataataactagtgtttatgaatagaatcatatcatctttagaaattgtttaaaattagttctgggaagttgaaagtggggaatgaagagataataaataaaactagattggccatatgtttataatttttttagattgggtaatgaatacatggagtttcattatacttttctctccacttttgtctatgttgaaaattttctgggagctaaatgatgagaacacatggacacatgatggggaacaacacacactggggcctgttgagggcagggagtcggcagagagagagcatcaggaagaatagctaatggatgctgggcttcatacctgggtgatgagatgatctgtgcagcaaagcaccatggtacatgtttacctatgtaacaaacctgcacatcctgcacatgtaccctggaacttaataaaagttggaaatttttaaaaagaatgaataagacctggtatttgatagcacaacagggagactatagtcaacagcaatttaattgtatattttaatatgactaaaagagtataatggattgtttgtaacacaaataaa

SEQ ID NO: 1519 - DNA, 2612 bp, Homo sapiens
  source 1..2612: mol_type = unassigned DNA
gcgcggcccaccccggatgtcagccccccgcgccgaccagaatccgtgaacatggcgaacgaggttatcaagtgcaaggctgcagttgcttgggaggctggaaagcctctctccatagaggagatagaggtggcacccccaaaggctcatgaagttcgaatcaagatcattgccactgcggtttgccacaccgatgcctataccctgagtggagctgatcctgagggttgttttccagtgatcttgggacatgaaggtgctggaattgtggaaagtgttggtgagggagttactaagctgaaggcgggtgacactgtcatcccactttacatcccacagtgtggagaatgcaaattttgtctaaatcctaaaactaacctttgccagaagataagagtcactcaagggaaaggattaatgccagatggtaccagcagatttacttgcaaaggaaagacaattttgcattacatgggaaccagcacattttctgaatacacagttgtggctgatatctctgttgctaaaatagatcctttagcacctttggataaagtctgccttctaggttgtggcatttcaaccggttatggtgctgctgtgaacactgccaagttggagcctggctctgtttgtgccgtctttggtctgggaggagtcggattggcagttatcatgggctgtaaagtggctggtgcttcccggatcattggtgtggacatcaataaagataaatttgcaagggccaaagagtttggagccactgaatgtattaaccctcaggattttagtaaacccatccaggaagtgctcattgagatgaccgatggaggagtggactattcctttgaatgtattggtaatgtgaaggtcatgagagcagcacttgaggcatgtcacaagggctggggcgtcagcgtcgtggttggagtagctgcttcaggtgaagaaattgccactcgtccattccagctggtaacaggtcgcacatggaaaggcactgcctttggaggatggaagagtgtagaaagtgtcccaaagttggtgtctgaatatatgtccaaaaagataaaagttgatgaatttgtgactcacaatctgtcttttgatgaaatcaacaaagcctttgaactgatgcattctggaaagagcattcgaactgttgtaaagatttaattcaaaagagaaaaataatgtccatcctgtcgtgatgtgataggagcagcttaacaggcagggagaagcgcctccaacctcacagcctcgtagagcttcacagctactccagaaaatagggttatgtgtgtcattcatgaatctctataatcaaggacaaggataattcagtcatgaacctgttttctggatgctcctccacataaataattgctagtttattaaggaatattttaacataataaaagtaatttctacatttgtgtggaaattgtcttgttttatgctgtcatcattgtcacggtttgtctgcccattatcttcattctgcaagggaaagggaaaggaagcagggcagtggtgggtgtctgaaacctcagaaacataacgttgaacttttaagggtctcagtccccgttgattaaagaacagatcctagccatcagtgacaaagttaatcaggacccaagtctgcttctgtgatattatcttgaagggaggtactgtgccttgttcatacctgtaccccaaattcctaggatggcatctgcccttcagggggcactaaaatgtattattgaaacagcattctgggcttaaataggtgtatgtatgtgttggttgtgactgtactatttctagtatagtgaactacatactgaatatccaagttctcagcacctacttttgtcaaatcttaacattttgccacttcgagatcacattgccattcctcccctccagaggtaacaattatccacaatttgatgtttatcattcctgtgttgttgtactttcactgtgtataacctaaaccatctactctttagtactgttttatatatttttaagcctcatacttgctcattctacagcttttttcactcattattgtataattatatctgaagctctcgttcattaattttagtcctgtgtagcagaattcaattacgggaactaccataatttatctgttctccagttgaaggcatgaagttgttgccagtttctgtattataacactgtagtggaacattcttctgcattgggctcactgcgtgttacctaagacgtatcacagaataaacacatttagccttatagacattgccaaattgctcttcaaagtaaatgtgagtttttgtgaattacatgagtatggaatggtgttttattatgactttagtttgcattttcctcaattctcgttaaatccttcattctaatggacattttattgtgaagaacctgttcatatcctgtgctcaactttgtattgaattatttttctctgaataatttttaggagttcttttattctagacatcaatcatttgtcagttttatatgttgcaaatatcttctagtctatcttgtgacttttctttttactttatggtattttgttgaataaagttttaatgtagtcacat

SEQ ID NO: 1520 - DNA, 1691 bp, Homo sapiens
  source 1..1691: mol_type = unassigned DNA
tgtattttgaaaacaacagaaaagaaatacttttgtacactctgttagaaattttaagtttggacatttaaaagtccaaatttaaaactcaaaaaaatggataataagaggggacctgtttgattaagggagaaaaaaatagtttgcattttcaccttttgtgctctttcactgagatgagcctatttcagattacacttaggaacttccatcaagcagcgggagagcctacttttcctgtttaataattaccagactacagagaaagctcaggacccagccttctgatctaccagtcgcctgtgtacctttgtactttctacagtgaaagttgctacaggatctccctttctcaataaattcatctgcggtggagaaaatcagcatgtgtactacaggccaagtcatcagatgcaaagcagccatactctggaagcctggtgcaccattttctattgaagaggtagaagtggccccaccaaaggcaaaggaagttcgcataaaggttgtggccaccggactgtgtggtacagagatgaaagtgttggggagtaaacacttggacctcttgtatcccaccatcttgggccatgaaggggctggaatcgttgagagtattggagaaggagtaagcacagtgaaaccaggtgacaaagttatcacactctttctgccacagtgtggagaatgtacctcttgcctgaattctgagggcaatttttgtatacaattcaaacagtcaaaaacccaactgatgtctgatggtaccagcaggtttacctgcaagggaaaatcaatatatcactttggtaataccagcaccttctgtgaatacacagtgataaaggaaatctcagttgccaagattgatgcagtcgctcctctagagaaagtatgcctaattagctgtggcttttccactgggtttggtgctgcaatcaatactgccaaggtgactccaggttctacctgtgctgtgtttggcctgggaggagtcggcttgtctgttgtcatgggttgtaaagcagcaggagcagccaggatcattggagtggatgtcaacaaggagaaatttaagaaggcacaggaattgggtgctactgagtgcctcaaccctcaggacttaaagaaacccattcaagaagttttatttgatatgacagatgctggtatagacttctgctttgaggccattggaaatctggacgttctggcagctgccctcgcctcctgcaatgagagctatggggtctgtgtggttgttggggtgttgcctgccagtgttcaactcaaaatcagtggccagttgttcttctcaggacgttctttgaagggttctgtttttggaggctggaagagcagacagcacatccctaaactggttgctgattatatggcagagaagttgaatctagatccactaattactcatactctgaatcttgataaaatcaatgaagcagttgaattaatgaaaactggaaaatggtaaactgcccacataaattttatgtctgtgtgtttgagaccaagagaaagggtgtattggcttgggagtagaagaagggtcgtccctgctgcagaagctgtatactgataattgaagaggctttcaggaatttgtaaagcatctccttcccctctgcattttgttttatttctagctaataaaatacataatcctgaaagta

SEQ ID NO: 1521 - DNA, 2802 bp, Homo sapiens
  source 1..2802: mol_type = unassigned DNA
accagtcgcctgtgtacctttgtactttctacagtgaaagttgctacaggatctccctttctcaataaattcatctgcggtggagaaaatcagcatgtgtactacaggccaagtcatcagatgcaaagcagccatactctggaagcctggtgcaccattttctattgaagaggtagaagtggccccaccaaaggcaaaggaagttcgcataaaggttgtggccaccggactgtgtggtacagagatgaaagtgttggggagtaaacacttggacctcttgtatcccaccatcttgggccatgaaggggctggaatcgttgagagtattggagaaggagtaagcacagtgaaaccaggtgacaaagttatcacactctttctgccacagtgtggagaatgtacctcttgcctgaattctgagggcaatttttgtatacaattcaaacagtcaaaaacccaactgatgtctgatggtaccagcaggtttacctgcaagggaaaatcaatatatcactttggtaataccagcaccttctgtgaatacacagtgataaaggaaatctcagttgccaagattgatgcagtcgctcctctagagaaagtatgcctaattagctgtggcttttccactgggtttggtgctgcaatcaatactgccaaggtgactccaggttctacctgtgctgtgtttggcctgggaggagtcggcttgtctgttgtcatgggttgtaaagcagcaggagcagccaggatcattggagtggatgtcaacaaggagaaatttaagaaggcacaggaattgggtgctactgagtgcctcaaccctcaggacttaaagaaacccattcaagaagttttatttgatatgacagatgctggtatagacttctgctttgaggccattggaaatctggacgttctggcagctgccctcgcctcctgcaatgagagctatggggtctgtgtggttgttggggtgttgcctgccagtgttcaactcaaaatcagtggccagttgttcttctcaggacgttctttgaagggttctgtttttggaggctggaagagcagacagcacatccctaaactggttgctgattatatggcagagaagttgaatctagatccactaattactcatactctgaatcttgataaaatcaatgaagcagttgaattaatgaaaactggaaaatgtatccgctgtatcctgttactttaagtacaatgtaatacatgcaagacccaaaggatatttcaccaactcaatggcatttgatgtaattttcatgatttagaagaattattcacccaatcccatttctatattctgacttctgattcactccgcagtggacctatatctggcttctgacctaaccatttcatcaaaattgttcttacgtaacccagtgtcaccaaggatcagcctccttttcagagctagattaaggttggcttgaatcactcaactccacatccttcagacataaaaggtcaatgcaagatgctcccattttcatagttcctctacctgtggacctttatattcttgtacactatatgtctctctcacaggcctagacatgaaactctgccattttactctaaagaaacaaaactccgcattaatgagtttattgaagattcaggttaacctgaatcaagttaacccagtctcaaatgctcacttatcctatctccttggcacaaatctctcctctcctggattgccaaagaaaattcaaattattcttcaattagtcaggatgatttgactatcagcagttcatagtacccatcttcataactaagccacctagggatccagcagaaaaaaaagggatgaggggagtcatcatacaggaggtggatcatttagcaggatccacacttcctacaaagcggttgtaatattaaataacaaaactgttttttattccaatcttcacataaaacaggaataattgtatactttcttactaatgtgttccatggagtttttcctccaagaagtggcttaggggaaaatgagccccagtaatgctttgtggcatccaatccttctaccccgaccctttgactttctgccccagcccctcttagttctcctagaattaggactaaggttaagtgccctcttgggatatgacttccttcccttcctcttgatacaaaaagagcctattaccaaccctcatacacacaagagttcccttcctagttgcagactcttctgctccagctggactcccctagctctggactcccactagatcacacaggggtccctgcatgtcagtaaactttggatgaccttgggagaccaaaaaatggaatatcattttttgatctaaacaaaatagtttcctgatttaacactggccaggaaggtgggctgcaccctcagtctctctctcccatcatggttttcacatgatatcaaaggactctcataacagtctgattcttatgagttgggcatcctgtgtttccctttaggggcctgcttccttcaaatagaggagatgggtgctatgaaacctattcactctggacttgggatggctcttctccatcttcccaagtctgagctggagcctccatgcccaactctgctctgctcttctatttcctgacagcagctaaggcatgttcctgttctgcccccaaattgaccttactaacagtgagaacttggaggagtcttcgggtcttgggaaatccaagttttcccggaaacgttttgttgtaaacagtgtccacactctttgctccaataaagctcggttccttaagcca

SEQ ID NO: 1522 - DNA, 991 bp, Homo sapiens
  source 1..991: mol_type = unassigned DNA
atctgcggtggagaaaatcagcatgtgtactacaggccaagtcatcagatgcaaagcagccatactctggaagcctggtgcaccattttctattgaagaggtagaagtggccccaccaaaggcaaaggaagttcgcataaaggtgacaaagttatcacactctttctgccacagtgtggagaatgtacctcttgcctgaattctgagggcaatttttgtatacaattcaagtgactccaggttctacctgtgctgtgtttggcctgggaggagtcggcttgtctgttgtcatgggttgtaaagcagcaggagcagccaggatcattggagtggatgtcaacaaggagaaatttaagaaggcacaggaattgggtgctactgagtgcctcaaccctcaggacttaaagaaacccattcaagaagttttatttgatatgacagatgctggtatagacttctgctttgaggccattggaaatctggacgttctggcagctgccctcgcctcctgcaatgagagctatggggtctgtgtggttgttggggtgttgcctgccagtgttcaactcaaaatcagtggccagttgttcttctcaggacgttctttgaagggttctgtttttggaggctggaagagcagacagcacatccctaaactggttgctgattatatggcagagaagttgaatctagatccactaattactcatactctgaatcttgataaaatcaatgaagcagttgaattaatgaaaactggaaaatgtatccgctgtatcctgttactttaagtacaatgtaatacatgcaagacccaaaggatatttcaccaactcaatggcatttgatgtaattttcatgatttagaagaattattcacccaatcccatttctatattctgacttctgattcactccgcagtggacctatatctggcttctgacctaaccatttcatcaaaattgttcttacgtaacccagtgtcaccaa

SEQ ID NO: 1523 - DNA, 2289 bp, Homo sapiens
  source 1..2289: mol_type = unassigned DNA
tttcaatagctttgattatcttgtttttgttagatccctcctcttggtttgatcatagtagttactgtatttctttttataagttggtctgcaaagggtagggcttgcagaccattgcaaagttgtgacggctgtgagtcatattgctgaaggtggaactctgaagccagactatctatgtgaaggcacaagctgctgttatatacaacagagtgaactgagcatcagtcagaaaaagtctatgtttgcagaaatacagatccaagacaaagacaggatgggcactgctggaaaagttattaaatgcaaagcagctgtgctttgggagcagaagcaacccttctccattgaggaaatagaagttgccccaccaaagactaaagaagttcgcattaagattttggccacaggaatctgtcgcacagatgaccatgtgataaaaggaacaatggtgtccaagtttccagtgattgtgggacatgaggcaactgggattgtagagagcattggagaaggagtgactacagtgaaaccaggtgacaaagtcatccctctctttctgccacaatgtagagaatgcaatgcttgtcgcaacccagatggcaacctttgcattaggagcgatattactggtcgtggagtactggctgatggcaccaccagatttacatgcaagggcaaaccagtccaccacttcatgaacaccagtacatttaccgagtacacagtggtggatgaatcttctgttgctaagattgatgatgcagctcctcctgagaaagtctgtttaattggctgtgggttttccactggatatggcgctgctgttaaaactggcaaggtcaaacctggttccacttgcgtcgtctttggcctgggaggagttggcctgtcagtcatcatgggctgtaagtcagctggtgcatctaggatcattgggattgacctcaacaaagacaaatttgagaaggccatggctgtaggtgccactgagtgtatcagtcccaaggactctaccaaacccatcagtgaggtgctgtcagaaatgacaggcaacaacgtgggatacacctttgaagttattgggcatcttgaaaccatgattgatgccctggcatcctgccacatgaactatgggaccagcgtggttgtaggagttcctccatcagccaagatgctcacctatgacccgatgttgctcttcactggacgcacatggaagggatgtgtctttggaggtttgaaaagcagagatgatgtcccaaaactagtgactgagttcctggcaaagaaatttgacctggaccagttgataactcatgttttaccatttaaaaaaatcagtgaaggatttgagctgctcaattcaggacaaagcattcgaacggtcctgacgttttgagatccaaagtggcaggaggtctgtgttgtcatggtgaactggagtttctcttgtgagagttccctcatctgaaatcatgtatctgtctcacaaatacaagcataagtagaagatttgttgaagacatagaacccttataaagaattattaacctttataaacatttaaagtcttgtgagcacctgggaattagtataataacaatgttaatatttttgatttacattttgtaaggctataattgtatcttttaagaaaacatacacttggatttctatgttgaaatggagatttttaagagttttaaccagctgctgcagatatataactcaaaacagatatagcgtataaagatatagtaaatgcatctcctagagtaatattcacttaacacattgaaactattattttttagatttgaatataaatgtattttttaaacacttgttatgagttaagttggattacattttgaaatcagttcattccatgatgcatattactggattagattaagaaagacagaaaagattaagggacgggcacatttttcaacgattaagaatcatcattacataacttggtgaaactgaaaaagtatatcatatgggtacacaaggctatttgccagcatatattaatattttagaaaatattccttttgtaatactgaatataaacatagagctagaatcatattatcatacttatcataatgttcaatttgatacagtagaattgcaagtccctaagtccctattcactgtgcttagtagtgactccatttaataaaaagtgtttttagtttttaacaactacactgatgtatctatatatatctataacatgttaaaaattcttaagaaaattaaaaattatataaaatg

SEQ ID NO: 1524 - DNA, 2516 bp, Homo sapiens
  source 1..2516: mol_type = unassigned DNA
ctgttttcatttatatttaattccagaaaccacatcaagtctttgcagaatgaagtagagcattaagaagtagagatgtacacacgcatctctaaaatcagccatgcctaggcaaagcagcttgcacttaaacacccaatacatttttcatgattgtgttgaagtgaagtaacctaacccgtttttatatccttcaaaataaggtggataggaatgctttcagcccttttcaatagctttgattatcttgtttttgttagatccctcctcttggtttgatcatagtagttactgtatttctttttataagttggtctgcaaagggtagggcttgcagaccattgcaaagttgtgacggctgtgagtcatattgctgaaggtggaactctgaagccagactatctatgtgaaggcacaagctgctgttatatacaacagagtgaactgagcatcagtcagaaaaagtctatgtttgcagaaatacagatccaagacaaagacaggatgggcactgctggaaaagttattaaatgcaaagcagctgtgctttgggagcagaagcaacccttctccattgaggaaatagaagttgccccaccaaagactaaagaagttcgcattaagattttggccacaggaatctgtcgcacagatgaccatgtgataaaaggaacaatggtgtccaagtttccagtgattgtgggacatgaggcaactgggattgtagagagcattggagaaggagtgactacagtgaaaccaggtgacaaagtcatccctctctttctgccacaatgtagagaatgcaatgcttgtcgcaacccagatggcaacctttgcattaggagcgatattactggtcgtggagtactggctgatggcaccaccagatttacatgcaagggcaaaccagtccaccacttcatgaacaccagtacatttaccgagtacacagtggtggatgaatcttctgttgctaagattgatgatgcagctcctcctgagaaagtctgtttaattggctgtgggttttccactggatatggcgctgctgttaaaactggcaaggtcaaacctggttccacttgcgtcgtctttggcctgggaggagttggcctgtcagtcatcatgggctgtaagtcagctggtgcatctaggatcattgggattgacctcaacaaagacaaatttgagaaggccatggctgtaggtgccactgagtgtatcagtcccaaggactctaccaaacccatcagtgaggtgctgtcagaaatgacaggcaacaacgtgggatacacctttgaagttattgggcatcttgaaaccatgattgatgccctggcatcctgccacatgaactatgggaccagcgtggttgtaggagttcctccatcagccaagatgctcacctatgacccgatgttgctcttcactggacgcacatggaagggatgtgtctttggaggtttgaaaagcagagatgatgtcccaaaactagtgactgagttcctggcaaagaaatttgacctggaccagttgataactcatgttttaccatttaaaaaaatcagtgaaggatttgagctgctcaattcaggacaaagcattcgaacggtcctgacgttttgagatccaaagtggcaggaggtctgtgttgtcatggtgaactggagtttctcttgtgagagttccctcatctgaaatcatgtatctgtctcacaaatacaagcataagtagaagatttgttgaagacatagaacccttataaagaattattaacctttataaacatttaaagtcttgtgagcacctgggaattagtataataacaatgttaatatttttgatttacattttgtaaggctataattgtatcttttaagaaaacatacacttggatttctatgttgaaatggagatttttaagagttttaaccagctgctgcagatatataactcaaaacagatatagcgtataaagatatagtaaatgcatctcctagagtaatattcacttaacacattgaaactattattttttagatttgaatataaatgtattttttaaacacttgttatgagttaagttggattacattttgaaatcagttcattccatgatgcatattactggattagattaagaaagacagaaaagattaagggacgggcacatttttcaacgattaagaatcatcattacataacttggtgaaactgaaaaagtatatcatatgggtacacaaggctatttgccagcatatattaatattttagaaaatattccttttgtaatactgaatataaacatagagctagaatcatattatcatacttatcataatgttcaatttgatacagtagaattgcaagtccctaagtccctattcactgtgcttagtagtgactccatttaataaaaagtgtttttagtttttaacaactacactgatgtatctatatatatctataacatgttaaaaattcttaagaaaattaaaaattatataaaatg

SEQ ID NO: 1525 - DNA, 1325 bp, Homo sapiens
  source 1..1325: mol_type = unassigned DNA
aattaaacacttggagatattccttgaggaatgaaatgcttggtgagcaggcatacagtgagggaaacactggatatggtgtttcagagaatgtcagtggaagcaggggttattaaatgcaaagcagctgtgctttgggagcagaagcaacccttctccattgaggaaatagaagttgccccaccaaagactaaagaagttcgcattaagattttggccacaggaatctgtcgcacagatgaccatgtgataaaaggaacaatggtgtccaagtttccagtgattgtgggacatgaggcaactgggattgtagagagcattggagaaggagtgactacagtgaaaccaggtgacaaagtcatccctctctttctgccacaatgtagagaatgcaatgcttgtcgcaacccagatggcaacctttgcattaggagcgatattactggtcgtggagtactggctgatggcaccaccagatttacatgcaagggcaaaccagtccaccacttcatgaacaccagtacatttaccgagtacacagtggtggatgaatcttctgttgctaagattgatgatgcagctcctcctgagaaagtctgtttaattggctgtgggttttccactggatatggcgctgctgttaaaactggcaaggtcaaacctggttccacttgcgtcgtctttggcctgggaggagttggcctgtcagtcatcatgggctgtaagtcagctggtgcatctaggatcattgggattgacctcaacaaagacaaatttgagaaggccatggctgtaggtgccactgagtgtatcagtcccaaggactctaccaaacccatcagtgaggtgctgtcagaaatgacaggcaacaacgtgggatacacctttgaagttattgggcatcttgaaaccatgattgatgccctggcatcctgccacatgaactatgggaccagcgtggttgtaggagttcctccatcagccaagatgctcacctatgacccgatgttgctcttcactggacgcacatggaagggatgtgtctttggaggtttgaaaagcagagatgatgtcccaaaactagtgactgagttcctggcaaagaaatttgacctggaccagttgataactcatgttttaccatttaaaaaaatcagtgaaggatttgagctgctcaattcaggacaaagcattcgaacggtcctgacgttttgagatccaaagtggcaggaggtctgtgttgtcatggtgaactggagtttctcttgtgagagttccctcatctgaaatcatgtatctgtctcacaaatacaagcataagtaga

SEQ ID NO: 1526 - DNA, 1420 bp, Homo sapiens
  source 1..1420: mol_type = unassigned DNA
gtctatgtttgcagaaatacagatccaagacaaagacaggatgggcactgctggaaaattttttccataggtcctttgcctgctatgtatctcccaggatgtaagtgtggtatgtggaagtgggaaggagtgttaggagtgaagttgttaacacttcctctgtaaatttgagttattaaatgcaaagcagctgtgctttgggagcagaagcaacccttctccattgaggaaatagaagttgccccaccaaagactaaagaagttcgcattaagattttggccacaggaatctgtcgcacagatgaccatgtgataaaaggaacaatggtgtccaagtttccagtgattgtgggacatgaggcaactgggattgtagagagcattggagaaggagtgactacagtgaaaccaggtgacaaagtcatccctctctttctgccacaatgtagagaatgcaatgcttgtcgcaacccagatggcaacctttgcattaggagcgatattactggtcgtggagtactggctgatggcaccaccagatttacatgcaagggcaaaccagtccaccacttcatgaacaccagtacatttaccgagtacacagtggtggatgaatcttctgttgctaagattgatgatgcagctcctcctgagaaagtctgtttaattggctgtgggttttccactggatatggcgctgctgttaaaactggcaaggtcaaacctggttccacttgcgtcgtctttggcctgggaggagttggcctgtcagtcatcatgggctgtaagtcagctggtgcatctaggatcattgggattgacctcaacaaagacaaatttgagaaggccatggctgtaggtgccactgagtgtatcagtcccaaggactctaccaaacccatcagtgaggtgctgtcagaaatgacaggcaacaacgtgggatacacctttgaagttattgggcatcttgaaaccatgattgatgccctggcatcctgccacatgaactatgggaccagcgtggttgtaggagttcctccatcagccaagatgctcacctatgacccgatgttgctcttcactggacgcacatggaagggatgtgtctttggaggtttgaaaagcagagatgatgtcccaaaactagtgactgagttcctggcaaagaaatttgacctggaccagttgataactcatgttttaccatttaaaaaaatcagtgaaggatttgagctgctcaattcaggacaaagcattcgaacggtcctgacgttttgagatccaaagtggcaggaggtctgtgttgtcatggtgaactggagtttctcttgtgagagttccctcatctgaaatcatgtatctgtctcacaaatacaagcataagtagaagatttgttgaagacatagaacccttataaag

SEQ ID NO: 1527 - DNA, 946 bp, Homo sapiens
  source 1..946: mol_type = unassigned DNA
agcgacccgaggagggaagaggactccaagcgccatggccgctgccgcccgagcccgggtcgcgtacttgctgaggcaactgcaacgcgcagcgtgccagtgcccaactcattctcatacttactcccaagcccctggactttcaccttctgggaaaacaacagattatgcctttgagatggctgtttcaaatattagatatggagcagcagttacaaaggaagtaggaatggacctaaaaaacatgggtgctaaaaatgtgtgcttgatgacagacaagaacctctccaagctccctcctgtgcaagtagctatggattccctagtgaagaatggcatcccctttacggtttatgataatgtgagagtggaaccaacggattcaagcttcatggaagctattgagtttgcccaaaagggagcttttgatgcctatgttgctgtcggtggtggctctaccatggacacctgtaaggctgctaatctgtatgcatccagccctcattctgatttcctagattatgtcagtgcccccattggcaagggaaagcctgtgtctgtgcctcttaagcctctgattgcagtgccaactacctcaggaaccgggagtgaaactactggggttgccatttttgactatgaacacttgaaagtaaaaattggcatcacttcgagagccatcaaacccacactgggactgattgatcctctgcacaccctccacatgcctgcccgagtggtcgccaacagtggctttgatgtgctttgccatgccctggagtcatacaccaccctgccctaccacctgcggagcccctgcccttcaaatcccatcacacggcctgcgtaccagggcagcaacccaatcagtgacatttgggctatccacgcgctgcggatcgtggctaagtatctgaagagggccgtcaacagcactgacaaatga

SEQ ID NO: 1528 - DNA, 1990 bp, Homo sapiens
  source 1..1990: mol_type = unassigned DNA
gacccgaggagggaagaggactccaagcgccatggccgctgccgcccgagcccgggtcgcgtacttgctgaggcaactgcaacgcgcagcgtgccagtgcccaactcattctcatacttactcccaagcccctggactttcaccttctgggaaaacaacagattatgcctttgagatggctgtttcaaatattagatatggagcagcagttacaaaggaagtaggaatggacctaaaaaacatgggtgctaaaaatgtgtgcttgatgacagacaagaacctctccaagctccctcctgtgcaagtagctatggattccctagtgaagaatggcatcccctttacggtttatgataatgtgagagtggaaccaacggattcaagcttcatggaagctattgagtttgcccaaaagggagcttttgatgcctatgttgctgtcggtggtggctctaccatggacacctgtaaggctgctaatctgtatgcatccagccctcattctgatttcctagattatgtcagtgcccccattggcaagggaaagcctgtgtctgtgcctcttaagcctctgattgcagtgccaactacctcaggaaccgggagtgaaactactggggttgccatttttgactatgaacacttgaaagtaaaaattggcatcacttcgagagccatcaaacccacactgggactgattgatcctctgcacaccctccacatgcctgcccgagtggtcgccaacagtggctttgatgtgctttgccatgccctggagtcatacaccaccctgccctaccacctgcggagcccctgcccttcaaatcccatcacacggcctgcgtaccagggcagcaacccaatcagtgacatttgggctatccacgcgctgcggatcgtggctaagtatctgaagagggctgtcagaaatcccgatgatcttgaagcaaggtctcatatgcacttggcaagtgcttttgctggcatcggctttggaaatgctggtgttcatctgtgccatggaatgtcttacccaatttcaggtttagtgaagatgtataaagcaaaggattacaatgtggatcacccactggtgccccatggcctttctgtggtgctcacgtccccagcggtgttcactttcacggcccagatgtttccagagcgacacctggagatggcagaaatactgggagccgacacccgcactgccaggatccaagatgcagggctggtgttggcagacacgctccggaaattcttattcgatctggatgttgatgatggcctagcagctgttggttactccaaagctgatatccccgcactagtgaaaggaacgctgccccaggaaagggtcaccaagcttgcaccctgtccccagtcagaagaggatctggctgctctgtttgaagcttcaatgaaactgtattaattgtcattttaactgaaagaattaccgctggccattgtagtgctgagagcaagagctgatctagctagggctttgtcttttcatctttgcgcataacttacctgttaccagtataggtgggatatacatttatcttgcaggaaattccccaaagctcagagtccagttccttccataaaacaggctggacaaatgaccactatgttagacccccaggctcgacttcaggggtcagtgttcctgtcccaaaccccacacagaatactctgcctctgtttcatgtagcaaatgagcaaaaactcagtatctatcaaaagtgtaaattatatttcctatgcctagtaattcacttcatgtctaaaaatttatctgatagaaacactagcaccagtacatacagaagcatggcaaggatgtttctggcagcacttttctaataataaaagatttgaaacaaccttaagtattcattattggtatatagatcacttatagtatactagacagtggaatactatggtactgttaataaagatgaagtaaatctcttggaaa

SEQ ID NO: 1529 - DNA, 2758 bp, Homo sapiens
  source 1..2758: mol_type = unassigned DNA
acaggtcccacctcctggctcccaggacgggtctgcaccaacctcagtttcggggctgcggctcacagaagtctaacctgcccgggacgcccgcaccaactcctgcgcgcggtccttccaaccctcctgctaccatgaagattgcagtgattggacagagcctgtttggccaggaagtttactgccacctgaggaaggagggccacgaagtggtgggtgtgttcactgttccagacaaggatggaaaggccgaccccctgggtctggaagctgagaaggatggagtgccggtattcaagtactcccggtggcgtgcaaaaggacaggctttgcctgatgtggtggcaaaataccaggctttgggggccgagctcaacgtcctgcccttctgcagccaattcatccccatggagataatcagtgccccccggcatggctccatcatctatcacccgtcactgctccctaggcaccgaggggcctcggccattcacaactggatccgcgggaacgacaaggtgccgggagcctggacagaggcctgtgaacagaaactgacatttttcaactcaacgctgaacacttcaggcctggtgcccgagggagacgctttgcccatcccaggagcccatcggccaggggtggtcaccaaagcaggactcatcctctttgggaatgatgacaaaatgctgctggtgaagaatattcagctggaggatggcaaaatgatcctggcctcgaacttctttaagggggcagccagcagtgtccttgagctgacagaggcagagctggttactgcggaggctgtgcggagtgtttggcagcggatcctccccaaagtcctggaggttgaagactccactgatttcttcaagtcaggggccgcgtctgtggacgttgtgaggctggtggaggaagtgaaggagctgtgtgatggcctggagttagaaaatgaagatgtgtacatggcatccacctttggggacttcatccagctgttagtgaggaagctgcgaggggacgatgaggagggcgagtgcagcattgactacgtggaaatggcagtgaacaagcgcactgtccgcatgccccaccagctcttcattgggggggagttcgtggatgccgagggcgccaagacctctgagaccatcaatcccaccgatggaagtgtcatctgccaggtatccctggcccaagtcaccgacgtcgacaaggcagtggccgcagccaaggatgcctttgagaatggacggtgggggaagatcagtgcgcgggaccggggccggctgatgtacaggttggcagatctcatggagcagcaccaggaggagctggccaccattgaggccctggatgcgggtgccgtctacacgctggccctgaagacccacgtgggcatgtccatccagaccttccgctactttgctggctggtgtgacaagatccagggctccaccatccccatcaaccaggccagacccaaccgcaacctgaccttgaccaggaaggagcctgttggggtttgtggcatcatcatcccctggaactatcccctgatgatgctgtcctggaagacagctgcctgcctggctgccgggaacacagtggtgatcaagcctgctcaggtgaccccactcacagccttgaagtttgcagagctgacattaaaggccggcattcccaaaggtgtggttaacgtcctcccaggatctggctccctggtcggccagagactctcagaccatcctgatgtgaggaaaatcgggttcacaggctccacagaggtgggcaagcacatcatgaaaagctgtgccataagtaacgtgaagaaggtgtccctggaactgggcgggaagtcacccctcatcatctttgctgactgtgacctcaacaaggctgtgcagatggggatgagttctgttttcttcaacaaaggagagaattgcattgcagcaggccgactctttgtggaggactccattcatgatgagttcgtgcggagagtggtagaagaggtgcggaagatgaaggtgggcaacccgctggacagggacaccgaccacgggccgcagaatcaccatgcccaccttgtgaagctgatggagtactgccagcatggcgtgaaggaaggggccacactggtctgcggcgggaatcaggtccctcggccagggttcttctttgagccaactgttttcacagacgtggaagaccacatgttcatagccaaggaggagtccttcgggcctgtcatgatcatctctcggtttgctgatggggacttggatgccgtgctgtctcgggccaatgccacggaatttggcctggcttctggtgtcttcaccagggacatcaacaaggccctgtatgtcagtgacaagctccaggcaggcactgtgtttgtcaacacgtacaacaagaccgacgtggccgctcccttcggaggattcaaacagtctggatttggcaaagatctaggagaggcggctctgaacgagtacctgcgggtcaagacagtgaccttcgaatactgaagaaaggtctttgtgagaagaaagtccctgcccctccctcgtggctggggccccctccctcttgagcctgggtgcacagcacctcccacctggggggctagtggaagccctcctgcctgcacaccatgtctgcatcttggacgccctctgtccagtcagaagcagcccttggctgggtgaggtgtgcccctcccagggagaataaagcttctgaagag

SEQ ID NO: 1530 - DNA, 2107 bp, Homo sapiens
  source 1..2107: mol_type = unassigned DNA
ctatcagaaccaaattgctgagccagtcacctgtgttccaggagccgaatcagaaatgtcatcctcaggcacgccagacttacctgtcctactcaccgatttgaagattcaatatactaagatcttcataaacaatgaatggcatgattcagtgagtggcaagaaatttcctgtctttaatcctgcaactgaggaggagctctgccaggtagaagaaggagataaggaggatgttgacaaggcagtgaaggccgcaagacaggcttttcagattggatccccgtggcgtactatggatgcttccgagagggggcgactattatacaagttggctgatttaatcgaaagagatcgtctgctgctggcgacaatggagtcaatgaatggtggaaaactctattccaatgcatatctgaatgatttagcaggctgcatcaaaacattgcgctactgtgcaggttgggctgacaagatccagggccgtacaataccaattgatggaaatttttttacatatacaagacatgaacctattggtgtatgtggccaaatcattccttggaatttcccgttggttatgctcatttggaagatagggcctgcactgagctgtggaaacacagtggttgtcaaaccagcagagcaaactcctctcactgctctccacgtggcatctttaataaaagaggcagggtttcctcctggagtagtgaatattgttcctggttatgggcctacagcaggggcagccatttcttctcacatggatatagacaaagtagccttcacaggatcaacagaggttggcaagttgatcaaagaagctgccgggaaaagcaatctgaagagggtgaccctggagcttggaggaaagagcccttgcattgtgttagctgatgccgacttggacaatgctgttgaatttgcacaccatggggtattctaccaccagggccagtgttgtatagccgcatccaggatttttgtggaagaatcaatttatgatgagtttgttcgaaggagtgttgagcgggctaagaagtatatccttggaaatcctctgaccccaggagtcactcaaggccctcagattgacaaggaacaatatgataaaatacttgacctcattgagagtgggaagaaagaaggggccaaactggaatgtggaggaggcccgtgggggaataaaggctactttgtccagcccacagtgttctctaatgttacagatgagatgcgcattgccaaagaggagatttttggaccagtgcagcaaatcatgaagtttaaatctttagatgacgtgatcaaaagagcaaacaatactttctatggcttatcagcaggagtgtttaccaaagacattgataaagccataacaatctcctctgctctgcaggcaggaacagtgtgggtgaattgctatggcgtggtaagtgcccagtgcccctttggtggattcaagatgtctggaaatggaagagaactgggagagtacggtttccatgaatatacagaggtcaaaacagtcacagtgaaaatctctcagaagaactcataaagaaaatacaagagtggagagaagctcttcaatagctaagcatctccttacagtcactaatatagtagattttaaagacaaaatttttcttttcttgatttttttaaacataagctaaatcatattagtattaatactacccatagaaaacttgacatgtagcttcttctgaaagaattatttgccttctgaaatgtgacccccaagtcctatcctaaataaaaaaagacaaattcggatgtatgatctctctagctttgtcatagttatgtgattttcctttgtagctacttttgcaggataataattttatagaaaaggaacagttgcatttagcttctttcccttagtgactcttgaagtacttaacatacacgttaactgcagagtaaattgctctgttcccagtagttataaagtccttggactgttttgaaaagtttcctaggatgtcatgtctgcttgtcaaaagaaataatccctgtaatatttagctgtaaactgaatataaagcttaataaaaacaaccttgcatgattcttgtta

SEQ ID NO: 1531 - DNA, 822 bp, Homo sapiens
  source 1..822: mol_type = unassigned DNA
tctatcagaaccaaattgctgagccagtcacctgtgttccaggagccgaatcagaaatgtcatcctcaggcacgccagacttacctgtcctactcaccgatttgaagattcaatatactaagatcttcataaacaatgaatggcatgattcagtgagtggcaagaaatttcctgtctttaatcctgcaactgaggaggagctctgccaggtagaagaaggagataaggaggatgttgacaaggcagtgaaggccgcaagacaggcttttcagattggatccccgtggcgtactatggatgcttccgagagggggcgactattatacaagttggctgatttaatcgaaagagatcgtctgctgctggcgacaatggagtcaatgaatggtggaaaactctattccaatgcatatctgaatgatttagcaggctgcatcaaaacattgcgctactgtgcaggttgggctgacaagatccagggccgtacaataccaattgatggaaatttttttacatatacaagacatgaacctattggtgtatgtggccaaatcattccttggaatttcccgttggttatgctcatttggaagatagggcctgcactgagctgtggaaacacagtggttgtcaaaccagcagagcaaactcctctcactgctctccacgtggcatctttaataaaagaggcagggtttcctcctggagtagtgaatattgttcctggttatggggccagtgttgtatagccgcatccaggatttttgtggaagaatcaatttatgatgagtttgttcgaaggagtgttgagcgggctaagaa

SEQ ID NO: 1532 - DNA, 806 bp, Homo sapiens
  source 1..806: mol_type = unassigned DNA
agaagtccaggatgggaagagagatctgcagactcccagggaacctacagctttctccttcacagcattgcaggaggagccgaatcagaaatgtcatcctcaggcacgccagacttacctgtcctactcaccgatttgaagattcaatatactaagatcttcataaacaatgaatggcatgattcagtgagtggcaagaaatttcctgtctttaatcctgcaactgaggaggagctctgccaggtagaagaaggagataaggaggatgttgacaaggcagtgaaggccgcaagacaggcttttcagattggatccccgtggcgtactatggatgcttccgagagggggcgactattatacaagttggctgatttaatcgaaagagatcgtctgctgctggcgacaatggagtcaatgaatggtggaaaactctattccaatgcatatctgaatgatttagcaggctgcatcaaaacattgcgctactgtgcaggttgggctgacaagatccagggccgtacaataccaattgatggaaatttttttacatatacaagacatgaacctattggtgtatgtggccaaatcattccttggaatttcccgttggttatgctcatttggaagatagggcctgcactgagctgtggaaacacagtggttgtcaaaccagcagagcaaactcctctcactgctctccacgtggcatctttaataaaagaggcagggtttcctcctggagtagtgaatattgttcctggttatgggcctacagcaggggcagccatttcttctcacatggatat

SEQ ID NO: 1533 - DNA, 1001 bp, Homo sapiens
  source 1..1001: mol_type = unassigned DNA
atcagaaccaaattgctgagccagtcacctgtgttccaggagccgaatcagaaatgtcatcctcaggcacgccagacttacctgtcctactcaccgatttgaagattcaatatactaagatcttcataaacaatgaatggcatgattcagtgagtggcaagaaatttcctgtctttaatcctgcaactgaggaggagctctgccaggtagaagaaggagataaggaggatgttgacaaggcagtgaaggccgcaagacaggcttttcagattggatccccgtggcgtactatggatgcttccgagagggggcgactattatacaagttggctgatttaatcgaaagagatcgtctgctgctggcgacaatggagtcaatgaatggtggaaaactctattccaatgcatatctgaatgatttagcaggctgcatcaaaacattgcgctactgtgcaggttgggctgacaagatccagggccgtacaataccaattgatggaaatttttttacatatacaagacatgaacctattggtgtatgtggccaaatcattccttggaatttcccgttggttatgctcatttggaagatagggcctgcactgagctgtggaaacacagtggttgtcaaaccagcagagcaaactcctctcactgctctccacgtggcatctttaataaaagaggcagggtttcctcctggagtagtgaatattgttcctggttatgggcctacagcaggggcagccatttcttctcacatggatatagacaaagtagccttcacaggatcaacagaggttggcaagttgatcaaagaagctgccgggaaaagcaatctgaagagggtgaccctggagcttggaggaaagagcccttgcattgtgttagctgatgccgacttggacaatgctgttgaatttgcacaccatggggtattctaccaccagggccagtgttgtatagccgcatccaggttttgtggaagaatcaatttatga

SEQ ID NO: 1534 - DNA, 805 bp, Homo sapiens
  source 1..805: mol_type = unassigned DNA
gtggccaggatcgggtctgggaagctcggagatttcactgtgagtggagtcagagggaaggcatttggagcaaaggcttctgtaagagggagtaggatggaaattgatctttgaagaaagcaagacagaagaagggagatggaaagatgaaatcattttaaaattgctggtaacaaacgaaggagccgaatcagaaatgtcatcctcaggcacgccagacttacctgtcctactcaccgatttgaagattcaatatactaagatcttcataaacaatgaatggcatgattcagtgagtggcaagaaatttcctgtctttaatcctgcaactgaggaggagctctgccaggtagaagaaggagataaggaggatgttgacaaggcagtgaaggccgcaagacaggcttttcagattggatccccgtggcgtactatggatgcttccgagagggggcgactattatacaagttggctgatttaatcgaaagagatcgtctgctgctggcgacaatggagtcaatgaatggtggaaaactctattccaatgcatatctgaatgatttagcaggctgcatcaaaacattgcgctactgtgcaggttgggctgacaagatccagggccgtacaataccaattgatggaaatttttttacatatacaagacatgaacctattggtgtatgtggccaaatcattccttggaatttcccgttggttatgctcatttggaagatagggcctgcactgagctgtggaaacacagtggttgtcaaaccagcagagcaaactcctctcactgctctc

SEQ ID NO: 1535 - DNA, 4098 bp, Homo sapiens
  source 1..4098: mol_type = unassigned DNA
attctgagcccgaggcgagggggactcgcacccactgccacctctccctgaccctctggccaccatgcacctcggcccggctgaggggagtcggggggtcgggggagagggcgtagctgccgagagcctggcgcccctgcccggaggaggagaacggaggacgccctcccgggtctccggaaaggaagggggacggggttcggtgggtcctgggacggggatgggagggaacgtgggcgagctgggagccgccctccgcagcctggactttcctggcctttctctactccgaagcagcaccgggccgctccggtccccgccagcccctgccagctccgcttccgggggccacgaccctcgctcgacttcggccgctgtgcgcctcccgccgactctgacccagggacccggagaccaagtccggctggccgaggcccgcgggccgcggcgcaagttccgctcccaccgtcgaggactgtggaggcggcgtgggctggtctccgcggccggggggcgggagcgccgggcggacttgaccgtgggcgccaagcgtcccggccgcgcggcgcgggctttatgtaaatggaggctgcgccgggcgtcctaggtaggatggaccagccccccgcgcctcggccctcacgtccaataagaagagccccagcttgacacctgcctatatacaggcgagcgcgcccccgggccgcggaccgcgcgcacagcccgcactgccccacgccgcgggctagggacacccggcccgccaccatgacttccagcaagatagagatgcccggcgaggtgaaggccgaccccgccgccctcatggcgtcgctgcacctcctgccgtcgcccacgcccaatctcgaaattaagtacaccaagatctttataaacaacgagtggcagaactcagagagtgggagagtgttccctgtctataatccagccacaggagaacaggtgtgtgaagttcaagaagcagacaaggcagatatagacaaagcagtgcaggcagcccgcctggctttctctcttggttcagtgtggagaaggatggatgcttcagaaaggggacgtctgttggataagcttgcagacttggtggaacgggacagggcagttcttgcaaccatggaatccctaaatggtggcaaaccattcctgcaagctttttatgtggatttgcagggcgtcatcaaaacctttcgatattacgcaggctgggctgataaaattcatgggatgaccattcctgtagatggagactattttacctttacaagacatgaacccattggagtgtgtggacagatcatcccatggaacttccccctgctgatgtttgcctggaaaatagctccagctttgtgctgtggcaatacagtagttattaagccagcagagcaaacaccactcagtgcactctacatgggagccctcatcaaggaggctggctttcctcccggggtcatcaatattttgccaggatatgggccaacggctggggcagcaatagcttctcacattggcatagacaagattgcattcacagggtctactgaggttggaaagcttatccaagaagcagctggaagaagtaatttgaagagagtaactctggaacttggaggcaaaagtcctaatattatttttgctgatgctgacttggactatgctgtggagcaggcccaccagggtgtgttcttcaatcaaggtcagtgctgcactgcaggctctcgcatcttcgtggaggagtccatctatgaggagtttgtgagaagaagcgtggagcgggccaagaggcgcgtagtggggagtccctttgaccccaccactgagcagggtccccagattgataagaaacagtacaacaagatcttggaactcatccagagtggtgtggctgagggcgccaagctggaatgtggaggcaaaggactgggccgaaaggggtttttcattgagcccacagtgttttccaacgtcactgatgatatgcggattgccaaggaggagatctttggccctgttcaggaaattttgagatttaagacgatggatgaagttatcgaaagagccaataactcagactttggactcgtagcagctgtctttactaatgacatcaacaaggccctcacagtgtcttctgcaatgcaagctgggactgtttggatcaattgttacaatgccttaaatgcccagagcccctttgggggattcaagatgtctggaaatgggagagaaatgggagaatttggcttgcgggagtactcagaagttaagacggtgacagtaaagatcccccagaagaactcctaagaaggccaagaaggaggatgaagcccagcctgcacgtctgtccctctctgctttctctgtagggcccagctctcaggaatacaaagttgagccacggtccttacttaaagattgaaaagataacatgtaggccaggcaggtcactgcacaactaaagcaaaccagctgggtacagtttcttggcactctgtaaggggccaccttaatcataccaaatattggggaaagtgggataaagggaggaggaggagctagcagacacatccagtatctccttctggagcacaggatgaaataagggagctgtattatttcatgtctttgtcacaaagaactttcctctcaaggaaaggtgacctttctcctgtcttcattttcctccttccaggccctcctcgctcacccacccctccctctcttccaaggagatgtcagctgagctcattctggggcagatgtttgggccgggaacaatttttcaaggttgtaaagccaaattatcatttcatgttatccatttcttcaaagcaaaacatgaaatggttttagctagagtcagaccagaatgaaaatgccaggagctggtacactacagatgtagtaagaacctgggatattcctgacccaatctggttttcttttacccataaataacatgaatgaaaaaagattgggacaatagagactggaagtcatcatgtgcagttcaccgcttctgagcttgctgcagttttggggtgtgtgtgtattagattccttctcagttattctggaataaggcaaggagtgggttgtttttcatagctagataagatcttttccaaagtttttcttagaaccaaccaaaaaacaatccgagtaggcccaagaatttgataatgctggatgccttgcagacatcattcagtttctaatattgggcaacaattattattaaatgaattatttctgtagttggaatctgtaccttctgaacctctacaccaataactgctgcaggtgtgattttggtctgtcacactgtacatctatcataatgtgccctgtatctattggcagtgaccttggaaaatctggccaagcctaggggtttccttttccatttgccaagttccattgtgccaggactgccgtgctccactgagctcctctgtcacaccccattcttgcccctcactgggcaggccatggcctacagcttgcagggagtaaagcaggcccgcctccctttcttcccatccacatactcctcttctgctttccagtgactccaccagtttgatgtgggaagtgttagcttcctttccttcttccatcccttcttccatctttccagctgtcaaatccaatccagtctctaacctaaatgcagatcatttatttaaaagtaccaaacataacccagagtatgtggaatatgggcaacatatatatagccttctgtatttaacgatcttctgcttcttaaccgtaccagttttctatttataactcttatctatccatgatgttttaaagtctccacttgctgttatttacaaacgacagtgcattcagcagcccagtgccgtgagccctgacagatgccgtatttctgagtgcttccatgtgaatgctgccctcctgtagcatgtgtccaagtggacatagccactaaccaactagttacctttggactgcaacaaaaaatgtgaaaatgaagatttatttcttttaatttacttaaaaagaaacctctgtgctagcaataaagcatttatattgtgtactcct

SEQ ID NO: 1536 - DNA, 3297 bp, Homo sapiens
  source 1..3297: mol_type = unassigned DNA
atacaggcgagcgcgcccccgggccgcggaccgcgcgcacagcccgcactgccccacgccgcgggctagggacacccggcccgccaccatgacttccagcaagatagagatgcccggcgaggtgaaggccgaccccgccgccctcatggcgtcgctgcacctcctgccgtcgcccacgcccaatctcgaaattaagtacaccaagatctttataaacaacgagtggcagaactcagagagtgggagagtgttccctgtctataatccagccacaggagaacaggtgtgtgaagttcaagaagcagacaaggcagatatagacaaagcagtgcaggcagcccgcctggctttctctcttggttcagtgtggagaaggatggatgcttcagaaaggggacgtctgttggataagcttgcagacttggtggaacgggacagggcagttcttgcaaccatggaatccctaaatggtggcaaaccattcctgcaagctttttatgtggatttgcagggcgtcatcaaaacctttcgatattacgcaggctgggctgataaaattcatgggatgaccattcctgtagatggagactattttacctttacaagacatgaacccattggagtgtgtggacagatcatcccatggaacttccccctgctgatgtttgcctggaaaatagctccagctttgtgctgtggcaatacagtagttattaagccagcagagcaaacaccactcagtgcactctacatgggagccctcatcaaggaggttggaaagcttatccaagaagcagctggaagaagtaatttgaagagagtaactctggaacttggaggcaaaagtcctaatattatttttgctgatgctgacttggactatgctgtggagcaggcccaccagggtgtgttcttcaatcaaggtcagtgctgcactgcaggctctcgcatcttcgtggaggagtccatctatgaggagtttgtgagaagaagcgtggagcgggccaagaggcgcgtagtggggagtccctttgaccccaccactgagcagggtccccagattgataagaaacagtacaacaagatcttggaactcatccagagtggtgtggctgagggcgccaagctggaatgtggaggcaaaggactgggccgaaaggggtttttcattgagcccacagtgttttccaacgtcactgatgatatgcggattgccaaggaggagatctttggccctgttcaggaaattttgagatttaagacgatggatgaagttatcgaaagagccaataactcagactttggactcgtagcagctgtctttactaatgacatcaacaaggccctcacagtgtcttctgcaatgcaagctgggactgtttggatcaattgttacaatgccttaaatgcccagagcccctttgggggattcaagatgtctggaaatgggagagaaatgggagaatttggcttgcgggagtactcagaagttaagacggtgacagtaaagatcccccagaagaactcctaagaaggccaagaaggaggatgaagcccagcctgcacgtctgtccctctctgctttctctgtagggcccagctctcaggaatacaaagttgagccacggtccttacttaaagattgaaaagataacatgtaggccaggcaggtcactgcacaactaaagcaaaccagctgggtacagtttcttggcactctgtaaggggccaccttaatcataccaaatattggggaaagtgggataaagggaggaggaggagctagcagacacatccagtatctccttctggagcacaggatgaaataagggagctgtattatttcatgtctttgtcacaaagaactttcctctcaaggaaaggtgacctttctcctgtcttcattttcctccttccaggccctcctcgctcacccacccctccctctcttccaaggagatgtcagctgagctcattctggggcagatgtttgggccgggaacaatttttcaaggttgtaaagccaaattatcatttcatgttatccatttcttcaaagcaaaacatgaaatggttttagctagagtcagaccagaatgaaaatgccaggagctggtacactacagatgtagtaagaacctgggatattcctgacccaatctggttttcttttacccataaataacatgaatgaaaaaagattgggacaatagagactggaagtcatcatgtgcagttcaccgcttctgagcttgctgcagttttggggtgtgtgtgtattagattccttctcagttattctggaataaggcaaggagtgggttgtttttcatagctagataagatcttttccaaagtttttcttagaaccaaccaaaaaacaatccgagtaggcccaagaatttgataatgctggatgccttgcagacatcattcagtttctaatattgggcaacaattattattaaatgaattatttctgtagttggaatctgtaccttctgaacctctacaccaataactgctgcaggtgtgattttggtctgtcacactgtacatctatcataatgtgccctgtatctattggcagtgaccttggaaaatctggccaagcctaggggtttccttttccatttgccaagttccattgtgccaggactgccgtgctccactgagctcctctgtcacaccccattcttgcccctcactgggcaggccatggcctacagcttgcagggagtaaagcaggcccgcctccctttcttcccatccacatactcctcttctgctttccagtgactccaccagtttgatgtgggaagtgttagcttcctttccttcttccatcccttcttccatctttccagctgtcaaatccaatccagtctctaacctaaatgcagatcatttatttaaaagtaccaaacataacccagagtatgtggaatatgggcaacatatatatagccttctgtatttaacgatcttctgcttcttaaccgtaccagttttctatttataactcttatctatccatgatgttttaaagtctccacttgctgttatttacaaacgacagtgcattcagcagcccagtgccgtgagccctgacagatgccgtatttctgagtgcttccatgtgaatgctgccctcctgtagcatgtgtccaagtggacatagccactaaccaactagttacctttggactgcaacaaaaaatgtgaaaatgaagatttatttcttttaatttacttaaaaagaaacctctgtgctagcaataaagcatttatattgtg

SEQ ID NO: 1537 - DNA, 3049 bp, Homo sapiens
  source 1..3049: mol_type = unassigned DNA
gacacccggcccgccaccatgacttccagcaagatagagatgcccggcgaggtgaaggccgaccccgccgccctcatggcgtcgctgcacctcctgccgtcgcccacgcccaatctcgaaattaagtacaccaaggtgtgaaaattggacttgctggcagaatcctttttgggagaagatgaagaatcagtgtgagactgtttggttaaaatccccaataaaactgaaactgatctttataaacaacgagtggcagaactcagagagtgggagagtgttccctgtctataatccagccacaggagaacaggtgtgtgaagttcaagaagcagacaaggcagatatagacaaagcagtgcaggcagcccgcctggctttctctcttggttcagtgtggagaaggatggatgcttcagaaaggggacgtctgttggataagcttgcagacttggtggaacgggacagggcagttcttgcaaccatggaatccctaaatggtggcaaaccattcctgcaagctttttatgtggatttgcagggcgtcatcaaaacctttcgatattacgcaggctgggctgataaaattcatgggatgaccattcctgtagatggagactattttacctttacaagacatgaacccattggagtgtgtggacagatcatcccatggaacttccccctgctgatgtttgcctggaaaatagctccagctttgtgctgtggcaatacagtagttattaagccagcagagcaaacaccactcagtgcactctacatgggagccctcatcaaggaggctggctttcctcccggggtcatcaatattttgccaggatatgggccaacggctggggcagcaatagcttctcacattggcatagacaagattgcattcacagggtctactgaggttggaaagcttatccaagaagcagctggaagaagtaatttgaagagagtaactctggaacttggaggcaaaagtcctaatattatttttgctgatgctgacttggactatgctgtggagcaggcccaccagggtgtgttcttcaatcaaggtcagtgctgcactgcaggctctcgcatcttcgtggaggagtccatctatgaggagtttgtgagaagaagcgtggagcgggccaagaggcgcgtagtggggagtccctttgaccccaccactgagcagggtccccagattgataagaaacagtacaacaagatcttggaactcatccagagtggtgtggctgagggcgccaagctggaatgtggaggcaaaggactgggccgaaaggggtttttcattgagcccacagtgttttccaacgtcactgatgatatgcggattgccaaggaggagatctttggccctgttcaggaaattttgagatttaagacgatggatgaagttatcgaaagagccaataactcagactttggactcgtagcagctgtctttactaatgacatcaacaaggccctcacagtgtcttctgcaatgcaagctgggactgtttggatcaattgttacaatgccttaaatgcccagagcccctttgggggattcaagatgtctggaaatgggagagaaatgggagaatttggcttgcgggagtactcagaagttaagacggtgacagtaaagatcccccagaagaactcctaagaaggccaagaaggaggatgaagcccagcctgcacgtctgtccctctctgctttctctgtagggcccagctctcaggaatacaaagttgagccacggtccttacttaaagattgaaaagataacatgtaggccaggcaggtcactgcacaactaaagcaaaccagctgggtacagtttcttggcactctgtaaggggccaccttaatcataccaaatattggggaaagtgggataaagggaggaggaggagctagcagacacatccagtatctccttctggagcacaggatgaaataagggagctgtattatttcatgtctttgtcacaaagaactttcctctcaaggaaaggtgacctttctcctgtcttcattttcctccttccaggccctcctcgctcacccacccctccctctcttccaaggagatgtcagctgagctcattctggggcagatgtttgggccgggaacaatttttcaaggttgtaaagccaaattatcatttcatgttatccatttcttcaaagcaaaacatgaaatggttttagctagagtcagaccagaatgaaaatgccaggagctggtacactacagatgtagtaagaacctgggatattcctgacccaatctggttttcttttacccataaataacatgaatgaaaaaagattgggacaatagagactggaagtcatcatgtgcagttcaccgcttctgagcttgctgcagttttggggtgtgtgtgtattagattccttctcagttattctggaataaggcaaggagtgggttgtttttcatagctagataagatcttttccaaagtttttcttagaaccaaccaaaaaacaatccgagtaggcccaagaatttgataatgctggatgccttgcagacatcattcagtttctaatattgggcaacaattattattaaatgaattatttctgtagttggaatctgtaccttctgaacctctacaccaataactgctgcaggtgtgattttggtctgtcacactgtacatctatcataatgtgccctgtatctattggcagtgaccttggaaaatctggccaagcctaggggtttccttttccatttgccaagttccattgtgccaggactgccgtgctccactgagctcctctgtcacaccccattcttgcccctcactgggcaggccatggcctacagcttgcagggagtaaagcaggcccgcctccctttcttcccatccacatactcctcttctgctttccagtgactccaccagtttgatgtgggaagtgttagcttcctttccttcttccatcccttcttccatctttccagctgtcaaatccaatccagtctctaacctaaatgcagatcat

SEQ ID NO: 1538 - DNA, 3237 bp, Homo sapiens
  source 1..3237: mol_type = unassigned DNA
atgaaaggtaagaactgtaatgatgttaaaatctttataaacaacgagtggcagaactcagagagtgggagagtgttccctgtctataatccagccacaggagaacaggtgtgtgaagttcaagaagcagacaaggcagatatagacaaagcagtgcaggcagcccgcctggctttctctcttggttcagtgtggagaaggatggatgcttcagaaaggggacgtctgttggataagcttgcagacttggtggaacgggacagggcagttcttgcaaccatggaatccctaaatggtggcaaaccattcctgcaagctttttatgtggatttgcagggcgtcatcaaaacctttcgatattacgcaggctgggctgataaaattcatgggatgaccattcctgtagatggagactattttacctttacaagacatgaacccattggagtgtgtggacagatcatcccatggaacttccccctgctgatgtttgcctggaaaatagctccagctttgtgctgtggcaatacagtagttattaagccagcagagcaaacaccactcagtgcactctacatgggagccctcatcaaggaggctggctttcctcccggggtcatcaatattttgccaggatatgggccaacggctggggcagcaatagcttctcacattggcatagacaagattgcattcacagggtctactgaggttggaaagcttatccaagaagcagctggaagaagtaatttgaagagagtaactctggaacttggaggcaaaagtcctaatattatttttgctgatgctgacttggactatgctgtggagcaggcccaccagggtgtgttcttcaatcaaggtcagtgctgcactgcaggctctcgcatcttcgtggaggagtccatctatgaggagtttgtgagaagaagcgtggagcgggccaagaggcgcgtagtggggagtccctttgaccccaccactgagcagggtccccagattgataagaaacagtacaacaagatcttggaactcatccagagtggtgtggctgagggcgccaagctggaatgtggaggcaaaggactgggccgaaaggggtttttcattgagcccacagtgttttccaacgtcactgatgatatgcggattgccaaggaggagatctttggccctgttcaggaaattttgagatttaagacgatggatgaagttatcgaaagagccaataactcagactttggactcgtagcagctgtctttactaatgacatcaacaaggccctcacagtgtcttctgcaatgcaagctgggactgtttggatcaattgttacaatgccttaaatgcccagagcccctttgggggattcaagatgtctggaaatgggagagaaatgggagaatttggcttgcgggagtactcagaagttaagacggtgacagtaaagatcccccagaagaactcctaagaaggccaagaaggaggatgaagcccagcctgcacgtctgtccctctctgctttctctgtagggcccagctctcaggaatacaaagttgagccacggtccttacttaaagattgaaaagataacatgtaggccaggcaggtcactgcacaactaaagcaaaccagctgggtacagtttcttggcactctgtaaggggccaccttaatcataccaaatattggggaaagtgggataaagggaggaggaggagctagcagacacatccagtatctccttctggagcacaggatgaaataagggagctgtattatttcatgtctttgtcacaaagaactttcctctcaaggaaaggtgacctttctcctgtcttcattttcctccttccaggccctcctcgctcacccacccctccctctcttccaaggagatgtcagctgagctcattctggggcagatgtttgggccgggaacaatttttcaaggttgtaaagccaaattatcatttcatgttatccatttcttcaaagcaaaacatgaaatggttttagctagagtcagaccagaatgaaaatgccaggagctggtacactacagatgtagtaagaacctgggatattcctgacccaatctggttttcttttacccataaataacatgaatgaaaaaagattgggacaatagagactggaagtcatcatgtgcagttcaccgcttctgagcttgctgcagttttggggtgtgtgtgtattagattccttctcagttattctggaataaggcaaggagtgggttgtttttcatagctagataagatcttttccaaagtttttcttagaaccaaccaaaaaacaatccgagtaggcccaagaatttgataatgctggatgccttgcagacatcattcagtttctaatattgggcaacaattattattaaatgaattatttctgtagttggaatctgtaccttctgaacctctacaccaataactgctgcaggtgtgattttggtctgtcacactgtacatctatcataatgtgccctgtatctattggcagtgaccttggaaaatctggccaagcctaggggtttccttttccatttgccaagttccattgtgccaggactgccgtgctccactgagctcctctgtcacaccccattcttgcccctcactgggcaggccatggcctacagcttgcagggagtaaagcaggcccgcctccctttcttcccatccacatactcctcttctgctttccagtgactccaccagtttgatgtgggaagtgttagcttcctttccttcttccatcccttcttccatctttccagctgtcaaatccaatccagtctctaacctaaatgcagatcatttatttaaaagtaccaaacataacccagagtatgtggaatatgggcaacatatatatagccttctgtatttaacgatcttctgcttcttaaccgtaccagttttctatttataactcttatctatccatgatgttttaaagtctccacttgctgttatttacaaacgacagtgcattcagcagcccagtgccgtgagccctgacagatgccgtatttctgagtgcttccatgtgaatgctgccctcctgtagcatgtgtccaagtggacatagccactaaccaactagttacctttggactgcaacaaaaaatgtgaaaatgaagatttatttcttttaatttacttaaaaagaaacctctgtgctagcaataaagcatttatattgtgt

SEQ ID NO: 1539 - DNA, 577 bp, Homo sapiens
  source 1..577: mol_type = unassigned DNA
cagcctctagtaacttgtttcttcctggaaaagatgaatctgatcccaattaacttaaataaaacaaaccaaacaaaactctccactaccagcctggcagctagggaggcattattgggtctgaatgtaggaaatcaggaaatacttacaatcaagatgaacgtgcccaagaactcagagagggtttctttcgctaagctgctcttcaagaccagtctctgcttgaagctttttcccttttctgctccctcaggctgcatcttggggcttctctgaggactcctgtttctaccaatacctacctgttgtggtcctcactttcacagccagatgaaaatggacgttttgacaatggctcacagattcctggagatgtctgatctttataaacaacgagtggcagaactcagagagtgggagagtgttccctgtctataatccagccacaggagaacaggtgtgtgaagttcaagaagcagacaaggcagatatagacaaagcagtgcaggcagcccgcctggctttctctcttggttcagtgtggagaaggatggatgcttcagaaaggggacgtctg

SEQ ID NO: 1540 - DNA, 1664 bp, Homo sapiens
  source 1..1664: mol_type = unassigned DNA
agagcagcaggatggcacttggtgtctggatgcctttggagttgcacatacagcttctttatgaaaggaagaaactggaagacaacaaagatctttataaacaacgagtggcagaactcagagagtgggagagtgttccctgtctataatccagccacaggagaacaggtgtgtgaagttcaagaagcagacaaggcagatatagacaaagcagtgcaggcagcccgcctggctttctctcttggttcagtgtggagaaggatggatgcttcagaaaggggacgtctgttggataagcttgcagacttggtggaacgggacagggcagttcttgcaaccatggaatccctaaatggtggcaaaccattcctgcaagctttttatgtggatttgcagggcgtcatcaaaacctttcgatattacgcaggctgggctgataaaattcatgggatgaccattcctgtagatggagactattttacctttacaagacatgaacccattggagtgtgtggacagatcatcccatggaacttccccctgctgatgtttgcctggaaaatagctccagctttgtgctgtggcaatacagtagttattaagccagcagagcaaacaccactcagtgcactctacatgggagccctcatcaaggaggctggctttcctcccggggtcatcaatattttgccaggatatgggccaacggctggggcagcaatagcttctcacattggcatagacaagattgcattcacagggtctactgaggttggaaagcttatccaagaagcagctggaagaagtaatttgaagagagtaactctggaacttggaggcaaaagtcctaatattatttttgctgatgctgacttggactatgctgtggagcaggcccaccagggtgtgttcttcaatcaaggtcagtgctgcactgcaggctctcgcatcttcgtggaggagtccatctatgaggagtttgtgagaagaagcgtggagcgggccaagaggcgcgtagtggggagtccctttgaccccaccactgagcagggtccccagattgataagaaacagtacaacaagatcttggaactcatccagagtggtgtggctgagggcgccaagctggaatgtggaggcaaaggactgggccgaaaggggtttttcattgagcccacagtgttttccaacgtcactgatgatatgcggattgccaaggaggagatctttggccctgttcaggaaattttgagatttaagacgatggatgaagttatcgaaagagccaataactcagactttggactcgtagcagctgtctttactaatgacatcaacaaggccctcacagtgtcttctgcaatgcaagctgggactgtttggatcaattgttacaatgccttaaatgcccagagcccctttgggggattcaagatgtctggaaatgggagagaaatgggagaatttggcttgcgggagtactcagaagttaagacggtgacagtaaagatcccccagaagaactcctaagaaggccaagaaggaggatgaagcccagcctgcacgtctgtccctctctgctttctctgtagggcccagctctcaggaatacaaagttgagccacggtccttacttaaagattgaaaagataacatgtaggcca

SEQ ID NO: 1541 - DNA, 664 bp, Homo sapiens
  source 1..664: mol_type = unassigned DNA
agctatagtctggcaggaaaactggactgagtggactagcttggggatcgtcaagactcttgatcttattggaggcagcttggtacattgcaatgagggggagatttgggatcagggaacctgggatggagccatgtctttctcccttcccagctgtgtaaccttggacaagtcacttaacctccaagactcactttcctccttcatcaagtgctgtgtgaagaatgcaggagagtgatttaagcaaagccccctaactgcctggcgtctagtaagtacacaggcagtgtgtacacaaggaaggaaatggcaggctgttcatatgcagcaagatccacacttggccaaacctggggtcacagagatggacatggaatcgagggcagaagatctgggtttgagtccagcagtgctttagatctttataaacaacgagtggcagaactcagagagtgggagagtgttccctgtctataatccagccacaggagaacaggtgtgtgaagttcaagaagcagacaaggcagatatagacaaagcagtgcaggcagcccgcctggctttctctcttggttcagtgtggagaaggatggatgcttcagaaaggggacgtctgttggataagcttgcagacttggtggaacgggacagggcagttcttgca

SEQ ID NO: 1542 - DNA, 1468 bp, Homo sapiens
  source 1..1468: mol_type = unassigned DNA
agtacaccactacatgctcatgcttcacttttttcatgacagtggatggttcttcctttatttggagtgtttttcttcagttgtgcctcttcctctctaacaggcagatatagacaaagcagtgcaggcagcccgcctggctttctctcttggttcagtgtggagaaggatggatgcttcagaaaggggacgtctgttggataagcttgcagacttggtggaacgggacagggcagttcttgcaaccatggaatccctaaatggtggcaaaccattcctgcaagctttttatgtggatttgcagggcgtcatcaaaacctttcgatattacgcaggctgggctgataaaattcatgggatgaccattcctgtagatggagactattttacctttacaagacatgaacccattggagtgtgtggacagatcatcccatggaacttccccctgctgatgtttgcctggaaaatagctccagctttgtgctgtggcaatacagtagttattaagccagcagagcaaacaccactcagtgcactctacatgggagccctcatcaaggaggctggctttcctcccggggtcatcaatattttgccaggatatgggccaacggctggggcagcaatagcttctcacattggcatagacaagattgcattcacagggtctactgaggttggaaagcttatccaagaagcagctggaagaagtaatttgaagagagtaactctggaacttggaggcaaaagtcctaatattatttttgctgatgctgacttggactatgctgtggagcaggcccaccagggtgtgttcttcaatcaaggtcagtgctgcactgcaggctctcgcatcttcgtggaggagtccatctatgaggagtttgtgagaagaagcgtggagcgggccaagaggcgcgtagtggggagtccctttgaccccaccactgagcagggtccccagattgataagaaacagtacaacaagatcttggaactcatccagagtggtgtggctgagggcgccaagctggaatgtggaggcaaaggactgggccgaaaggggtttttcattgagcccacagtgttttccaacgtcactgatgatatgcggattgccaaggaggagatctttggccctgttcaggaaattttgagatttaagacgatggatgaagttatcgaaagagccaataactcagactttggactcgtagcagctgtctttactaatgacatcaacaaggccctcacagtgtcttctgcaatgcaagctgggactgtttggatcaattgttacaatgccttaaatgcccagagcccctttgggggattcaagatgtctggaaatgggagagaaatgggagaatttggcttgcgggagtactcagaagttaagacggtgacagtaaagatcccccagaagaactcctaagaaggccaagaaggaggatgaagcccagcc

SEQ ID NO: 1543 - DNA, 554 bp, Homo sapiens
  source 1..554: mol_type = unassigned DNA
attgaagcattattataagctccagagtacacgtcttctgtggattttcagtcgtacttacaatttcatgctcagaagaggcctttagtatatattttgcagtgtcttctgtgaagtcaaatttctgctcagatctttataaacaacgagtggcagaactcagagagtgggagagtgttccctgtctataatccagccacaggagaacaggtgtgtgaagttcaagaagcagacaagatatagacaaagcagtgcaggcagcccgcctggctttctctcttggttcagtgtggagaaggatggatgcttcagaaaggggacgtctgttggataagcttgcagacttggtggaacgggacagggcagttcttgcaaccatggaatccctaaatggtggcaaaccattcctgcaagctttttatgtggatttgcagggcgtcatcaaaacctttcgatattacgcaggctgggctgataaaattcatgggatgaccattcctgtagatggagactattttacctttacaagacatgaacccattggagtgtgtgga

SEQ ID NO: 1544 - DNA, 3924 bp, Homo sapiens
  source 1..3924: mol_type = unassigned DNA
attcccgagcgccgcgagccggccgaagtcgggcgagcgcgccgtgcggcggctgggagtgggctgcatgtgccgcgcggggagcccgcccgacttcggggaggcagcggggcgccgtggccccgcggctcagctccctgccgggtcgggtgtcccagccctgcgacttccggggcccggcggctcctcggggagctcgtccacaggcagcctccggggcgagagagcgcgcggcgcgggcgccgggacggtccgcggcacgcgggtggagccgccggcgctcgggctcccgcaggggcggcgggcggggcggggtgaggcgggccggccgccctcccctctcctccctcccgcagcccgccctcccttcctccggtcccgcagccaattaggcggccccctcgggcgggaggcgtggggcgctgcataaagcggcggggagctgccaccccgggagcgggctgcgcagtgtccgggccgagccggtgcgccgcagactagggcgcctcgggccagggagcgcggaggagccatggccaccgctaacggggccgtggaaaacgggcagccggacaggaagccgccggccctgccgcgccccatccgcaacctggaggtcaagttcaccaagatatttatcaacaatgaatggcacgaatccaagagtgggaaaaagtttgctacatgtaacccttcaactcgggagcaaatatgtgaagtggaagaaggagataagcccgacgtggacaaggctgtggaggctgcacaggttgccttccagaggggctcgccatggcgccggctggatgccctgagtcgtgggcggctgctgcaccagctggctgacctggtggagagggaccgcgccaccttggccgccctggagacgatggatacagggaagccatttcttcatgcttttttcatcgacctggagggctgtattagaaccctcagatactttgcagggtgggcagacaaaatccagggcaagaccatccccacagatgacaacgtcgtgtgcttcaccaggcatgagcccattggtgtctgtggggccatcactccatggaacttccccctgctgatgctggtgtggaagctggcacccgccctctgctgtgggaacaccatggtcctgaagcctgcggagcagacacctctcaccgccctttatctcggctctctgatcaaagaggccgggttccctccaggagtggtgaacattgtgccaggattcgggcccacagtgggagcagcaatttcttctcaccctcagatcaacaagatcgccttcaccggctccacagaggttggaaaactggttaaagaagctgcgtcccggagcaatctgaagcgggtgacgctggagctgggggggaagaacccctgcatcgtgtgtgcggacgctgacttggacttggcagtggagtgtgcccatcagggagtgttcttcaaccaaggccagtgttgcacggcagcctccagggtgttcgtggaggagcaggtctactctgagtttgtcaggcggagcgtggagtatgccaagaaacggcccgtgggagaccccttcgatgtcaaaacagaacaggggcctcagattgatcaaaagcagttcgacaaaatcttagagctgatcgagagtgggaagaaggaaggggccaagctggaatgcgggggctcagccatggaagacaaggggctcttcatcaaacccactgtcttctcagaagtcacagacaacatgcggattgccaaagaggagattttcgggccagtgcaaccaatactgaagttcaaaagtatcgaagaagtgataaaaagagcgaatagcaccgactatggactcacagcagccgtgttcacaaaaaatctcgacaaagccctgaagttggcttctgccttagagtctggaacggtctggatcaactgctacaacgccctctatgcacaggctccatttggtggctttaaaatgtcaggaaatggcagagaactaggtgaatacgctttggccgaatacacagaagtgaaaactgtcaccatcaaacttggcgacaagaacccctgaaggaaaggcggggctccttcctcaaacatcggacggcggaatgtggcagatgaaatgtgctggaggaaaaaaatgacatttctgaccttcccgggacacattcttctggaggctttacatctactggagttgaatgattgctgttttcctctcactctcctgtttattcaccagactggggatgcctataggttgtctgtgaaatcgcagtcctgcctggggagggagctgttggccatttctgtgtttccctttaaaccagatcctggagacagtgagatactcagggcgttgttaacagggagtggtatttgaagtgtccagcagttgcttgaaatgctttgccgaatctgactccagtaagaatgtgggaaaaccccctgtgtgttctgcaagcagggctcttgcaccagcggtctcctcagggtggacctgcttacagagcaagccacgcctctttccgaggtgaaggtgggaccattccttgggaaaggattcacagtaaggttttttggtttttgttttttgttttcttgtttttaaaaaaaggatttcacagtgagaaagttttggttagtgcataccgtggaagggcgccagggtctttgtggattgcatgttgacattgaccgtgagattcggcttcaaaccaatactgcctttggaatatgacagaatcaatagcccagagagcttagtcaaagacgatatcacggtctaccttaaccaaggcactttcttaagcagaaaatattgttgaggttacctttgctgctaaagatccaatcttctaacgccacaacagcatagcaaatcctaggataattcacctcctcatttgacaaatcagagctgtaattcgctttaacaaattacgcatttctatcacgttcactaacagcttatgataagtctgtgtagtcttccttttctccagttctgttacccaatttagattagtaaagcgtacacaactggaaagactgctgtaataacacagccttgttatttttaagtcctattttgatattaatttctgattagttagtaaataacacctggattctatggaggacctcggtcttcatccaagtggcctgagtatttcactggcaggttgtgaatttttcttttcctctttggggatccaaatgatgatgtgcaatttcatgttttaacttgggaaactgaaagtgttcccatatagcttcaaaaacaaaaacaaatgtgttatccgacggatacttttatggttactaactagtactttcctaattgggaaagtagtgcttaagtttgcaaattaagttggggagggcaataataaaatgagggcccgtaacagaaccagtgtgtgtataacgaaaaccatgtataaaatgggcctatcacccttgtcagagatataaattaccacatttgccttcccttcatcagctaacacttatcacttatactaccaataacttgttaaatcaggatttggcttcatacactgaattttcagtattttatctcaagtagatatagacactaaccttgatagtgatacgttagagggttcctattcttccattgtacgataatgtctttaatatgaaatgctacattatttataattggtagagttattgtatctttttatagttgtaagtacacagaggtggtatatttaaacttctgtaatatactgtatttagaaatggaaatatatatagtgttaggtttcacttcttttaaggtttacccctgtggtgtggtttaaaaatctataggcctgggaattccgatcctagctgcagatcgcatcccacaatgcgagaatgataaaataaaattggatatttgagaaa

SEQ ID NO: 1545 - DNA, 891 bp, Homo sapiens
  source 1..891: mol_type = unassigned DNA
agcgggctgcgcagtgtccgggccgagccggtgcgccgcagactagggcgcctcgggccagggagcgcggaggagccatggccaccgctaacggggccgtggaaaacgggcagccggacaggaagccgccggccctgccgcgccccatccgcaacctggaggtcaagttcaccaagatatttatcaacaatgaatggcacgaatccaagagtgggaaaaagtttgctacatgtaacccttcaactcgggagcaaatatgtgaagtggaagaaggagataagcccgacgtggacaaggctgtggaggctgcacaggttgccttccagaggggctcgccatggcgccggctggatgccctgagtcgtgggcggctgctgcaccagctggctgacctggtggagagggaccgcgccaccttggccgccctggagacgatggatacagggaagccatttcttcatgcttttttcatcgacctggagggctgtattagaaccctcagattgatcaaaagcagttcgacaaaatcttagagctgatcgagagtgggaagaaggaaggggccaagctggaatgcgggggctcagccatggaagacaaggggctcttcatcaaacccactgtcttctcagaagtcacagacaacatgcggattgccaaagaggagattttcgggccagtgcaaccaatactgaagttcaaaagtatcgaagaagtgataaaaagagcgaatagcaccgactatggactcacagcagccgtgttcacaaaaaatctcgacaaagccctgaagttggcttctgccttagagtctggaacggtctggatcaactgctacaacgccctctatgcacaggctccatttggtggctttaaaatgtcaggaaatgg

SEQ ID NO: 1546 - DNA, 3066 bp, Homo sapiens
  source 1..3066: mol_type = unassigned DNA
aggcggagcctcattggccgctgagccccgggctgcgcggaggcgggacctgcggccagccctgggcggccatgtggacagagctgggagggccggaaccagaacccaagcgtgatcctgaaccggagcccgagcctgctgcagagtgtcagcatgctgcgcttcctggcaccccggctgcttagcctccagggcaggaccgcccgctactcctcggcagcagccctcccaagccccattctgaacccagacatcccctacaaccagctgttcatcaacaatgaatggcaagatgcagtcagcaagaagaccttcccgacggtcaaccctaccaccggggaggtcattgggcacgtggctgaaggtgaccgggctgatgtggatcgggccgtgaaagcagcccgggaagccttccgcctggggtccccatggcgccggatggatgcctctgagcggggccggctgctgaaccgcctggcagacctagtggagcgggatcgagtctacttggcctcactcgagaccttggacaatgggaagcctttccaagagtcttacgccttggacttggatgaggtcatcaaggtgtatcggtactttgctggctgggctgacaagtggcatggcaagaccatccccatggatggccagcatttctgcttcacccggcatgagcccgttggtgtctgtggccagatcatcccgtggaacttccccttggtcatgcagggttggaaacttgccccggcactcgccacaggcaacactgtggttatgaaggtggcagagcagacccccctctctgccctgtatttggcctccctcatcaaggaggcaggctttccccctggggtggtgaacatcatcacggggtatggcccaacagcaggtgcggccatcgcccagcacgtggatgttgacaaagttgccttcaccggttccaccgaggtgggccacctgatccagaaagcagctggcgattccaacctcaagagagtcaccctggagctgggtggtaagagccccagcatcgtgctggccgatgctgacatggagcatgccgtggagcagtgccacgaagccctgttcttcaacatgggccagtgctgctgtgctggctcccggaccttcgtggaagaatccatctacaatgagtttctcgagagaaccgtggagaaagcaaagcagaggaaagtggggaacccctttgagctggacacccagcaggggcctcaggtggacaaggagcagtttgaacgagtcctaggctacatccagcttggccagaaggagggcgcaaaactcctctgtggcggagagcgtttcggggagcgtggtttcttcatcaagcctactgtctttggtggcgtgcaggatgacatgagaattgccaaagaggagatctttgggcctgtgcagcccctgttcaagttcaagaagattgaggaggtggttgagagggccaacaacaccaggtatggcctggctgcggctgtgttcacccgggatctggacaaggccatgtacttcacccaggcactccaggccgggaccgtgtgggtaaacacctacaacatcgtcacctgccacacgccatttggagggtttaaggaatctggaaacgggagggagctgggtgaggatgggcttaaggcctacacagaggtaaagacggtcaccatcaaggttcctcagaagaactcgtaagagcagctgtcagggaggcccagtcacagtccagcaattccacaaccaccttgacgaatgcttgccaagctgttttaaagccaagaacaccctttctttgttccaaattaactcttagaagaaaccccacaaataaagcaattcaatcaaggctgttctatttaaatcagagatggggaccaggctcagagttctacctatctaacccccaaccacagcccccttggtggcccatgagttgcttccatgaaatcttaggagtctctggaggacagattaaaaaccagtgatctgtaatttgtagctcttcctgctgatccaaggactttcccatgggtgcgcttgatggtttagtggatcgactcaactcagaacacaagcttggaaagtgttaggggttttgaactaggtggatactaaatctcggccccactcttcattggcttaacctaaaaaccagaggtgcttttccttgtctgtgtgccagttgctggctgttttagttgcttgcccttcattttgctactgattttccttaatttgtgggaaggagtaggcaaagaatatgcttacatgattacacctgtaaagtaagcccaaacatcccaaatgtccgtcaactgatgagtggattaataaaatgtttccatggaatattccttggattactcagccataaaaaggaatgaagtactgacacatgctgtgacatcagtgaaccctgaaaacatccttctcagtgaaacaagccagagagatgtacaaggctacagactgtatgattccatttatatgaaatatacatactaggcaaatccatggagatggaacatagattagtggttgccaggggatagaggagtaattgttagtgggcatgggatttgtttttgggaggttttgaaaatgttctggagttgaacaatagtaatggttgcatgatttggtaaaaatactaaaaactatggaattgtttaattatggtatatgaattaatttctttctttttttcttttttttttttttttttgacacggagtctcactctgtcgcccaggctggagtgcagtggtgtgatctcgtctcactgcaacctccgcctcccagattcaagcgattctcctgtctcagcctcctgagtagctgggattataggtacatgccatcacacctggctaatttttgtatttttagtagagatgaggtttcaccattttggccaggctgatcttgaactcctgacctcaggtgatccacccgcctcagcctcccaaagtgctgggattacaggtgggagccacaacacccggccatgaattaactccgttaaaaaataaacgtatacattctgtgagcaaa

SEQ ID NO: 1547 - DNA, 1595 bp, Homo sapiens
  source 1..1595: mol_type = unassigned DNA
agccctgggcggccatgtggacagagctgggagggccggaaccagaacccaagcgtgatcctgaaccggagcccgagcctgctgcagagtgtcagcatgctgcgcttcctggcaccccggctgcttagcctccagggcaggaccgcccgctactcctcggcagcagccctcccaagccccattctgaacccagacatcccctacaaccagctggcgattccaacctcaagagagtcaccctggagctgggtggtaagagccccagcatcgtgctggccgatgctgacatggagcatgccgtggagcagtgccacgaagccctgttcttcaacatgggccagtgctgctgtgctggctcccggaccttcgtggaagaatccatctacaatgagtttctcgagagaaccgtggagaaagcaaagcagaggaaagtggggaacccctttgagctggacacccagcaggggcctcaggtggacaaggagcagtttgaacgagtcctaggctacatccagcttggccagaaggagggcgcaaaactcctctgtggcggagagcgtttcggggagcgtggtttcttcatcaagcctactgtctttggtggcgtgcaggatgacatgagaattgccaaagaggagatctttgggcctgtgcagcccctgttcaagttcaagaagattgaggaggtggttgagagggccaacaacaccaggtatggcctggctgcggctgtgttcacccgggatctggacaaggccatgtacttcacccaggcactccaggccgggaccgtgtgggtaaacacctacaacatcgtcacctgccacacgccatttggagggtttaaggaatctggaaacgggagggagctgggtgaggatgggcttaaggcctacacagaggtaaagacggtcaccatcaaggttcctcagaagaactcgtaagagcagctgtcagggaggcccagtcacagtccagcaattccacaaccaccttgacgaatgcttgccaagctgttttaaagccaagaacaccctttctttgttccaaattaactcttagaagaaaccccacaaataaagcaattcaatcaaggctgttctatttaaatcagagatggggaccaggctcagagttctacctatctaacccccaaccacagcccccttggtggcccatgagttgcttccatgaaatcttaggagtctctggaggacagattaaaaaccagtgatctgtaatttgtagctcttcctgctgatccaaggactttcccatgggtgcgcttgatggtttagtggatcgactcaactcagaacacaagcttggaaagtgttaggggttttgaactaggtggatactaaatctcggccccactcttcattggcttaacctaaaaaccagaggtgcttttccttgtctgtgtgccagttgctggctgttttagttgcttgcccttcattttgctactgattttccttaatttgtgggaaggagtaggcaaagaatatgcttacatgattacacctgtaaagtaagcccaaacatcccaaatgtccgtcaactgatgagtggattaataaaatgtttccatg

SEQ ID NO: 1548 - DNA, 3179 bp, Homo sapiens
  source 1..3179: mol_type = unassigned DNA
tctgcggcaccaggactgagtagaagggagagagtggagaaggggaattgcagagagaaaaccaggggctgtttttctctcggagaggcgggtaggcactgggcgggcagaagcgccgctatccacccggatgcgcagctgctaaggggccgcctctgcaagcggctgcaaattcccggagggcagcgtctcctttcgctctgctgtgtccgtagcacatggcaggtccttccaaccctcctgctaccatgaagattgcagtgattggacagagcctgtttggccaggaagtttactgccacctgaggaaggagggccacgaagtggtgggtgtgttcactgttccagacaaggatggaaaggccgaccccctgggtctggaagctgagaaggatggagtgccggtattcaagtactcccggtggcgtgcaaaaggacaggctttgcctgatgtggtggcaaaataccaggctttgggggccgagctcaacgtcctgcccttctgcagccaattcatccccatggagataatcagtgccccccggcatggctccatcatctatcacccgtcactgctccctaggcaccgaggggcctcggccatcaactggaccctcattcacggagataagaaaggggggttttccatcttctgggcggatgatggtctggacaccggagacctgctgctgcagaaggagtgtgaggtgctcccggacgacaccgtgagcacgctgtacaaccgcttcctcttccctgaaggcatcaaagggatggtgcaggccgtgaggctgatcgctgagggcaaagcccccagactccctcagcctgaggaaggagccacctatgaggggattcagaagaaggagacagccaagatcaactgggaccagccggcagaggccattcacaactggatccgcgggaacgacaaggtgccgggagcctggacagaggcctgtgaacagaaactgacatttttcaactcaacgctgaacacttcaggcctggtgcccgagggagacgctttgcccatcccaggagcccatcggccaggggtggtcaccaaagcaggactcatcctctttgggaatgatgacaaaatgctgctggtgaagaatattcagctggaggatggcaaaatgatcctggcctcgaacttctttaagggggcagccagcagtgtccttgagctgacagaggcagagctggttactgcggaggctgtgcggagtgtttggcagcggatcctccccaaagtcctggaggttgaagactccactgatttcttcaagtcaggggccgcgtctgtggacgttgtgaggctggtggaggaagtgaaggagctgtgtgatggcctggagttagaaaatgaagatgtgtacatggcatccacctttggggacttcatccagctgttagtgaggaagctgcgaggggacgatgaggagggcgagtgcagcattgactacgtggaaatggcagtgaacaagcgcactgtccgcatgccccaccagctcttcattgggggggagttcgtggatgccgagggcgccaagacctctgagaccatcaatcccaccgatggaagtgtcatctgccaggtatccctggcccaagtcaccgacgtcgacaaggcagtggccgcagccaaggatgcctttgagaatggacggtgggggaagatcagtgcgcgggaccggggccggctgatgtacaggttggcagatctcatggagcagcaccaggaggagctggccaccattgaggccctggatgcgggtgccgtctacacgctggccctgaagacccacgtgggcatgtccatccagaccttccgctactttgctggctggtgtgacaagatccagggctccaccatccccatcaaccaggccagacccaaccgcaacctgaccttgaccaggaaggagcctgttggggtttgtggcatcatcatcccctggaactatcccctgatgatgctgtcctggaagacagctgcctgcctggctgccgggaacacagtggtgatcaagcctgctcaggtgaccccactcacagccttgaagtttgcagagctgacattaaaggccggcattcccaaaggtgtggttaacgtcctcccaggatctggctccctggtcggccagagactctcagaccatcctgatgtgaggaaaatcgggttcacaggctccacagaggtgggcaagcacatcatgaaaagctgtgccataagtaacgtgaagaaggtgtccctggaactgggcgggaagtcacccctcatcatctttgctgactgtgacctcaacaaggctgtgcagatggggatgagttctgttttcttcaacaaaggagagaattgcattgcagcaggccgactctttgtggaggactccattcatgatgagttcgtgcggagagtggtagaagaggtgcggaagatgaaggtgggcaacccgctggacagggacaccgaccacgggccgcagaatcaccatgcccaccttgtgaagctgatggagtactgccagcatggcgtgaaggaaggggccacactggtctgcggcgggaatcaggtccctcggccagggttcttctttgagccaactgttttcacagacgtggaagaccacatgttcatagccaaggaggagtccttcgggcctgtcatgatcatctctcggtttgctgatggggacttggatgccgtgctgtctcgggccaatgccacggaatttggcctggcttctggtgtcttcaccagggacatcaacaaggccctgtatgtcagtgacaagctccaggcaggcactgtgtttgtcaacacgtacaacaagaccgacgtggccgctcccttcggaggattcaaacagtctggatttggcaaagatctaggagaggcggctctgaacgagtacctgcgggtcaagacagtgaccttcgaatactgaagaaaggtctttgtgagaagaaagtccctgcccctccctcgtggctggggccccctccctcttgagcctgggtgcacagcacctcccacctggggggctagtggaagccctcctgcctgcacaccatgtctgcatcttggacgccctctgtccagtcagaagcagcccttggctgggtgaggtgtgcccctcccagggagaataaagcttctgaagagagac

SEQ ID NO: 1549 - DNA, 2797 bp, Homo sapiens
  source 1..2797: mol_type = unassigned DNA
ctcctggctcccaggacgggtctgcaccaacctcagtttcggggctgcggctcacagaagtctaacctgcccgggacgcccgcaccaactcctgcgcgcggtccttccaaccctcctgctaccatgaagattgcagtgattggacagagcctgtttggccaggaagtttactgccacctgaggaaggagggccacgaagtggtgggtgtgttcactgttccagacaaggatggaaaggccgaccccctgggtctggaagctgagaaggatggagtgccggtattcaagtactcccggtggcgtgcaaaaggacaggctttgcctgatgtggtggcaaaataccaggctttgggggccgagctcaacgtcctgcccttctgcagccaattcatccccatggagataatcagtgccccccggcatggctccatcatctatcacccgtcactgctccctaggcaccgaggggcctcggccatcaactggaccctcattcacggagataagaaaggggggttttccatcttctgggcggatgatggtctggacaccggagacctgctgctgcagaaggagtgtgaggtgctcccggacgacaccgtgagcacgctgtacaaccgcttcctcttccctgaaggcatcaaagggatggtgcaggccgtgaggctgatcgctgagggcaaagcccccagactccctcagcctgaggaaggagccacctatgaggggattcagaagaaggagacagccaagatcaactgggaccagccggcagaggccattcacaactggatccgcgggaacgacaaggtgccgggagcctggacagaggcctgtgaacagaaactgacatttttcaactcaacgctgaacacttcaggcctggtgcccgagggagacgctttgcccatcccaggagcccatcggccaggggtggtcaccaaagcaggactcatcctctttgggaatgatgacaaaatgctgctggtgaagaatattcagctggaggatggcaaaatgatcctggcctcgaacttctttaagggggcagccagcagtgtccttgagctgacagaggcagagctggttactgcggaggctgtgcggagtgtttggcagcggatcctccccaaagtcctggaggttgaagactccactgatttcttcaagtcaggggccgcgtctgtggacgttgtgaggctggtggaggaagtgaaggagctgtgtgatggcctggagttagaaaatgaagatgtgtacatggcatccacctttggggacttcatccagctgttagtgaggaagctgcgaggggacgatgaggagggcgagtgcagcattgactacgtggaaatggcagtgaacaagcgcactgtccgcatgccccaccagctcttcattgggggggagttcgtggatgccgagggcgccaagacctctgagaccatcaatcccaccgatggaagtgtcatctgccaggtatccctggcccaagtcaccgacgtcgacaaggcagtggccgcagccaaggatgcctttgagaatggacggtgggggaagatcagtgcgcgggaccggggccggctgatgtacagggctccaccatccccatcaaccaggccagacccaaccgcaacctgaccttgaccaggaaggagcctgttggggtttgtggcatcatcatcccctggaactatcccctgatgatgctgtcctggaagacagctgcctgcctggctgccgggaacacagtggtgatcaagcctgctcaggtgaccccactcacagccttgaagtttgcagagctgacattaaaggccggcattcccaaaggtgtggttaacgtcctcccaggatctggctccctggtcggccagagactctcagaccatcctgatgtgaggaaaatcgggttcacaggctccacagaggtgggcaagcacatcatgaaaaggggatgagttctgttttcttcaacaaaggagagaattgcattgcagcaggccgactctttgtggaggactccattcatgatgagttcgtgcggagagtggtagaagaggtgcggaagatgaaggtgggcaacccgctggacagggacaccgaccacgggccgcagaatcaccatgcccaccttgtgaagctgatggagtactgccagcatggcgtgaaggaaggggccacactggtctgcggcgggaatcaggtccctcggccagggttcttctttgagccaactgttttcacagacgtggaagaccacatgttcatagccaaggaggagtccttcgggcctgtcatgatcatctctcggtttgctgatggggacttggatgccgtgctgtctcgggccaatgccacggaatttggcctggcttctggtgtcttcaccagggacatcaacaaggccctgtatgtcagtgacaagctccaggcaggcactgtgtttgtcaacacgtacaacaagaccgacgtggccgctcccttcggaggattcaaacagtctggatttggcaaagatctaggagaggcggctctgaacgagtacctgcgggtcaagacagtgaccttcgaatactgaagaaaggtctttgtgagaagaaagtccctgcccctccctcgtggctggggccccctccctcttgagcctgggtgcacagcacctcccacctggggggctagtggaagccctcctgcctgcacaccatgtctgcatcttggacgccctctgtccagtcagaagcagcccttggctgggtgaggtgtgcccctcccagggagaataaagcttctgaag

SEQ ID NO: 1550 - DNA, 3277 bp, Homo sapiens
  source 1..3277: mol_type = unassigned DNA
acagtaagtcttcttgacctaagcgggaaagagcgcaggcccctgcggggttggcttttacatggcatttatagacccgcccggagagggtgcgctgcgctcccgccatagtcccaccaccggtgagcgccgcccccactcggctgactctccgcccgccccgcgcccctcccctcacgggctctggccttaaccagagctcgcggactggcggggacaggtcccacctcctggctcccaggacgggtctgcaccaacctcagtttcggggctgcggctcacagaagtctaacctgcccgggacgcccgcaccaactcctgcgcgcggtccttccaaccctcctgctaccatgaagattgcagtgattggacagagcctgtttggccaggaagtttactgccacctgaggaaggagggccacgaagtggtgggtgtgttcactgttccagacaaggatggaaaggccgaccccctgggtctggaagctgagaaggatggagtgccggtattcaagtactcccggtggcgtgcaaaaggacaggctttgcctgatgtggtggcaaaataccaggctttgggggccgagctcaacgtcctgcccttctgcagccaattcatccccatggagataatcagtgccccccggcatggctccatcatctatcacccgtcactgctccctaggcaccgaggggcctcggccatcaactggaccctcattcacggagataagaaaggggggttttccatcttctgggcggatgatggtctggacaccggagacctgctgctgcagaaggagtgtgaggtgctcccggacgacaccgtgagcacgctgtacaaccgcttcctcttccctgaaggcatcaaagggatggtgcaggccgtgaggctgatcgctgagggcaaagcccccagactccctcagcctgaggaaggagccacctatgaggggattcagaagaaggagacagccaagatcaactgggaccagccggcagaggccattcacaactggatccgcgggaacgacaaggtgccgggagcctggacagaggcctgtgaacagaaactgacatttttcaactcaacgctgaacacttcaggcctggtgcccgagggagacgctttgcccatcccaggagcccatcggccaggggtggtcaccaaagcaggactcatcctctttgggaatgatgacaaaatgctgctggtgaagaatattcagctggaggatggcaaaatgatcctggcctcgaacttctttaagggggcagccagcagtgtccttgagctgacagaggcagagctggttactgcggaggctgtgcggagtgtttggcagcggatcctccccaaagtcctggaggttgaagactccactgatttcttcaagtcaggggccgcgtctgtggacgttgtgaggctggtggaggaagtgaaggagctgtgtgatggcctggagttagaaaatgaagatgtgtacatggcatccacctttggggacttcatccagctgttagtgaggaagctgcgaggggacgatgaggagggcgagtgcagcattgactacgtggaaatggcagtgaacaagcgcactgtccgcatgccccaccagctcttcattgggggggagttcgtggatgccgagggcgccaagacctctgagaccatcaatcccaccgatggaagtgtcatctgccaggtatccctggcccaagtcaccgacgtcgacaaggcagtggccgcagccaaggatgcctttgagaatggacggtgggggaagatcagtgcgcgggaccggggccggctgatgtacaggttggcagatctcatggagcagcaccaggaggagctggccaccattgaggccctggatgcgggtgccgtctacacgctggccctgaagacccacgtgggcatgtccatccagaccttccgctactttgctggctggtgtgacaagatccagggctccaccatccccatcaaccaggccagacccaaccgcaacctgaccttgaccaggaaggagcctgttggggtttgtggcatcatcatcccctggaactatcccctgatgatgctgtcctggaagacagctgcctgcctggctgccgggaacacagtggtgatcaagcctgctcaggtgaccccactcacagccttgaagtttgcagagctgacattaaaggccggcattcccaaaggtgtggttaacgtcctcccaggatctggctccctggtcggccagagactctcagaccatcctgatgtgaggaaaatcgggttcacaggctccacagaggtgggcaagcacatcatgaaaagctgtgccataagtaacgtgaagaaggtgtccctggaactgggcgggaagtcacccctcatcatctttgctgactgtgacctcaacaaggctgtgcagatggggatgagttctgttttcttcaacaaaggagagaattgcattgcagcaggccgactctttgtggaggactccattcatgatgagttcgtgcggagagtggtagaagaggtgcggaagatgaaggtgggcaacccgctggacagggacaccgaccacgggccgcagaatcaccatgcccaccttgtgaagctgatggagtactgccagcatggcgtgaaggaaggggccacactggtctgcggcgggaatcaggtccctcggccagggttcttctttgagccaactgttttcacagacgtggaagaccacatgttcatagccaaggaggagtccttcgggcctgtcatgatcatctctcggtttgctgatggggacttggatgccgtgctgtctcgggccaatgccacggaatttggcctggcttctggtgtcttcaccagggacatcaacaaggccctgtatgtcagtgacaagctccaggcaggcactgtgtttgtcaacacgtacaacaagaccgacgtggccgctcccttcggaggattcaaacagtctggatttggcaaagatctaggagaggcggctctgaacgagtacctgcgggtcaagacagtgaccttcgaatactgaagaaaggtctttgtgagaagaaagtccctgcccctccctcgtggctggggccccctccctcttgagcctgggtgcacagcacctcccacctggggggctagtggaagccctcctgcctgcacaccatgtctgcatcttggacgccctctgtccagtcagaagcagcccttggctgggtgaggtgtgcccctcccagggagaataaagcttctgaagag

SEQ ID NO: 1551 - DNA, 1010 bp, Homo sapiens
  source 1..1010: mol_type = unassigned DNA
acaggtcccacctcctggctcccaggacgggtctgcaccaacctcagtttcggggctgcggctcacagaagtctaacctgcccgggacgcccgcaccaactcctgcgcgcggtccttccaaccctcctgctaccatgaagattgcagtgattggacagagcctgtttggccaggaagtttactgccacctgaggaaggagggccacgaagtggtgggtgtgttcactgttccagacaaggatggaaaggccgaccccctgggaccctcattcacggagataagaaaggggggttttccatcttctgggcggatgatggtctggacaccggagacctgctgctgcagaaggagtgtgaggtgctcccggacgacaccgtgagcacgctgtacaaccgcttcctcttccctgaaggcatcaaagggatggtgcaggccgtgaggctgatcgctgagggcaaagcccccagactccctcagcctgaggaaggagccacctatgaggggattcagaagaaggagacagccaagatcaactgggaccagccggcagaggccattcacaactggatccgcgggaacgacaaggtgccgggagcctggacagaggcctgtgaacagaaactgacatttttcaactcaacgctgaacacttcaggcctggtgcccgagggagacgctttgcccatcccaggagcccatcggccaggggtggtcaccaaagcaggactcatcctctttgggaatgatgacaaaatggtaagggcacggctgtgggtcacttgcctgctcaaagccacccatgctcctgtccttggactcaggcctcacaggaagaccctaggctcctctggagaaaatggaaaaaaccagacccaggaaggaacactgaccctgatttgtccctgaccacccggctggtcctgagcacagggtgtccgaggcagtttacccacttctctgttctgggaaagctgggctccctacccttcctggctaggcacccatctcc

SEQ ID NO: 1552 - DNA, 1020 bp, Homo sapiens
  source 1..1020: mol_type = unassigned DNA
acagtaagtcttcttgacctaagcgggaaagagcgcaggcccctgcggggttggcttttacatggcatttatagacccgcccggagagggtgcgctgcgctcccgccatagtcccaccaccggtgagcgccgcccccactcggctgactctccgcccgccccgcgcccctcccctcacgggctctggccttaaccagagctcgcggactggcggggacaggtcccacctcctggctcccaggacgggtctgcaccaacctcagtttcggggctgcggctcacagaagtctaacctgcccgggacgcccgcaccaactcctgcgcgcggtgagtttctgggctctcgagagcgctggactcccggcggaaaggaggctgccccggctgcagctccgggggctccgggggctccaggggctccaggactcggttctcaccgcaagggctcctgcggggcccatcaacttcgccgctgggacgccgggctcggggtccttccaaccctcctgctaccatgaagattgcagtgattggacagagcctgtttggccaggaagtttactgccacctgaggaaggagggccacgaagtggtgggtgtgttcactgttccagacaaggatggaaaggccgaccccctgggtctggaagctgagaaggatggagtgccggtattcaagtactcccggtggcgtgcaaaaggacaggctttgcctgatgtggtggcaaaataccaggctttgggggccgagctcaacgtcctgcccttctgcagccaattcatccccatggagataatcagtgccccccggcatggctccatcatctatcacccgtcactgctccctaggcaccgaggggcctcggccatcaactggaccctcattcacggagataagaaaggggggttttccatcttctgggcggatgatggtctggacaccggagacctgctgctgcagaaggagtgtgaggtgctcccggacgacaccgtgagcacgctgtacaaccgcttcctctt

SEQ ID NO: 1553 - DNA, 3157 bp, Homo sapiens
  source 1..3157: mol_type = unassigned DNA
actgcgctcaagtggacggtcgcgcgtgcagagggaggccggatagcagaccccacaacgtggctcctggggccccgctatcgagagctcaggccccgcgggcacttgcctaggagaggaaagaatcttcccaaagtgcagacagagacggaatttaatcaggagtcccagacttggagtttggaggcatgggctctggtgtcaggtccttccaaccctcctgctaccatgaagattgcagtgattggacagagcctgtttggccaggaagtttactgccacctgaggaaggagggccacgaagtggtgggtgtgttcactgttccagacaaggatggaaaggccgaccccctgggtctggaagctgagaaggatggagtgccggtattcaagtactcccggtggcgtgcaaaaggacaggctttgcctgatgtggtggcaaaataccaggctttgggggccgagctcaacgtcctgcccttctgcagccaattcatccccatggagataatcagtgccccccggcatggctccatcatctatcacccgtcactgctccctaggcaccgaggggcctcggccatcaactggaccctcattcacggagataagaaaggggggttttccatcttctgggcggatgatggtctggacaccggagacctgctgctgcagaaggagtgtgaggtgctcccggacgacaccgtgagcacgctgtacaaccgcttcctcttccctgaaggcatcaaagggatggtgcaggccgtgaggctgatcgctgagggcaaagcccccagactccctcagcctgaggaaggagccacctatgaggggattcagaagaaggagacagccaagatcaactgggaccagccggcagaggccattcacaactggatccgcgggaacgacaaggtgccgggagcctggacagaggcctgtgaacagaaactgacatttttcaactcaacgctgaacacttcaggcctggtgcccgagggagacgctttgcccatcccaggagcccatcggccaggggtggtcaccaaagcaggactcatcctctttgggaatgatgacaaaatgctgctggtgaagaatattcagctggaggatggcaaaatgatcctggcctcgaacttctttaagggggcagccagcagtgtccttgagctgacagaggcagagctggttactgcggaggctgtgcggagtgtttggcagcggatcctccccaaagtcctggaggttgaagactccactgatttcttcaagtcaggggccgcgtctgtggacgttgtgaggctggtggaggaagtgaaggagctgtgtgatggcctggagttagaaaatgaagatgtgtacatggcatccacctttggggacttcatccagctgttagtgaggaagctgcgaggggacgatgaggagggcgagtgcagcattgactacgtggaaatggcagtgaacaagcgcactgtccgcatgccccaccagctcttcattgggggggagttcgtggatgccgagggcgccaagacctctgagaccatcaatcccaccgatggaagtgtcatctgccaggtatccctggcccaagtcaccgacgtcgacaaggcagtggccgcagccaaggatgcctttgagaatggacggtgggggaagatcagtgcgcgggaccggggccggctgatgtacaggttggcagatctcatggagcagcaccaggaggagctggccaccattgaggccctggatgcgggtgccgtctacacgctggccctgaagacccacgtgggcatgtccatccagaccttccgctactttgctggctggtgtgacaagatccagggctccaccatccccatcaaccaggccagacccaaccgcaacctgaccttgaccaggaaggagcctgttggggtttgtggcatcatcatcccctggaactatcccctgatgatgctgtcctggaagacagctgcctgcctggctgccgggaacacagtggtgatcaagcctgctcaggtgaccccactcacagccttgaagtttgcagagctgacattaaaggccggcattcccaaaggtgtggttaacgtcctcccaggatctggctccctggtcggccagagactctcagaccatcctgatgtgaggaaaatcgggttcacaggctccacagaggtgggcaagcacatcatgaaaagctgtgccataagtaacgtgaagaaggtgtccctggaactgggcgggaagtcacccctcatcatctttgctgactgtgacctcaacaaggctgtgcagatggggatgagttctgttttcttcaacaaaggagagaattgcattgcagcaggccgactctttgtggaggactccattcatgatgagttcgtgcggagagtggtagaagaggtgcggaagatgaaggtgggcaacccgctggacagggacaccgaccacgggccgcagaatcaccatgcccaccttgtgaagctgatggagtactgccagcatggcgtgaaggaaggggccacactggtctgcggcgggaatcaggtccctcggccagggttcttctttgagccaactgttttcacagacgtggaagaccacatgttcatagccaaggaggagtccttcgggcctgtcatgatcatctctcggtttgctgatggggacttggatgccgtgctgtctcgggccaatgccacggaatttggcctggcttctggtgtcttcaccagggacatcaacaaggccctgtatgtcagtgacaagctccaggcaggcactgtgtttgtcaacacgtacaacaagaccgacgtggccgctcccttcggaggattcaaacagtctggatttggcaaagatctaggagaggcggctctgaacgagtacctgcgggtcaagacagtgaccttcgaatactgaagaaaggtctttgtgagaagaaagtccctgcccctccctcgtggctggggccccctccctcttgagcctgggtgcacagcacctcccacctggggggctagtggaagccctcctgcctgcacaccatgtctgcatcttggacgccctctgtccagtcagaagcagcccttggctgggtgaggtgtgcccctcccagggagaataaagcttctgaagagag

SEQ ID NO: 1554 - DNA, 689 bp, Homo sapiens
  source 1..689: mol_type = unassigned DNA
ctttcgctctgctgtgtccgtagcacatggcaggtacttggcccatcaagagtgagagagggtgagcgagtgagtgagtcaccggcttggcgagggtctcctctgacccacttagccttgccagcgctcagaactgccagccctgctgggtgcttgggacttttcaaagccctgggaattctccaagggtccacagtccttccaaccctcctgctaccatgaagattgcagtgattggacagagcctgtttggccaggaagtttactgccacctgaggaaggagggccacgaagtggtgggtgtgttcactgttccagacaaggatggaaaggccgaccccctgggtctggaagctgagaaggatggagtgccggtattcaagtactcccggtggcgtgcaaaaggacaggctttgcctgatgtggtggcaaaataccaggctttgggggccgagctcaacgtcctgcccttctgcagccaattcatccccatggagataatcagtgccccccggcatggctccatcatctatcacccgtcactgctccctaggcaccgaggggcctcggccatcaactggaccctcattcacggagataagaaaggggggttttccatcttctgggcggatgatggtctggacaccggagacctgctgctgcagaaggagtgtgaggtgctcccggac

SEQ ID NO: 1555 - DNA, 615 bp, Homo sapiens
  source 1..615: mol_type = unassigned DNA
atatctgatatgtgataccatatgggagcaggctctgaaagaacactacaagtagagaggtccttccaaccctcctgctaccatgaagattgcagtgattggacagagcctgtttggccaggaagtttactgccacctgaggaaggagggccacgaagtggtgggtgtgttcactgttccagacaaggatggaaaggccgaccccctgggtctggaagctgagaaggatggagtgccggtattcaagtactcccggtggcgtgcaaaaggacaggctttgcctgatgtggtggcaaaataccaggctttgggggccgagctcaacgtcctgcccttctgcagccaattcatccccatggagataatcagtgccccccggcatggctccatcatctatcacccgtcactgctccctaggcaccgaggggcctcggccatcaactggaccctcattcacggagataagaaaggggggttttccatcttctgggcggatgatggtctggacaccggagacctgctgctgcagaaggagtgtgaggtgctcccggacgacaccgtgagcacgctgtacaaccgcttcctcttccctgaaggcatcaaagggatggtgca

SEQ ID NO: 1556 - DNA, 583 bp, Homo sapiens
  source 1..583: mol_type = unassigned DNA
gttctgtacctcacttctgatttctgcaagtcacttcctttttttttttgtctataaatttgttctgtccacgaggcaaccctggagtctctctgaatctgctgtgattctgagggctgcccaatttgtgaatcgttcattgctcaattaaacttttttaaatttaatttggctgaagtttttcttttaacatggtgtcagaagcgggatccaaagtacagcttctagcgacccccaggagtactgagtgaacaagcaaggtccttccaaccctcctgctaccatgaagattgcagtgattggacagagcctgtttggccaggaagtttactgccacctgaggaaggagggccacgaagtggtgggtgtgttcactgttccagacaaggatggaaaggccgaccccctgggtctggaagctgagaaggatggagtgccggtattcaagtactcccggtggcgtgcaaaaggacaggctttgcctgatgtggtggcaaaataccaggctttgggggccgagctcaacgtcctgcccttctgcagccaattcatccccatggagataatcagtgccccccggcat

SEQ ID NO: 1557 - DNA, 3105 bp, Homo sapiens
  source 1..3105: mol_type = unassigned DNA
attcccattagccccgcccctttgggctggaaccggaggtgtcgctcttcggacctcaaggttccccttaacacagagcgccccgcagtcttcgcggaaagcgttcggggtaggcgatggctgcgacgcgtgcagggccccgcgcccgcgagatcttcacctcgctggagtacggaccggtgccggagagccacgcatgcgcactggcctggctggacacccaggaccggtgcttgggccactatgtgaatgggaagtggttaaagcctgaacacagaaattcagtgccttgccaggatcccatcacaggagagaacttggccagttgcctgcaggcacaggccgaggatgtggctgcagccgtggaggcagccaggatggcatttaagggctggagtgcgcaccccggcgtcgtccgggcccagcacctgaccaggctggccgaggtgatccagaagcaccagcggctgctgtggaccctggaatccctggtgactgggcgggctgttcgagaggttcgagacggggacgtccagctggcccagcagctgctccactaccatgcaatccaggcatccacccaggaggaggcactggcaggctgggagcccatgggagtaattggcctcatcctgccacccacattctccttccttgagatgatgtggaggatttgccctgccctggctgtgggctgcaccgtggtggccctcgtgcccccggcctccccggcgcccctcctcctggcccagctggcgggggagctgggccccttcccgggaatcctgaatgtcctcagtggccctgcgtccctggtgcccatcctggcctcccagcctggaatccggaaggtggccttctgcggagccccggaggaagggcgtgcccttcgacggagcctggcgggagagtgtgcggagctgggcctggcgctggggacggagtcgctgctgctgctgacggacacggcggacgtagactcggccgtggagggtgtcgtggacgccgcctggtccgaccgcggcccgggtggcctcaggctcctcatccaggagtctgtgtgggatgaagccatgagacggctgcaggagcggatggggcggcttcggagtggccgagggctggatggggccgtggacatgggggcccggggggctgccgcatgtgacctggtccagcgctttgtgcgtgaggcccagagccagggtgcacaggtgttccaggctggtgatgtgccttcggaacgcccattctatcccccaaccttggtctccaacctgcccccagcctccccatgtgcccaggtggaggtgccgtggcctgtggtcgtggcctcccccttccgcacagccaaggaggcactgttggtggccaacgggacgccccgcgggggcagcgccagtgtgtggagcgagaggctggggcaggcgctggagctgggctatgggctccaggtgggcactgtctggatcaacgcccacggcctcagagacccttcggtgcccacaggcggctgcaaggagagtgggtgttcctggcacgggggcccagacgggctgtatgagtatctgcggccctcagggacccctgcccggctgtcctgcctctccaagaacctgaactatgacacctttggcctcgctgttccctcaaccctgccggctgggcctgaaatagggcccagcccagcacccccctatgggctcttcgttgggggccgtttccaggctcctggggcccgaagctccaggcccatccgggattcgtctggcaacctccatggctacgtggctgagggtggagccaaggacatccgaggtgctgtggaggccgctcaccaggctttccctggctgggcgggccagtccccaggagcccgggcagccctgctgtgggccctggcggctgcactggagcgccggaagtctaccctggcctcgaggctggagaggcagggagcggagctcaaggctgcggaggcggaggtggagctgagcgcaagacgacttcgggcgtggggggcccgggtgcaggcccaaggccacaccctgcaggtagccgggctgagaggccctgtgctgcgcctgcgggagccgctgggtgtgctggctgtggtgtgtccggacgagtggcccctgcttgccttcgtgtccctgctggctcccgccctggcctacggcaacactgtggtcatggtgcccagtgcggcctgtcctctgctggccctggaggtctgccaggacatggccaccgtgttcccagcaggcctggccaacgtggtgacaggagaccgggaccatctgacccgctgcctggccttgcaccaagacgtccaggccatgtggtatttcggatcagcccagggttcccagtttgtcgagtgggcctcggcaggaaacctcaaaccggtgtgggcgagcaggggctgcccgcgggcctgggaccaggaggccgagggggcaggcccagagctggggctgcgagtggcgcggaccaaggccctgtggctgcctatgggggactgatgcctgagcgccacctactgcattttggacacctcacaccaaggggagatgcaccccacagacacctgggactttccccttctggttcctgtgtctcccaataaactctctgaccaaccctagctgtgcttctgcgagaagaaagggtgtagcaacttctggcagatatgaggcttttttcttttttttttttttttttgagacaacgtctggctctgtcacccaggctggagcgcagtggcacaatctcggcccactgcagcctcgacctctggggctcaagggatcctcatgcctcagcctcatatgtagctggggccacagacatgcaccaccacacctggctcgaggccattttagttctgaggttgagcagctcaggagccggctccagcacggtgctgtgtttgtgaaacagagaaaggggacccccgaggaccccagacagggccttaggactctcatatcttcttgtcttctccatctggtggctcttgctctctggttttctctaccttttcatggccccagaatccatatgcagtaaaggaactctctggaataaaattaaagtcctcct

SEQ ID NO: 1558 - DNA, 2343 bp, Homo sapiens
  source 1..2343: mol_type = unassigned DNA
acagagcgccccgcagtcttcgcggaaagcgttcggggtaggcgatggctgcgacgcgtgcagggccccgcgcccgcgagatcttcacctcgctggagtacggaccggtgccggagagccacgcatgcgcactggctggccgaggtgatccagaagcaccagcggctgctgtggaccctggaatccctggtgactgggcgggctgttcgagaggttcgagacggggacgtccagctggcccagcagctgctccactaccatgcaatccaggcatccacccaggaggaggcactggcaggctgggagcccatgggagtaattggcctcatcctgccacccacattctccttccttgagatgatgtggaggatttgccctgccctggctgtgggctgcaccgtggtggccctcgtgcccccggcctccccggcgcccctcctcctggcccagctggcgggggagctgggccccttcccgggaatcctgaatgtcctcagtggccctgcgtccctggtgcccatcctggcctcccagcctggaatccggaaggtggccttctgcggagccccggaggaagggcgtgcccttcgacggagcctggcgggagagtgtgcggagctgggcctggcgctggggacggagtcgctgctgctgctgacggacacggcggacgtagactcggccgtggagggtgtcgtggacgccgcctggtccgaccgcggcccgggtggcctcaggctcctcatccaggagtctgtgtgggatgaagccatgagacggctgcaggagcggatggggcggcttcggagtggccgagggctggatggggccgtggacatgggggcccggggggctgccgcatgtgacctggtccagcgctttgtgcgtgaggcccagagccagggtgcacaggtgttccaggctggtgatgtgccttcggaacgcccattctatcccccaaccttggtctccaacctgcccccagcctccccatgtgcccaggtggaggtgccgtggcctgtggtcgtggcctcccccttccgcacagccaaggaggcactgttggtggccaacgggacgccccgcgggggcagcgccagtgtgtggagcgagaggctggggcaggcgctggagctgggctatgggctccaggtgggcactgtctggatcaacgcccacggcctcagagacccttcggtgcccacaggcggctgcaaggagagtgggtgttcctggcacgggggcccagacgggctgtatgagtatctgcggccctcagggacccctgcccggctgtcctgcctctccaagaacctgaactatgacacctttggcctcgctgttccctcaaccctgccggctgggcctgaaatagggcccagcccagcacccccctatgggctcttcgttgggggccgtttccaggctcctggggcccgaagctccaggcccatccgggattcgtctggcaacctccatggctacgtggctgagggtggagccaaggacatccgaggtgctgtggaggccgctcaccaggctttccctggctgggcgggccagtccccaggagcccgggcagccctgctgtgggccctggcggctgcactggagcgccggaagtctaccctggcctcgaggctggagaggcagggagcggagctcaaggctgcggaggcggaggtggagctgagcgcaagacgacttcgggcgtggggggcccgggtgcaggcccaaggccacaccctgcaggtagccgggctgagaggccctgtgctgcgcctgcgggagccgctgggtgtgctggctgtggtgtgtccggacgagtggcccctgcttgccttcgtgtccctgctggctcccgccctggcctacggcaacactgtggtcatggtgcccagtgcggcctgtcctctgctggccctggaggtctgccaggacatggccaccgtgttcccagcaggcctggccaacgtggtgacaggagaccgggaccatctgacccgctgcctggccttgcaccaagacgtccaggccatgtggtatttcggatcagcccagggttcccagtttgtcgagtgggcctcggcaggaaacctcaaaccggtgtgggcgagcaggggctgcccgcgggcctgggaccaggaggccgagggggcaggcccagagctggggctgcgagtggcgcggaccaaggccctgtggctgcctatgggggactgatgcctgagcgccacctactgcattttggacacctcacaccaaggggagatgcaccccacagacacctgggactttccccttctggttcctgtgtctcccaataaactctctgaccaaccc

SEQ ID NO: 1559 - DNA, 2952 bp, Homo sapiens
  source 1..2952: mol_type = unassigned DNA
attcccattagccccgcccctttgggctggaaccggaggtgtcgctcttcggacctcaaggttccccttaacacagagcgccccgcagtcttcgcggaaagcgttcggggtaggcgatggctgcgacgcgtgcagggccccgcgcccgcgagatcttcacctcgctggagtacggaccggtgccggagagccacgcatgcgcactggcctggctggacacccaggaccggtgcttgggccactatgtgaatgggaagtggttaaagcctgaacacagaaattcagtgccttgccaggatcccatcacaggagagaacttggccagttgcctgcaggcacaggccgaggatgtggctgcagccgtggaggcagccaggatggcatttaagggctggagtgcgcaccccggcgtcgtccgggcccagcacctgaccaggctggccgaggtgatccagaagcaccagcggctgctgtggaccctggaatccctggtgactgggcgggctgttcgagaggttcgagacggggacgtccagctggcccagcagctgctccactaccatgcaatccaggcatccacccaggaggaggcactggcaggctgggagcccatgggagtaattggcctcatcctgccacccacattctccttccttgagatgatgtggaggatttgccctgccctggctgtgggctgcaccgtggtggccctcgtgcccccggcctccccggcgcccctcctcctggcccagctggcgggggagctgggccccttcccgggaatcctgaatgtcctcagtggccctgcgtccctggtgcccatcctggcctcccagcctggaatccggaaggtggccttctgcggagccccggagggtggcctcaggctcctcatccaggagtctgtgtgggatgaagccatgagacggctgcaggagcggatggggcggcttcggagtggccgagggctggatggggccgtggacatgggggcccggggggctgccgcatgtgacctggtccagcgctttgtgcgtgaggcccagagccagggtgcacaggtgttccaggctggtgatgtgccttcggaacgcccattctatcccccaaccttggtctccaacctgcccccagcctccccatgtgcccaggtggaggtgccgtggcctgtggtcgtggcctcccccttccgcacagccaaggaggcactgttggtggccaacgggacgccccgcgggggcagcgccagtgtgtggagcgagaggctggggcaggcgctggagctgggctatgggctccaggtgggcactgtctggatcaacgcccacggcctcagagacccttcggtgcccacaggcggctgcaaggagagtgggtgttcctggcacgggggcccagacgggctgtatgagtatctgcggccctcagggacccctgcccggctgtcctgcctctccaagaacctgaactatgacacctttggcctcgctgttccctcaaccctgccggctgggcctgaaatagggcccagcccagcacccccctatgggctcttcgttgggggccgtttccaggctcctggggcccgaagctccaggcccatccgggattcgtctggcaacctccatggctacgtggctgagggtggagccaaggacatccgaggtgctgtggaggccgctcaccaggctttccctggctgggcgggccagtccccaggagcccgggcagccctgctgtgggccctggcggctgcactggagcgccggaagtctaccctggcctcgaggctggagaggcagggagcggagctcaaggctgcggaggcggaggtggagctgagcgcaagacgacttcgggcgtggggggcccgggtgcaggcccaaggccacaccctgcaggtagccgggctgagaggccctgtgctgcgcctgcgggagccgctgggtgtgctggctgtggtgtgtccggacgagtggcccctgcttgccttcgtgtccctgctggctcccgccctggcctacggcaacactgtggtcatggtgcccagtgcggcctgtcctctgctggccctggaggtctgccaggacatggccaccgtgttcccagcaggcctggccaacgtggtgacaggagaccgggaccatctgacccgctgcctggccttgcaccaagacgtccaggccatgtggtatttcggatcagcccagggttcccagtttgtcgagtgggcctcggcaggaaacctcaaaccggtgtgggcgagcaggggctgcccgcgggcctgggaccaggaggccgagggggcaggcccagagctggggctgcgagtggcgcggaccaaggccctgtggctgcctatgggggactgatgcctgagcgccacctactgcattttggacacctcacaccaaggggagatgcaccccacagacacctgggactttccccttctggttcctgtgtctcccaataaactctctgaccaaccctagctgtgcttctgcgagaagaaagggtgtagcaacttctggcagatatgaggcttttttcttttttttttttttttttgagacaacgtctggctctgtcacccaggctggagcgcagtggcacaatctcggcccactgcagcctcgacctctggggctcaagggatcctcatgcctcagcctcatatgtagctggggccacagacatgcaccaccacacctggctcgaggccattttagttctgaggttgagcagctcaggagccggctccagcacggtgctgtgtttgtgaaacagagaaaggggacccccgaggaccccagacagggccttaggactctcatatcttcttgtcttctccatctggtggctcttgctctctggttttctctaccttttcatggccccagaatccatatgcagtaaaggaactctctggaataaaattaaagtcctcct

SEQ ID NO: 1560 - DNA, 2174 bp, Homo sapiens
  source 1..2174: mol_type = unassigned DNA
agccccgcccctttgggctggaaccggaggtgtcgctcttcggacctcaaggttccccttaacacagagcgccccgcagtcttcgcggaaagcgttcggggtaggcgatggctgcgacgcgtgcagggccccgcgcccgcgagatcttcacctcgctggagtacggaccggtgccggagagccacgcatgcgcactggagtaattggcctcatcctgccacccacattctccttccttgagatgatgtggaggatttgccctgccctggctgtgggctgcaccgtggtggccctcgtgcccccggcctccccggcgcccctcctcctggcccagctggcgggggagctgggccccttcccgggaatcctgaatgtcctcagtggccctgcgtccctggtgcccatcctggcctcccagcctggaatccggaaggtggccttctgcggagccccggaggaagggcgtgcccttcgacggagcctggcgggagagtgtgcggagctgggcctggcgctggggacggagtcgctgctgctgctgacggacacggcggacgtagactcggccgtggagggtgtcgtggacgccgcctggtccgaccgcggcccgggtggcctcaggctcctcatccaggagtctgtgtgggatgaagccatgagacggctgcaggagcggatggggcggcttcggagtggccgagggctggatggggccgtggacatgggggcccggggggctgccgcatgtgacctggtccagcgctttgtgcgtgaggcccagagccagggtgcacaggtgttccaggctggtgatgtgccttcggaacgcccattctatcccccaaccttggtctccaacctgcccccagcctccccatgtgcccaggtggaggtgccgtggcctgtggtcgtggcctcccccttccgcacagccaaggaggcactgttggtggccaacgggacgccccgcgggggcagcgccagtgtgtggagcgagaggctggggcaggcgctggagctgggctatgggctccaggtgggcactgtctggatcaacgcccacggcctcagagacccttcggtgcccacaggcggctgcaaggagagtgggtgttcctggcacgggggcccagacgggctgtatgagtatctgcggccctcagggacccctgcccggctgtcctgcctctccaagaacctgaactatgacacctttggcctcgctgttccctcaaccctgccggctgggcctgaaatagggcccagcccagcacccccctatgggctcttcgttgggggccgtttccaggctcctggggcccgaagctccaggcccatccgggattcgtctggcaacctccatggctacgtggctgagggtggagccaaggacatccgaggtgctgtggaggccgctcaccaggctttccctggctgggcgggccagtccccaggagcccgggcagccctgctgtgggccctggcggctgcactggagcgccggaagtctaccctggcctcgaggctggagaggcagggagcggagctcaaggctgcggaggcggaggtggagctgagcgcaagacgacttcgggcgtggggggcccgggtgcaggcccaaggccacaccctgcaggtagccgggctgagaggccctgtgctgcgcctgcgggagccgctgggtgtgctggctgtggtgtgtccggacgagtggcccctgcttgccttcgtgtccctgctggctcccgccctggcctacggcaacactgtggtcatggtgcccagtgcggcctgtcctctgctggccctggaggtctgccaggacatggccaccgtgttcccagcaggcctggccaacgtggtgacaggagaccgggaccatctgacccgctgcctggccttgcaccaagacgtccaggccatgtggtatttcggatcagcccagggttcccagtttgtcgagtgggcctcggcaggaaacctcaaaccggtgtgggcgagcaggggctgcccgcgggcctgggaccaggaggccgagggggcaggcccagagctggggctgcgagtggcgcggaccaaggccctgtggctgcctatgggggactgatgcctgagcgccacctactgcattttggacacctcacaccaaggggagatgcaccccacagacacct

SEQ ID NO: 1561 - DNA, 3337 bp, Homo sapiens
  source 1..3337: mol_type = unassigned DNA
gcgggacgtggacggaagaaaaaagagagtgagcgagcgccggaatcagcccggcgtggagtgcggacccgcggtagtgccagggggcgaaggcggcggtggtgaggaagatactttggttagtgaccacatcgcagcatgttgagtcaagtttaccgctgtgggttccagcccttcaaccaacatcttctgccctgggtcaagtgtacaaccgtcttcagatctcattgtatccagccttcagtcatcagacatgttcgttcttggagcaacatcccgtttatcactgtacccctcagtcgtacacatggcaagtccttcgcccaccgcagtgagctgaagcatgccaagagaatcgtggtgaagctcggcagtgccgtggtgacccgaggggatgaatgtggcctggccctggggcgcttggcatctattgttgagcaggtatcagtgctgcagaatcagggcagagagatgatgctggtgaccagtggagccgtagcctttggcaaacaacgcttgcgccatgagatccttctgtctcagagcgtgcggcaggccctccactcggggcagaaccagctgaaagaaatggcaattccagtcttagaggcacgagcctgtgcagctgccggacagagtgggctgatggccttgtatgaggctatgtttacccagtacagcatctgtgctgcccagattttggtgaccaatttggatttccatgatgagcagaagcgccggaacctcaatggaacacttcatgaactccttagaatgaacattgtccccattgtcaacacaaatgatgctgttgtccccccagctgagcccaacagtgacctgcagggggttattagtgttaaagataatgatagcctggctgcccgactggctgtggaaatgaaaactgatctcttgattgttctttcagatgtagaaggcctttttgacagccccccaggttcagatgatgcaaagcttattgatatattttatcccggagatcagcagtctgtgacatttggaaccaagtctagagtgggaatgggtggcatggaagccaaggtgaaagcagccctctgggctttgcaaggtggcacttctgttgttattgccaatggaacccacccaaaggtgtctgggcacgtcatcacagacattgtggaggggaagaaagttggtaccttcttttcagaagtaaagcctgcaggccctactgttgagcagcagggagaaatggcgcgatctggaggaaggatgttggccaccttggaacctgagcagagagcagaaattatccatcatctggctgatctgttgacggaccagcgtgatgagatcctgttagccaacaaaaaagacttggaggaggcagaggggagacttgcagctcctctgctgaaacgtttaagcctctccacatccaaattgaacagcctggccatcggtctgcgacagatcgcagcctcctcccaggacagcgtgggacgtgttttgcgccgcacccgaatcgccaaaaacttggaactggaacaagtgactgtcccaattggagttctgctggtgatctttgaatctcgtcctgactgtctaccccaggtggcagctttggctatcgcaagtggcaatggcttgttactcaaaggagggaaggaggctgcacacagcaaccggattctccacctcctgacccaggaggctctctcaatccatggagtcaaggaggccgtgcaactggtgaataccagagaagaagttgaagatctttgccgcctagacaaaatgatagatctgatcattccacgtggctcttcccagctggtcagagacatccagaaagctgctaaggggattccagtgatggggcacagcgaagggatctgtcacatgtatgtggattccgaggccagtgttgataaggtcaccaggctagtcagagactctaaatgtgaatatccagctgcctgtaatgctttggagactttgttaatccaccgggatctgctcaggacaccattatttgaccagatcattgatatgctgagagtggaacaggtaaaaattcatgcaggccccaaatttgcctcctatctgaccttcagcccctccgaagtgaagtcactccgaactgagtatggggacctggaattatgcattgaagtagtggacaacgttcaggatgccattgaccacatccacaagtatggcagctcccacacggatgtcatcgtcacagaggacgaaaacacagcggagttcttcctgcagcacgtagacagtgcctgtgtgttctggaatgccagcactcgcttttctgatggttaccgctttggactgggagctgaagtgggaatcagtacatcgagaatccacgcccggggaccagtaggacttgagggactgcttactactaagtggctgctgcgagggaaggaccacgtggtctcagatttctcagagcatggaagtttaaaatatcttcatgagaacctccctattcctcagagaaacaccaactgaaaagagccaggaaaacccgggaattttccaaaaggtcttcacgttaaacttgtcttatctcaggagagagcccgctcttgtctcccagttcctggtagggtctgcctgttggaaagtgtacctggatgcttctgggctccgtttggcaatagcagtcttggctgatgtgcacagtctggctcccagctcaccctttttttttaaagtaagaaaatagttgctaccgatagggactttgccaagtccaattatcttctaggattgaaaggtgcattttccccataaaaaaggcgaggaaaacccatggctgctttgtgtcacctcagtgacttacagtcccccttggcatttagttggtactagagccagtcatccttaacaaatcttttcacattttatttctttcacatgtagtcatcttcaaaaaggaaagatttggaattttagaaaaggggcaactcttctttttagcattctcatcagaaagtcacaaaaatcgatggaatcatttccactgggaagattgaccttttgtatttatttgtggggtaaattaataagcattccagatgcttgcagcttcctgcatccaggagatgctgtgttccccgtgatgcagctggaacccaagctgcagcaggagatgcaagtttcaggatgttccccactgagctggaggaatatctacagcagtgatgcttgaaatttttgtatgaattattttgtcgtcctacccttttcctccaaaacaaaaattagaggattattttaatactttggattcttcccccttttttgagaaataaagttttttatg

SEQ ID NO: 1562 - DNA, 3349 bp, Homo sapiens
  source 1..3349: mol_type = unassigned DNA
gcgggacgtggacggaagaaaaaagagagtgagcgagcgccggaatcagcccggcgtggagtgcggacccgcggtagtgccagggggcgaaggcggcggtggtgaggaagatactttggttagtgaccacatcgcagcatgttgagtcaagtttaccgctgtgggttccagcccttcaaccaacatcttctgccctgggtcaagtgtacaaccgtcttcagatctcattgtatccagccttcagtcatcagacatgttcgttcttggagcaacatcccgtttatcactgtacccctcagtcgtacacatggcaagtccttcgcccaccgcagtgagctgaagcatgccaagagaatcgtggtgaagctcggcagtgccgtggtgacccgaggggatgaatgtggcctggccctggggcgcttggcatctattgttgagcaggtatcagtgctgcagaatcagggcagagagatgatgctggtgaccagtggagccgtagcctttggcaaacaacgcttgcgccatgagatccttctgtctcagagcgtgcggcaggccctccactcggggcagaaccagctgaaagaaatggcaattccagtcttagaggcacgagcctgtgcagctgccggacagagtgggctgatggccttgtatgaggctatgtttacccagtacagcatctgtgctgcccagattttggtgaccaatttggatttccatgatgagcagaagcgccggaacctcaatggaacacttcatgaactccttagaatgaacattgtccccattgtcaacacaaatgatgctgttgtccccccagctgagcccaacagtgacctgcagggggtaaatgttattagtgttaaagataatgatagcctggctgcccgactggctgtggaaatgaaaactgatctcttgattgttctttcagatgtagaaggcctttttgacagccccccaggttcagatgatgcaaagcttattgatatattttatcccggagatcagcagtctgtgacatttggaaccaagtctagagtgggaatgggtggcatggaagccaaggtgaaagcagccctctgggctttgcaaggtggcacttctgttgttattgccaatggaacccacccaaaggtgtctgggcacgtcatcacagacattgtggaggggaagaaagttggtaccttcttttcagaagtaaagcctgcaggccctactgttgagcagcagggagaaatggcgcgatctggaggaaggatgttggccaccttggaacctgagcagagagcagaaattatccatcatctggctgatctgttgacggaccagcgtgatgagatcctgttagccaacaaaaaagacttggaggaggcagaggggagacttgcagctcctctgctgaaacgtttaagcctctccacatccaaattgaacagcctggccatcggtctgcgacagatcgcagcctcctcccaggacagcgtgggacgtgttttgcgccgcacccgaatcgccaaaaacttggaactggaacaagtgactgtcccaattggagttctgctggtgatctttgaatctcgtcctgactgtctaccccaggtggcagctttggctatcgcaagtggcaatggcttgttactcaaaggagggaaggaggctgcacacagcaaccggattctccacctcctgacccaggaggctctctcaatccatggagtcaaggaggccgtgcaactggtgaataccagagaagaagttgaagatctttgccgcctagacaaaatgatagatctgatcattccacgtggctcttcccagctggtcagagacatccagaaagctgctaaggggattccagtgatggggcacagcgaagggatctgtcacatgtatgtggattccgaggccagtgttgataaggtcaccaggctagtcagagactctaaatgtgaatatccagctgcctgtaatgctttggagactttgttaatccaccgggatctgctcaggacaccattatttgaccagatcattgatatgctgagagtggaacaggtaaaaattcatgcaggccccaaatttgcctcctatctgaccttcagcccctccgaagtgaagtcactccgaactgagtatggggacctggaattatgcattgaagtagtggacaacgttcaggatgccattgaccacatccacaagtatggcagctcccacacggatgtcatcgtcacagaggacgaaaacacagcggagttcttcctgcagcacgtagacagtgcctgtgtgttctggaatgccagcactcgcttttctgatggttaccgctttggactgggagctgaagtgggaatcagtacatcgagaatccacgcccggggaccagtaggacttgagggactgcttactactaagtggctgctgcgagggaaggaccacgtggtctcagatttctcagagcatggaagtttaaaatatcttcatgagaacctccctattcctcagagaaacaccaactgaaaagagccaggaaaacccgggaattttccaaaaggtcttcacgttaaacttgtcttatctcaggagagagcccgctcttgtctcccagttcctggtagggtctgcctgttggaaagtgtacctggatgcttctgggctccgtttggcaatagcagtcttggctgatgtgcacagtctggctcccagctcaccctttttttttaaagtaagaaaatagttgctaccgatagggactttgccaagtccaattatcttctaggattgaaaggtgcattttccccataaaaaaggcgaggaaaacccatggctgctttgtgtcacctcagtgacttacagtcccccttggcatttagttggtactagagccagtcatccttaacaaatcttttcacattttatttctttcacatgtagtcatcttcaaaaaggaaagatttggaattttagaaaaggggcaactcttctttttagcattctcatcagaaagtcacaaaaatcgatggaatcatttccactgggaagattgaccttttgtatttatttgtggggtaaattaataagcattccagatgcttgcagcttcctgcatccaggagatgctgtgttccccgtgatgcagctggaacccaagctgcagcaggagatgcaagtttcaggatgttccccactgagctggaggaatatctacagcagtgatgcttgaaatttttgtatgaattattttgtcgtcctacccttttcctccaaaacaaaaattagaggattattttaatactttggattcttcccccttttttgagaaataaagttttttatgaaaagc

SEQ ID NO: 1563 - DNA, 2018 bp, Homo sapiens
  source 1..2018: mol_type = unassigned DNA
tcagtggccctgagaccctagctctgctctcggtccgctcgctgtccgctagcccgctgcgatgttgcgcgctgccgcccgcttcgggccccgcctgggccgccgcctcttgtcagccgccgccacccaggccgtgcctgcccccaaccagcagcccgaggtcttctgcaaccagattttcataaacaatgaatggcacgatgccgtcagcaggaaaacattccccaccgtcaatccgtccactggagaggtcatctgtcaggtagctgaaggggacaaggaagatgtggacaaggcagtgaaggccgcccgggccgccttccagctgggctcaccttggcgccgcatggacgcatcacacaggggccggctgctgaaccgcctggccgatctgatcgagcgggaccggacctacctggcggccttggagaccctggacaatggcaagccctatgtcatctcctacctggtggatttggacatggtcctcaaatgtctccggtattatgccggctgggctgataagtaccacgggaaaaccatccccattgacggagacttcttcagctacacacgccatgaacctgtgggggtgtgcgggcagatcattccgtggaatttcccgctcctgatgcaagcatggaagctgggcccagccttggcaactggaaacgtggttgtgatgaaggtagctgagcagacacccctcaccgccctctatgtggccaacctgatcaaggaggctggctttccccctggtgtggtcaacattgtgcctggatttggccccacggctggggccgccattgcctcccatgaggatgtggacaaagtggcattcacaggctccactgagattggccgcgtaatccaggttgctgctgggagcagcaacctcaagagagtgaccttggagctgggggggaagagccccaacatcatcatgtcagatgccgatatggattgggccgtggaacaggcccacttcgccctgttcttcaaccagggccagtgctgctgtgccggctcccggaccttcgtgcaggaggacatctatgatgagtttgtggagcggagcgttgcccgggccaagtctcgggtggtcgggaacccctttgatagcaagaccgagcaggggccgcaggtggatgaaactcagtttaagaagatcctcggctacatcaacacggggaagcaagagggggcgaagctgctgtgtggtgggggcattgctgctgaccgtggttacttcatccagcccactgtgtttggagatgtgcaggatggcatgaccatcgccaaggaggagatcttcgggccagtgatgcagatcctgaagttcaagaccatagaggaggttgttgggagagccaacaattccacgtacgggctggccgcagctgtcttcacaaaggatttggacaaggccaattacctgtcccaggccctccaggcgggcactgtgtgggtcaactgctatgatgtgtttggagcccagtcaccctttggtggctacaagatgtcggggagtggccgggagttgggcgagtacgggctgcaggcatacactgaagtgaaaactgtcacagtcaaagtgcctcagaagaactcataagaatcatgcaagcttcctccctcagccattgatggaaagttcagcaagatcagcaacaaaaccaagaaaaatgatccttgcgtgctgaatatctgaaaagagaaatttttcctacaaaatctcttgggtcaagaaagttctagaatttgaattgataaacatggtgggttggctgagggtaagagtatatgaggaaccttttaaacgacaacaatactgctagctttcaggatgatttttaaaaaatagattcaaatgtgttatcctctctctgaaacgcttcctataactcgagtttataggggaagaaaaagctattgtttacaattatatcaccattaaggcaactgctacaccctgctttgtattctgggctaagattcattaaaaactagctgctctt

SEQ ID NO: 1564 - DNA, 1572 bp, Homo sapiens
  source 1..1572: mol_type = unassigned DNA
attggctgccgcgcggggcggggagcggggtcggctcagtggccctgagaccctagctctgctctcggtccgctcgctgtccgctagcccgctgcgatgttgcgcgctgccgcccgcttcgggccccgcctgggccgccgcctcttgtcagccgccgccacccaggccgtgcctgcccccaaccagcagcccgaggtcttctgcaaccagattttcataaacaatgaatggcacgatgccgtcagcaggaaaacattccccaccgtcaatccgtccactggagaggtcatctgtcaggtagctgaaggggacaaggccttggagaccctggacaatggcaagccctatgtcatctcctacctggtggatttggacatggtcctcaaatgtctccggtattatgccggctgggctgataagtaccacgggaaaaccatccccattgacggagacttcttcagctacacacgccatgaacctgtgggggtgtgcgggcagatcattccgtggaatttcccgctcctgatgcaagcatggaagctgggcccagccttggcaactggaaacgtggttgtgatgaaggtagctgagcagacacccctcaccgccctctatgtggccaacctgatcaaggaggctggctttccccctggtgtggtcaacattgtgcctggatttggccccacggctggggccgccattgcctcccatgaggatgtggacaaagtggcattcacaggctccactgagattggccgcgtaatccaggttgctgctgggagcagcaacctcaagagagtgaccttggagctgggggggaagagccccaacatcatcatgtcagatgccgatatggattgggccgtggaacaggcccacttcgccctgttcttcaaccagggccagtgctgctgtgccggctcccggaccttcgtgcaggaggacatctatgatgagtttgtggagcggagcgttgcccgggccaagtctcgggtggtcgggaacccctttgatagcaagaccgagcaggggccgcaggtggatgaaactcagtttaagaagatcctcggctacatcaacacggggaagcaagagggggcgaagctgctgtgtggtgggggcattgctgctgaccgtggttacttcatccagcccactgtgtttggagatgtgcaggatggcatgaccatcgccaaggaggagatcttcgggccagtgatgcagatcctgaagttcaagaccatagaggaggttgttgggagagccaacaattccacgtacgggctggccgcagctgtcttcacaaaggatttggacaaggccaattacctgtcccaggccctccaggcgggcactgtgtgggtcaactgctatgatgtgtttggagcccagtcaccctttggtggctacaagatgtcggggagtggccgggagttgggcgagtacgggctgcaggcatacactgaagtgaaaactgtcacagtcaaagtgcctcagaagaactcataagaatcatgcaagcttcctccctcagccattgatggaaagttcagcaagatcagcaacaaaacc

SEQ ID NO: 1565 - DNA, 1779 bp, Homo sapiens
  source 1..1779: mol_type = unassigned DNA
cagaggtccagaggacgccacaccccacatttgaatatttttttttcttgtcacgcaaacttcctgggcaggaactccaagggctcaatggacgggaagcagggtccttaaatacgtcccctcttggctcttgccgttccaggagccccagttaccgggagaggctgtgtcaaaggcgccatgagcaagatcagcgaggccgtgaagcgcgcccgcgccgccttcagctcgggcaggacccgtccgctgcagttccggatccagcagctggaggcgctgcagcgcctgatccaggagcaggagcaggagctggtgggcgcgctggccgcagacctgcacaagaatgaatggaacgcctactatgaggaggtggtgtacgtcctagaggagatcgagtacatgatccagaagctccctgagtgggccgcggatgagcccgtggagaagacgccccagactcagcaggacgagctctacatccactcggagccactgggcgtggtcctcgtcattggcacctggaactaccccttcaacctcaccatccagcccatggtgggcgccatcgctgcagggaactcagtggtcctcaagccctcggagctgagtgagaacatggcgagcctgctggctaccatcatcccccagtacctggacaaggatctgtacccagtaatcaatgggggtgtccctgagaccacggagctgctcaaggagaggttcgaccatatcctgtacacgggcagcacgggggtggggaagatcatcatgacggctgctgccaagcacctgacccctgtcacgctggagctgggagggaagagtccctgctacgtggacaagaactgtgacctggacgtggcctgccgacgcatcgcctgggggaaattcatgaacagtggccagacctgcgtggcccctgactacatcctctgtgacccctcgatccagaaccaaattgtggagaagctcaagaagtcactgaaagagttctacggggaagatgctaagaaatcccgggactatggaagaatcattagtgcccggcacttccagagggtgatgggcctgattgagggccagaaggtggcttatgggggcaccggggatgccgccactcgctacatagcccccaccatcctcacggacgtggacccccagtccccggtgatgcaagaggagatcttcgggcctgtgctgcccatcgtgtgcgtgcgcagcctggaggaggccatccagttcatcaaccagcgtgagaagcccctggccctctacatgttctccagcaacgacaaggtgattaagaagatgattgcagagacatccagtggtggggtggcggccaacgatgtcatcgtccacatcaccttgcactctctgcccttcgggggcgtggggaacagcggcatgggatcctaccatggcaagaagagcttcgagactttctctcaccgccgctcttgcctggtgaggcctctgatgaatgatgaaggcctgaaggtcagataccccccgagcccggccaagatgacccagcactgaggaggggttgctccgcctggcctggccatactgtgtcccatcggagtgcggaccaccctcactggctctcctggccctgggagaatcgctcctgcagccccagcccagccccactcctctgctgacctgctgacctgtgcacaccccactcccacatgggcccaggcctcaccattccaagtctccacccctttctagaccaataaagagacgaatacaattttctaactcagcaaa

SEQ ID NO: 1566 - DNA, 1772 bp, Homo sapiens
  source 1..1772: mol_type = unassigned DNA
cagaggtccagaggacgccacaccccacatttgaatatttttttttcttgtcacgcaaacttcctgggcaggaactccaagggctcaatggacgggaagcagggtccttaaatacgtcccctcttggctcttgccgttccaggagccccagttaccgggagaggctgtgtcaaaggcgccatgagcaagatcagcgaggccgtgaagcgcgcccgcgccgccttcagggcaggacccgtccgctgcagttccggatccagcagctggaggcgctgcagcgcctgatccaggagcaggagcaggagctggtgggcgcgctggccgcagacctgcacaagaatgaatggaacgcctactatgaggaggtggtgtacgtcctagaggagatcgagtacatgatccagaagctccctgagtgggccgcggatgagcccgtggagaagacgccccagactcagcaggacgagctctacatccactcggagccactgggcgtggtcctcgtcattggcacctggaactaccccttcaacctcaccatccagcccatggtgggcgccatcgctgcagggaactcagtggtcctcaagccctcggagctgagtgagaacatggcgagcctgctggctaccatcatcccccagtacctggacaaggatctgtacccagtaatcaatgggggtgtccctgagaccacggagctgctcaaggagaggttcgaccatatcctgtacacgggcagcacgggggtggggaagatcatcatgacggctgctgccaagcacctgacccctgtcacgctggagctgggagggaagagtccctgctacgtggacaagaactgtgacctggacgtggcctgccgacgcatcgcctgggggaaattcatgaacagtggccagacctgcgtggcccctgactacatcctctgtgacccctcgatccagaaccaaattgtggagaagctcaagaagtcactgaaagagttctacggggaagatgctaagaaatcccgggactatggaagaatcattagtgcccggcacttccagagggtgatgggcctgattgagggccagaaggtggcttatgggggcaccggggatgccgccactcgctacatagcccccaccatcctcacggacgtggacccccagtccccggtgatgcaagaggagatcttcgggcctgtgctgcccatcgtgtgcgtgcgcagcctggaggaggccatccagttcatcaaccagcgtgagaagcccctggccctctacatgttctccagcaacgacaaggtgattaagaagatgattgcagagacatccagtggtggggtggcggccaacgatgtcatcgtccacatcaccttgcactctctgcccttcgggggcgtggggaacagcggcatgggatcctaccatggcaagaagagcttcgagactttctctcaccgccgctcttgcctggtgaggcctctgatgaatgatgaaggcctgaaggtcagataccccccgagcccggccaagatgacccagcactgaggaggggttgctccgcctggcctggccatactgtgtcccatcggagtgcggaccaccctcactggctctcctggccctgggagaatcgctcctgcagccccagcccagccccactcctctgctgacctgctgacctgtgcacaccccactcccacatgggcccaggcctcaccattccaagtctccacccctttctagaccaataaagagacgaatacaattttctaactcagc

SEQ ID NO: 1567 - DNA, 1495 bp, Homo sapiens
  source 1..1495: mol_type = unassigned DNA
cgggaagcagggtccttaaatacgtcccctcttggctcttgccgttccaggagccccagttaccgggagaggctgtgtcaaaggcgccatgagcaagatcagcgaggccgtgaagcgcgcccgcgccgccttcagctcgggcaggacccgtccgctgcagttccggatccagcagctggaggcgctgcagcgcctgatccaggagcaggagcaggagctggtgggcgcgctggccgcagacctgcacaagaatgaatggaacgcctactatgaggaggtggtgtacgtcctagaggagatcgagtacatgatccagaagctccctgagtgggccgcggatgagcccgtggagaagacgccccagactcagcaggacgagctctacatccactcggagccactgggcgtggtcctcgtcattggcacctggaactaccccttcaacctcaccatccagcccatggtgggcgccatcgctgcagggaactcagtggtcctcaagccctcggagctgagtgagaacatggcgagcctgctggctaccatcatcccccagtacctggacaaggatctgtacccagtaatcaatgggggtgtccctgagaccacggagctgctcaaggagaggttcgaccatatcctgtacacgggcagcacgggggtggggaagatcatcatgacggctgctgccaagcacctgacccctgtcacgctggagctgggagggaagagtccctgctacgtggacaagaactgtgacctggacgtggcctgccgacgcatcgcctgggggaaattcatgaacagtggccagacctgcgtggcccctgactacatcctctgtgacccctcgatccagaaccaaattgtggagaagctcaagaagtcactgaaagagatcttcgggcctgtgctgcccatcgtgtgcgtgcgcagcctggaggaggccatccagttcatcaaccagcgtgagaagcccctggccctctacatgttctccagcaacgacaaggtgattaagaagatgattgcagagacatccagtggtggggtggcggccaacgatgtcatcgtccacatcaccttgcactctctgcccttcgggggcgtggggaacagcggcatgggatcctaccatggcaagaagagcttcgagactttctctcaccgccgctcttgcctggtgaggcctctgatgaatgatgaaggcctgaaggtcagataccccccgagcccggccaagatgacccagcactgaggaggggttgctccgcctggcctggccatactgtgtcccatcggagtgcggaccaccctcactggctctcctggccctgggagaatcgctcctgcagccccagcccagccccactcctctgctgacctgctgacctgtgcacaccccactcccacatgggcccaggcctcaccattccaagtctccacccctttctagaccaataaagagacgaatacaattttctaactcagcaaa

SEQ ID NO: 1568 - DNA, 985 bp, Homo sapiens
  source 1..985: mol_type = unassigned DNA
gccgggaaaggccctgccgcgagcacgctgccaagagcccccagcagcagttcggcttaggactcgggttgcggcgggtgtcaccttctcaggggctagcaaggcagccagggcccaggcgtctgagtgaggggcgggagaggaggcgaggcagaaagtggaccttccagcggaaaggccattttccccaaggccgagcccagggaagtcccttcctatagaattcaggcagggtgggaggcagggcgcgctcgtgcccctcagccagctgcaggtgctctctgtccccaggcgccatgagcaagatcagcgaggccgtgaagcgcgcccgcgccgccttcagctcgggcaggacccgtccgctgcagttccggatccagcagctggaggcgctgcagcgcctgatccaggagcaggagcaggagctggtgggcgcgctggccgcagacctgcacaagaatgaatggaacgcctactatgaggaggtggtgtacgtcctagaggagatcgagtacatgatccagaagctccctgagtgggccgcggatgagcccgtggagaagacgccccagactcagcaggacgagctctacatccactcggagccactgggcgtggtcctcgtcattggcacctggaactaccccttcaacctcaccatccagcccatggtgggcgccatcgctgcagggaactcagtggtcctcaagccctcggagctgagtgagaacatggcgagcctgctggctaccatcatcccccagtacctggacaaggatctgtacccagtaatcaatgggggtgtccctgagaccacggagctgctcaaggagaggttcgaccatatcctgtacacgggcagcacgggggtggggaagatcatcatgacggctgctgccaagcacctgacccctgtcacgctggagctgggagggaagagtccctgctacgtggacaagaactgtgacctggacgtggcctgccg

SEQ ID NO: 1569 - DNA, 1157 bp, Homo sapiens
  source 1..1157: mol_type = unassigned DNA
gttggtctgggattgtgccatcagctttgcaagcaagcgccatgagcaagatcagcgaggccgtgaagcgcgcccgcgccgccttcagctcgggcaggacccgtccgctgcagttccggatccagcagctggaggcgctgcagcgcctgatccaggagcaggagcaggagctggtgggcgcgctggccgcagacctgcacaagaatgaatggaacgcctactatgaggaggtggtgtacgtcctagaggagatcgagtacatgatccagaagctccctgagtgggccgcggatgagcccgtggagaagacgccccagactcagcaggacgagctctacatccactcggagccactgggcgtggtcctcgtcattggcacctggaactaccccttcaacctcaccatccagcccatggtgggcgccatcgctgcagggaactcagtggtcctcaagccctcggagctgagtgagaacatggcgagcctgctggctaccatcatcccccagtacctggacaaggatctgtacccagtaatcaatgggggtgtccctgagaccacggagctgctcaaggagaggttcgaccatatcctgtacacgggcagcacgggggtggggaagatcatcatgacggctgctgccaagcacctgacccctgtcacgctggagctgggagggaagagtccctgctacgtggacaagaactgtgacctggacgtggcctgccgacgcatcgcctgggggaaattcatgaacagtggccagacctgcgtggcccctgactacatcctctgtgacccctcgatccagaaccaaattgtggagaagctcaagaagtcactgaaagagttctacggggaagatgctaagaaatcccgggactatggaagaatcattagtgcccggcacttccagagggtgatgggcctgattgagggccagaaggtggcttatgggggcaccggggatgccgccactcgctacatagcccccaccatcctcacggacgtggacccccagtccccggtgatgcaagaggagatcttcgggcctgtgctgcccatcgtgtgcgtgcgcagcctggaggaggccatccagttcatcaaccagcgtgagaagcccctggccctctacatgttctccagcaacgacaag

SEQ ID NO: 1570 - DNA, 1771 bp, Homo sapiens
  source 1..1771: mol_type = unassigned DNA
gctttttagaacaatggcttagccaggagggtggtgctgggtttttctttatcggcttgggtgtggaatcgcggactgcgcccctccaatctgatctggagagtggctgactgcgtgtgcagagctctgggggtgttggtctgggattgtgccatcagctttgcaagcaagcgccatgagcaagatcagcgaggccgtgaagcgcgcccgcgccgccttcagctcgggcaggacccgtccgctgcagttccggatccagcagctggaggcgctgcagcgcctgatccaggagcaggagcaggagctggtgggcgcgctggccgcagacctgcacaagaatgaatggaacgcctactatgaggaggtggtgtacgtcctagaggagatcgagtacatgatccagaagctccctgagtgggccgcggatgagcccgtggagaagacgccccagactcagcaggacgagctctacatccactcggagccactgggcgtggtcctcgtcattggcacctggaactaccccttcaacctcaccatccagcccatggtgggcgccatcgctgcagggaactcagtggtcctcaagccctcggagctgagtgagaacatggcgagcctgctggctaccatcatcccccagtacctggacaaggatctgtacccagtaatcaatgggggtgtccctgagaccacggagctgctcaaggagaggttcgaccatatcctgtacacgggcagcacgggggtggggaagatcatcatgacggctgctgccaagcacctgacccctgtcacgctggagctgggagggaagagtccctgctacgtggacaagaactgtgacctggacgtggcctgccgacgcatcgcctgggggaaattcatgaacagtggccagacctgcgtggcccctgactacatcctctgtgacccctcgatccagaaccaaattgtggagaagctcaagaagtcactgaaagagttctacggggaagatgctaagaaatcccgggactatggaagaatcattagtgcccggcacttccagagggtgatgggcctgattgagggccagaaggtggcttatgggggcaccggggatgccgccactcgctacatagcccccaccatcctcacggacgtggacccccagtccccggtgatgcaagaggagatcttcgggcctgtgctgcccatcgtgtgcgtgcgcagcctggaggaggccatccagttcatcaaccagcgtgagaagcccctggccctctacatgttctccagcaacgacaaggtgattaagaagatgattgcagagacatccagtggtggggtggcggccaacgatgtcatcgtccacatcaccttgcactctctgcccttcgggggcgtggggaacagcggcatgggatcctaccatggcaagaagagcttcgagactttctctcaccgccgctcttgcctggtgaggcctctgatgaatgatgaaggcctgaaggtcagataccccccgagcccggccaagatgacccagcactgaggaggggttgctccgcctggcctggccatactgtgtcccatcggagtgcggaccaccctcactggctctcctggccctgggagaatcgctcctgcagccccagcccagccccactcctctgctgacctgctgacctgtgcacaccccactcccacatgggcccaggcctcaccattccaagtctccacccctttctagaccaataaagagacgaatacaattttctaactcagc

SEQ ID NO: 1571 - DNA, 1926 bp, Homo sapiens
  source 1..1926: mol_type = unassigned DNA
atcagctttgcaagcaagtaagggagcggaaaaggccgggaaaggccctgccgcgagcacgctgccaagagcccccagcagcagttcggcttaggactcgggttgcggcgggtgtcaccttctcaggggctagcaaggcagccagggcccaggcgtctgagtgaggggcgggagaggaggcgaggcagaaagtggaccttccagcggaaaggccattttccccaaggccgagcccagggaagtcccttcctatagaattcaggcagggtgggaggcagggcgcgctcgtgcccctcagccagctgcaggtgctctctgtccccaggcgccatgagcaagatcagcgaggccgtgaagcgcgcccgcgccgccttcagctcgggcaggacccgtccgctgcagttccggatccagcagctggaggcgctgcagcgcctgatccaggagcaggagcaggagctggtgggcgcgctggccgcagacctgcacaagaatgaatggaacgcctactatgaggaggtggtgtacgtcctagaggagatcgagtacatgatccagaagctccctgagtgggccgcggatgagcccgtggagaagacgccccagactcagcaggacgagctctacatccactcggagccactgggcgtggtcctcgtcattggcacctggaactaccccttcaacctcaccatccagcccatggtgggcgccatcgctgcagggaactcagtggtcctcaagccctcggagctgagtgagaacatggcgagcctgctggctaccatcatcccccagtacctggacaaggatctgtacccagtaatcaatgggggtgtccctgagaccacggagctgctcaaggagaggttcgaccatatcctgtacacgggcagcacgggggtggggaagatcatcatgacggctgctgccaagcacctgacccctgtcacgctggagctgggagggaagagtccctgctacgtggacaagaactgtgacctggacgtggcctgccgacgcatcgcctgggggaaattcatgaacagtggccagacctgcgtggcccctgactacatcctctgtgacccctcgatccagaaccaaattgtggagaagctcaagaagtcactgaaagagttctacggggaagatgctaagaaatcccgggactatggaagaatcattagtgcccggcacttccagagggtgatgggcctgattgagggccagaaggtggcttatgggggcaccggggatgccgccactcgctacatagcccccaccatcctcacggacgtggacccccagtccccggtgatgcaagaggagatcttcgggcctgtgctgcccatcgtgtgcgtgcgcagcctggaggaggccatccagttcatcaaccagcgtgagaagcccctggccctctacatgttctccagcaacgacaaggtgattaagaagatgattgcagagacatccagtggtggggtggcggccaacgatgtcatcgtccacatcaccttgcactctctgcccttcgggggcgtggggaacagcggcatgggatcctaccatggcaagaagagcttcgagactttctctcaccgccgctcttgcctggtgaggcctctgatgaatgatgaaggcctgaaggtcagataccccccgagcccggccaagatgacccagcactgaggaggggttgctccgcctggcctggccatactgtgtcccatcggagtgcggaccaccctcactggctctcctggccctgggagaatcgctcctgcagccccagcccagccccactcctctgctgacctgctgacctgtgcacaccccactcccacatgggcccaggcctcaccattccaagtctccacccctttctagaccaataaagagacgaatacaattttctaactcagc

SEQ ID NO: 1572 - DNA, 1602 bp, Homo sapiens
  source 1..1602: mol_type = unassigned DNA
cagaggtccagaggacgccacaccccacatttgaatatttttttttcttgtcacgcaaacttcctgggcaggaactccaagggctcaatggacgggaagcagggtccttaaatacgtcccctcttggctcttgccgttccaggagccccagttaccgggagaggctgtgtcaaaggcgccatgagcaagatcagcgaggccgtgaagcgcgcccgcgccgccttcagctcgggcaggacccgtccgctgcagttccggatccagcagctggaggcgctgcagcgcctgatccaggagcaggagcaggagctggtgggcgcgctggccgcagacctgcacaagaatgaatggaacgcctactatgaggaggtggtgtacgtcctagaggagatcgagtacatgatccagaagctccctgagtgggccgcggatgagcccgtggagaagacgccccagactcagcaggacgagctctacatccactcggagccactgggcgtggtcctcgtcattggcacctggaactaccccttcaacctcaccatccagcccatggtgggcgccatcgctgcagggaactcagtggtcctcaagccctcggagctgagtgagaacatggcgagcctgctggctaccatcatcccccagtacctggacaaggatctgtacccagtaatcaatgggggtgtccctgagaccacggagctgctcaaggagaggttcgaccatatcctgtacacgggcagcacgggggtggggaagatcatcatgacggctgctgccaagcacctgacccctgtcacgctggagctgggagggaagagtccctgctacgtggacaagaactgtgacctggacgtggcctgccgacgcatcgcctgggggaaattcatgaacagtggccagacctgcgtggcccctgactacatcctctgtgacccctcgatccagaaccaaattgtggagaagctcaagaagtcactgaaagagttctacggggaagatgctaagaaatcccgggactatggaagaatcattagtgcccggcacttccagagggtgatgggcctgattgagggccagaaggtggcttatgggggcaccggggatgccgccactcgctacatagcccccaccatcctcacggacgtggacccccagtccccggtgatgcaagaggagatcttcgggcctgtgctgcccatcgtgtgcgtgcgcagcctggaggaggccatccagttcatcaaccagcgtgagaagcccctggccctctacatgttctccagcaacgacaaggtgattaagaagatgattgcagagacatccagtggtggggtggcggccaacgatgtcatcgtccacatcaccttgcactctctgcccttcgggggcgtggggaacagcggcatgggatcctaccatggcaagaagagcttcgagactttctctcaccgccgctcttgcctggtgaggcctctgatgaatgatgaaggcctgaaggtcagataccccccgagcccggccaagatgacccagcactggctctcctggccctgggagaatcgctcctgcagccccagcccagccccactcctctgctga

SEQ ID NO: 1573 - DNA, 3928 bp, Homo sapiens
  source 1..3928: mol_type = unassigned DNA
ccggggcgctctcagcaggatggccaacaccttccctccatccctacaccccgccgccccctggcccgtggccgcgctcggctcccgcactgctcactccaccccctacatcccagcccgctgccagagccggggagagggcgggggccgcgtgggcgaggccgtgaacagcggctgtcacgtgggccgcccaggccaataggggtgaggctttgggtcgagctcagtcctcccccggcgcctccgactggcagtgggactcagcgggcgtggaggtcgcggctgagcgagcgagccctgggcgagtgaattgtggctgtgggttgacggtggagacaccccccggagggaggcggagggaagggaggcgaggcctgcacctgcatgcttcccgcctcccactccccagcgcccccggaccgtgcagttctctgcaggaccaggccatggagctcgaagtccggcgggtccgacaggcgttcctgtccggccggtcgcgacctctgcggtttcggctgcagcagctggaggccctgcggaggatggtgcaggagcgcgagaaggatatcctgacggccatcgccgccgacctgtgcaagagtgaattcaatgtgtacagtcaggaagtcattactgtccttggggaaattgattttatgcttgagaatcttcctgaatgggttactgctaaaccagttaagaagaacgtgctcaccatgctggatgaggcctatattcagccacagcctctgggagtggtgctgataatcggagcttggaattaccccttcgttctcaccattcagccactgataggagccatcgctgcaggaaatgctgtgattataaagccttctgaactgagtgaaaatacagccaagatcttggcaaagcttctccctcagtatttagaccaggatctctatattgttattaatggtggtgttgaggaaaccacggagctcctgaagcagcgatttgaccacattttctatacgggaaacactgcggttggcaaaattgtcatggaagctgctgccaagcatctgacccctgtgactcttgaactgggagggaaaagtccatgttatattgataaagattgtgacctggacattgtttgcagacgcataacctggggaaaatacatgaattgtggccaaacctgcattgcacccgactatattctctgtgaagcatccctccaaaatcaaattgtatggaagattaaggaaacagtgaaggaattttatggagaaaatataaaagagtctcctgattatgaaaggatcatcaatcttcgtcattttaagaggatactaagtttgcttgaaggacaaaagatagcttttggtggggagactgatgaggccacacgctacatagccccaacagtacttaccgatgttgatcctaaaaccaaggtgatgcaagaagaaatttttggaccaattcttccaatagtgcctgtgaaaaatgtagatgaggccataaatttcataaatgaacgtgaaaagcctctggctctttatgtattttcgcataaccataagctcatcaaacggatgattgatgagacatccagtggaggtgtcacaggcaatgacgtcattatgcacttcacgctcaactctttcccatttggaggagtgggttccagtgggatgggagcttatcacggaaaacatagttttgatactttttctcatcagcgtccctgtttattaaaaagtttaaagagagaaggtgctaacaaactcagatatcctcccaacagccagtcaaaggtggattggggaaaattttttctcttgaaacggttcaacaaagaaaaactcggtctcctgttgctcactttcctgggtattgtagccgctgtgcttgtcaaggcagaatattactgaagaatgatcctgttcaacctcctagtgcctctactgaattattcctcttttaaatggttaatgaaccaataatttttaaatcataccaaaaatagtaagaaaatatgcaaacactctgtgatcaaacttaaaagtcattgccattcatcattaataaaagttgccatttcaactacgtcccaacattccctaatagggtattcagggaacctgtcttaaattgtgcttatctaaatcttggaactttgagctaggggaggagaatgtattagactaaatacaaactgcggggttgtaagggagtctcagaacctcactgaatccttcactccagttaatggcactgctcacttcctgcctctgctgccaccatcactgtgtgaagctttcaagagcttggtacttcccagggctaccggcagtcctctgtagtccagagaggtgagattagatcttcttggttccctgtgaggtttcaggcactaaaactctatgtggggaagggaggggttactcctcctccaatgggactcaaggacttgacctccaggagtaggcccctggtcagaagtgccatctcaccagtggtcttcattcttcctcattcattctttatcatcctgtgttctgtttagttgcaacaatctcttgtgactaatgtcactcaaagcatcttgtaaatcctagggcttcctggaagttagttgccaaagtcatgcaagcatcacctgtcattcttgtgttggagttatagaattctacatcttataaaacctaactggcatttaaaaaatactgtggccgggcgtggtggctcatgcctgtaatcccagcactttgggaggccgaggtgggaggattgcttgagtccaggaatttgagaccagcctggacaacacagtgagacctcatctctatcaaaaaataaaaattagctagatgtggtggcatgagcctgtgttcccagctgcttaggaggctgaagcaggaggattgattgagcctgcgaggccaaggctgcagcaggctgtgattgcaccactgcacttcagcttgggcaacagagcaagaccctgtctccgaaacaaataaaaaatactgtaataaaagtacttataaacatactaatcctctttcaggaccctaaagttgcaggttagtaggtcttcaaggacaaatctgtaagtttcttatttctgtagtgcaagtaaaatttcactttttgaaactatagagagatccctttctgattagcctacagaacttaaagtgagggaaccatttcctctcacagacaaagaggcctgggatattaggactttggggtttgagagcatcatggggcagacagatggtggatggtctggacaagaagcgagtaagccactgcggttggtcatactgaagggaattgatggcaagaggatcccctgagcaagtcagaagttactctcatcagtcgttcatggtcacaacctgaggtactctgctgagtgggcaaggctgaagaagaggcctgtggaatgcagcattacctgctggacagagcagggcaggcagttctatgccttggagctcctgactgcagggactctgtccccacactcaaaaagactcagctcactcaatgagagaatgtgatttactttatagaacgtataatcaactttgttgaataatttgttctattaaggctgtctaaagtatgtgatgtcttcatcatagtatgaagtgttgaaaattaataacgagcctagtttaggaaaaagctgcttaaaactgtggctctaagagagtaatcataaaataccttagataaaattgcactatggaattttcattgagtatgtttaaattattggcttgtctactaatacacatctgcttcaaaatgaacatatttcataaaattggcatcaattttaatgacgctcctggtatggaacctcagatataccctattggagacaatcctttgatcataaattctccccaactataaatcattttatgtctttatcata

SEQ ID NO: 1574 - DNA, 3828 bp, Homo sapiens
  source 1..3828: mol_type = unassigned DNA
agtcctcccccggcgcctccgactggcagtgggactcagcgggcgtggaggtcgcggctgagcgagcgagccctgggcgagtgaattgtggctgtgggttgacggtggagacaccccccggagggaggcggagggaagggaggcgaggcctgcacctgcatgcttcccgcctcccactccccagcgcccccggaccgtgcagttctctgcaggaccaggccatggagctcgaagtccggcgggtccgacaggcgttcctgtccggccggtcgcgacctctgcggtttcggctgcagcagctggaggccctgcggaggatggtgcaggagcgcgagaaggatatcctgacggccatcgccgccgacctgtgcaagagtgaattcaatgtgtacagtcaggaagtcattactgtccttggggaaattgattttatgcttgagaatcttcctgaatgggttactgctaaaccagttaagaagaacgtgctcaccatgctggatgaggcctatattcagccacagcctctgggagtggtgctgataatcggagcttggaattaccccttcgttctcaccattcagccactgataggagccatcgctgcaggaaatgctgtgattataaagccttctgaactgagtgaaaatacagccaagatcttggcaaagcttctccctcagtatttagaccaggatctctatattgttattaatggtggtgttgaggaaaccacggagctcctgaagcagcgatttgaccacattttctatacgggaaacactgcggttggcaaaattgtcatggaagctgctgccaagcatctgacccctgtgactcttgaactgggagggaaaagtccatgttatattgataaagattgtgacctggacattgtttgcagacgcataacctggggaaaatacatgaattgtggccaaacctgcattgcacccgactatattctctgtgaagcatccctccaaaatcaaattgtatggaagattaaggaaacagtgaaggaattttatggagaaaatataaaagagtctcctgattatgaaaggatcatcaatcttcgtcattttaagaggatactaagtttgcttgaaggacaaaagatagcttttggtggggagactgatgaggccacacgctacatagccccaacagtacttaccgatgttgatcctaaaaccaaggtgatgcaagaagaaatttttggaccaattcttccaatagtgcctgtgaaaaatgtagatgaggccataaatttcataaatgaacgtgaaaagcctctggctctttatgtattttcgcataaccataagctcatcaaacggatgattgatgagacatccagtggaggtgtcacaggcaatgacgtcattatgcacttcacgctcaactctttcccatttggaggagtgggttccagtgggatgggagcttatcacggaaaacatagttttgatactttttctcatcagcgtccctgtttattaaaaagtttaaagagagaaggtgctaacaaactcagatatcctcccaacagccagtcaaaggtggattggggaaaattttttctcttgaaacggttcaacaaagaaaaactcggtctcctgttgctcactttcctgggtattgtagccgctgtgcttgtcaagaaataccaagctgtgctgaggagaaaggccctgttgatttttctggtagttcacagactgcgttggtccagtaagcagagatgaacaccagatttcaaaacccagccctgtctgttaagagtgaggcagaatattactgaagaatgatcctgttcaacctcctagtgcctctactgaattattcctcttttaaatggttaatgaaccaataatttttaaatcataccaaaaatagtaagaaaatatgcaaacactctgtgatcaaacttaaaagtcattgccattcatcattaataaaagttgccatttcaactacgtcccaacattccctaatagggtattcagggaacctgtcttaaattgtgcttatctaaatcttggaactttgagctaggggaggagaatgtattagactaaatacaaactgcggggttgtaagggagtctcagaacctcactgaatccttcactccagttaatggcactgctcacttcctgcctctgctgccaccatcactgtgtgaagctttcaagagcttggtacttcccagggctaccggcagtcctctgtagtccagagaggtgagattagatcttcttggttccctgtgaggtttcaggcactaaaactctatgtggggaagggaggggttactcctcctccaatgggactcaaggacttgacctccaggagtaggcccctggtcagaagtgccatctcaccagtggtcttcattcttcctcattcattctttatcatcctgtgttctgtttagttgcaacaatctcttgtgactaatgtcactcaaagcatcttgtaaatcctagggcttcctggaagttagttgccaaagtcatgcaagcatcacctgtcattcttgtgttggagttatagaattctacatcttataaaacctaactggcatttaaaaaatactgtggccgggcgtggtggctcatgcctgtaatcccagcactttgggaggccgaggtgggaggattgcttgagtccaggaatttgagaccagcctggacaacacagtgagacctcatctctatcaaaaaataaaaattagctagatgtggtggcatgagcctgtgttcccagctgcttaggaggctgaagcaggaggattgattgagcctgcgaggccaaggctgcagcaggctgtgattgcaccactgcacttcagcttgggcaacagagcaagaccctgtctccgaaacaaataaaaaatactgtaataaaagtacttataaacatactaatcctctttcaggaccctaaagttgcaggttagtaggtcttcaaggacaaatctgtaagtttcttatttctgtagtgcaagtaaaatttcactttttgaaactatagagagatccctttctgattagcctacagaacttaaagtgagggaaccatttcctctcacagacaaagaggcctgggatattaggactttggggtttgagagcatcatggggcagacagatggtggatggtctggacaagaagcgagtaagccactgcggttggtcatactgaagggaattgatggcaagaggatcccctgagcaagtcagaagttactctcatcagtcgttcatggtcacaacctgaggtactctgctgagtgggcaaggctgaagaagaggcctgtggaatgcagcattacctgctggacagagcagggcaggcagttctatgccttggagctcctgactgcagggactctgtccccacactcaaaaagactcagctcactcaatgagagaatgtgatttactttatagaacgtataatcaactttgttgaataatttgttctattaaggctgtctaaagtatgtgatgtcttcatcatagtatgaagtgttgaaaattaataacgagcctagtttaggaaaaagctgcttaaaactgtggctctaagagagtaatcataaaataccttagataaaattgcactatggaattttcattgagtatgtttaaattattggcttgtctactaatacacatctgcttcaaaatgaacatatttcataaaattggcatcaattttaatgacgctcctggtatggaacctcagatataccctattggagacaatcctttgatcataaattctccccaactataaatcattttatgtctttatcata

SEQ ID NO: 1575 - DNA, 3627 bp, Homo sapiens
  source 1..3627: mol_type = unassigned DNA
ctttgggtcgagctcagtcctcccccggcgcctccgactggcagtgggactcagcgggcgtggaggtcgcggctgagcgagcgagccctgggcgagtgaattgtggctcgcccccggaccgtgcagttctctgcaggaccaggccatggagctcgaagtccggcgggtccgacaggcgttcctgtccggccggtcgcgacctctgcggtttcggctgcagcagctggaggccctgcggaggatggtgcaggagcgcgagaaggatatcctgacggccatcgccgccgacctgtgcaagagtgaattcaatgtgtacagtcaggaagtcattactgtccttggggaaattgattttatgcttgagaatcttcctgaatgggttactgctaaaccagttaagaagaacgtgctcaccatgctggatgaggcctatattcagccacagcctctgggagtggtgctgataatcggagcttggaattaccccttcgttctcaccattcagccactgataggagccatcgctgcaggaaatgctgtgattataaagccttctgaactgagtgaaaatacagccaagatcttggcaaagcttctccctcagtatttagaccaggatctctatattgttattaatggtggtgttgaggaaaccacggagctcctgaagcagcgatttgaccacattttctatacgggaaacactgcggttggcaaaattgtcatggaagctgctgccaagcatctgacccctgtgactcttgaactgggagggaaaagtccatgttatattgataaagattgtgacctggacattgtttgcagacgcataacctggggaaaatacatgaattgtggccaaacctgcattgcacccgactatattctctgtgaagcatccctccaaaatcaaattgtatggaagattaaggaaacagtgaaggaattttatggagaaaatataaaagagtctcctgattatgaaaggatcatcaatcttcgtcattttaagaggatactaagtttgcttgaaggacaaaagatagcttttggtggggagactgatgaggccacacgctacatagccccaacagtacttaccgatgttgatcctaaaaccaaggtgatgcaagaagaaatttttggaccaattcttccaatagtgcctgtgaaaaatgtagatgaggccataaatttcataaatgaacgtgaaaagcctctggctctttatgtattttcgcataaccataagctcatcaaacggatgattgatgagacatccagtggaggtgtcacaggcaatgacgtcattatgcacttcacgctcaactctttcccatttggaggagtgggttccagtgggatgggagcttatcacggaaaacatagttttgatactttttctcatcagcgtccctgtttattaaaaagtttaaagagagaaggtgctaacaaactcagatatcctcccaacagccagtcaaaggtggattggggaaaattttttctcttgaaacggttcaacaaagaaaaactcggtctcctgttgctcactttcctgggtattgtagccgctgtgcttgtcaaggcagaatattactgaagaatgatcctgttcaacctcctagtgcctctactgaattattcctcttttaaatggttaatgaaccaataatttttaaatcataccaaaaatagtaagaaaatatgcaaacactctgtgatcaaacttaaaagtcattgccattcatcattaataaaagttgccatttcaactacgtcccaacattccctaatagggtattcagggaacctgtcttaaattgtgcttatctaaatcttggaactttgagctaggggaggagaatgtattagactaaatacaaactgcggggttgtaagggagtctcagaacctcactgaatccttcactccagttaatggcactgctcacttcctgcctctgctgccaccatcactgtgtgaagctttcaagagcttggtacttcccagggctaccggcagtcctctgtagtccagagaggtgagattagatcttcttggttccctgtgaggtttcaggcactaaaactctatgtggggaagggaggggttactcctcctccaatgggactcaaggacttgacctccaggagtaggcccctggtcagaagtgccatctcaccagtggtcttcattcttcctcattcattctttatcatcctgtgttctgtttagttgcaacaatctcttgtgactaatgtcactcaaagcatcttgtaaatcctagggcttcctggaagttagttgccaaagtcatgcaagcatcacctgtcattcttgtgttggagttatagaattctacatcttataaaacctaactggcatttaaaaaatactgtggccgggcgtggtggctcatgcctgtaatcccagcactttgggaggccgaggtgggaggattgcttgagtccaggaatttgagaccagcctggacaacacagtgagacctcatctctatcaaaaaataaaaattagctagatgtggtggcatgagcctgtgttcccagctgcttaggaggctgaagcaggaggattgattgagcctgcgaggccaaggctgcagcaggctgtgattgcaccactgcacttcagcttgggcaacagagcaagaccctgtctccgaaacaaataaaaaatactgtaataaaagtacttataaacatactaatcctctttcaggaccctaaagttgcaggttagtaggtcttcaaggacaaatctgtaagtttcttatttctgtagtgcaagtaaaatttcactttttgaaactatagagagatccctttctgattagcctacagaacttaaagtgagggaaccatttcctctcacagacaaagaggcctgggatattaggactttggggtttgagagcatcatggggcagacagatggtggatggtctggacaagaagcgagtaagccactgcggttggtcatactgaagggaattgatggcaagaggatcccctgagcaagtcagaagttactctcatcagtcgttcatggtcacaacctgaggtactctgctgagtgggcaaggctgaagaagaggcctgtggaatgcagcattacctgctggacagagcagggcaggcagttctatgccttggagctcctgactgcagggactctgtccccacactcaaaaagactcagctcactcaatgagagaatgtgatttactttatagaacgtataatcaactttgttgaataatttgttctattaaggctgtctaaagtatgtgatgtcttcatcatagtatgaagtgttgaaaattaataacgagcctagtttaggaaaaagctgcttaaaactgtggctctaagagagtaatcataaaataccttagataaaattgcactatggaattttcattgagtatgtttaaattattggcttgtctactaatacacatctgcttcaaaatgaacatatttcataaaattggcatcaattttaatgacgctcctggtatggaacctcagatataccctattggagacaatcctttgatcataaattctccccaactataaatcattttatgtctttatcata

SEQ ID NO: 1576 - DNA, 655 bp, Homo sapiens
  source 1..655: mol_type = unassigned DNA
gagtaacggacgtgcgaggatgatgcttgtgcaagaaggaaatgaccgctgtcccggctccgcgggagacgaaccccggcttcccgccctcagggactagctctccagggaactgggacgcgcccccggaccgtgcagttctctgcaggaccaggccatggagctcgaagtccggcgggtccgacaggcgttcctgtccggccggtcgcgacctctgcggtttcggctgcagcagctggaggccctgcggaggatggtgcaggagcgcgagaaggatatcctgacggccatcgccgccgacctgtgcaagagtgaattcaatgtgtacagtcaggaagtcattactgtccttggggaaattgattttatgcttgagaatcttcctgaatgggttactgctaaaccagttaagaagaacgtgctcaccatgctggatgaggcctatattcagccacagcctctgggagtggtgctgataatcggagcttggaattaccccttcgttctcaccattcagccactgataggagccatcgctgcaggaaatgctgtgattataaagccttctgaactgagtgaaaatacagccaagatcttggcaaagcttctccctcagtatttagaccaggatctctatattgttattaatggtggt

SEQ ID NO: 1577 - DNA, 2649 bp, Homo sapiens
  source 1..2649: mol_type = unassigned DNA
accccattgattaccccattgccaggcgtgggcacgggagttggtttgggagctgccagtctcctgggaggatcgcagtcagcagagcagggctgaggcctgggggtaggagcagagcctgcgcatctggaggcagcatgtccaagaaagggagtggaggtgcagcgaaggacccaggggcagagcccacgctgggatggaccccttcgaggacacgctgcggcggctgcgtgaggccttcaactgagggcgcacgcggccggccgagttccgggctgcgcagctccagggcctgggccacttccttcaagaaaacaagcagcttctgcgcgacgtgctggcccaggacctgcataagccagctttcgaggcagacatatctgagctcatcctttgccagaacgaggttgactacgctctcaagaacctgcaggcctggatgaaggatgaaccacggtccacgaacctgttcatgaagctggactcggtcttcatctggaaggaaccctttggcctggtcctcatcatcgcaccctggaactacccactgaacctgaccctggtgctcctggtgggcgccctcgccgcagggagttgcgtggtgctgaagccgtcagaaatcagccagggcacagagaaggtcctggctgaggtgctgccccagtacctggaccagagctgctttgccgtggtgctgggcggaccccaggagacagggcagctgctagagcacaagttggactacatcttcttcacagggagccctcgtgtgggcaagattgtcatgactgctgccaccaagcacctgacgcctgtcaccctggagctggggggcaagaacccctgctacgtggacgacaactgcgacccccagaccgtggccaaccgcgtggcctggttctgctacttcaatgccggccagacctgcgtggcccctgactacgtcctgtgcagccccgagatgcaggagaggctgctgcccgccctgcagagcaccatcacccgtttctatggcgacgacccccagagctccccaaacctgggccacatcatcaaccagaaacagttccagcggctgcgggcattgctgggctgcagccgcgtggccattgggggccagagcaacgagagcgatcgctacatcgcccccacggtgctggtggacgtgcaggagacggagcctgtgatgcaggaggagatcttcgggcccatcctgcccatcgtgaacgtgcagagcgtggacgaggccatcaagttcatcaaccggcaggagaagcccctggccctgtacgccttctccaacagcagccaggttgtgaaccagatgctggagcggaccagcagcggcagctttggaggcaatgagggcttcacctacatatctctgctgtccgtgccattcgggggagtcggccacagtgggatgggccggtaccacggcaagttcaccttcgacaccttctcccaccaccgcacctgcctgctcgccccctccggcctggagaaattaaaggagatccactacccaccctataccgactggaaccagcagctgttacgctggggcatgggctcccagagctgcaccctcctgtgagcgtcccacccgcctccaacgggtcacacagagaaacctgagtctagccatgaggggcttatgctcccaactcacattgttcctccagaccgcaggttcccccagcctcaggttgctggagctgtcacatgactgcatcctgcctgccagggctgcaaagcaaggtcttgcttctatctgggggacgctgctcgagagaggccaagaggccgcagaacatgccaggtgtcctcactcaccccaccctccccaattccagccctttgccctctcggtcagggttggccagacccagtcacaggggcagtgtcaccctggaaaatacagtgccctgccttcttaggggcatcagccctgaacggttgagagcgtggagccctccaggcctttgctctcccctctaggcacacgcgcacttccatctctgccccatcccaactgcaccagcactgcctcccccagggatcctctcacatcccacactggtctctgcaccacccctctggttcacaccgcaccctgcactcacccacagcagctccatccactgggaaaactggggtttgcatcactccactgcacagtgttagtgggacctgggggcaagtcccttgacttctctgagcctcagtttccttatgtgaaagttgctggaaccaaaatggagtcacttatgccaaactctaataaaatggagtcggggggccacatagaagccctcacacacacatgcccgtaacaggatttatcacaagacacgcctgcatgtagaccagacacagggcgtatggaaagcacgtcctcaagactgtagtattccagatgagctgcagatgcttacctaccacggccgtctccaccagaaaaccatcgccaactcctgcgatcagcttgtgacttacaaaccttgtttaaaagctgcttacatggacttctgtcctttaaaagcttccccttggctgtggccctctgtgtatgcctgggatccttccaagcactcatagcccagataggaatcctctgctcctcccaaataaattcatctgttctgg

SEQ ID NO: 1578 - DNA, 726 bp, Homo sapiens
  source 1..726: mol_type = unassigned DNA
agacaccgagcagctataggtcctggcagtgagacaagggatggaccccttcgaggacacgctgcggcggctgcgtgaggccttcaactgagggcgcacgcggccggccgagttccgggctgcgcagctccagggcctgggccacttccttcaagaaaacaagcagcttctgcgcgacgtgctggcccaggacctgcataagccagctttcgaggcagacatatctgagctcatcctttgccagaacgaggttgactacgctctcaagaacctgcaggcctggatgaaggatgaaccacggtccacgaacctgttcatgaagctggactcggtcttcatctggaaggaaccctttggcctggtcctcatcatcgcaccctggaactacccactgaacctgaccctggtgctcctggtgggcgccctcgccgcagggagttgcgtggtgctgaagccgtcagaaatcagccagggcacagagaaggtcctggctgaggtgctgccccagtacctggaccagagctgctttgccgtggtgctgggcggaccccaggagacagggcagctgctagagcacaagttggactacatcttcttcacagggagccctcgtgtgggcaagattgtcatgactgctgccaccaagcacctgacgcctgtcaccctggagctggggggcaagaacccctgctacgtggacgacaactgcgacccccagaccgtggc

SEQ ID NO: 1579 - DNA, 561 bp, Homo sapiens
  source 1..561: mol_type = unassigned DNA
gagctgggatggtgggcagcagggtcacccgaggatggaccccttcgaggacacgctgcggcggctgcgtgaggccttcaactgagggcgcacgcggccggccgagttccgggctgcgcagctccagggcctgggccacttccttcaagaaaacaagcagcttctgcgcgacgtgctggcccaggacctgcataagccagctttcgaggcagacatatctgagctcatcctttgccagaacgaggttgactacgctctcaagaacctgcaggcctggatgaaggatgaaccacggtccacgaacctgttcatgaagctggactcggtcttcatctggaaggaaccctttggcctggtcctcatcatcgcaccctggaactacccactgaacctgaccctggtgctcctggtgggcgccctcgccgcagggagttgcgtggtgctgaagccgtcagaaatcagccagggcacagagaaggtcctggctgaggtgctgccccagtacctggaccagagctgctttgccgtggtgctgggcggaccccaggagacagggcagct

SEQ ID NO: 1580 - DNA, 2480 bp, Homo sapiens
  source 1..2480: mol_type = unassigned DNA
ggttgcttccccttccaccataactgatggaccccttcgaggacacgctgcggcggctgcgtgaggccttcaactgagggcgcacgcggccggccgagttccgggctgcgcagctccagggcctgggccacttccttcaagaaaacaagcagcttctgcgcgacgtgctggcccaggacctgcataagccagctttcgaggcagacatatctgagctcatcctttgccagaacgaggttgactacgctctcaagaacctgcaggcctggatgaaggatgaaccacggtccacgaacctgttcatgaagctggactcggtcttcatctggaaggaaccctttggcctggtcctcatcatcgcaccctggaactacccactgaacctgaccctggtgctcctggtgggcgccctcgccgcagggagttgcgtggtgctgaagccgtcagaaatcagccagggcacagagaaggtcctggctgaggtgctgccccagtacctggaccagagctgctttgccgtggtgctgggcggaccccaggagacagggcagctgctagagcacaagttggactacatcttcttcacagggagccctcgtgtgggcaagattgtcatgactgctgccaccaagcacctgacgcctgtcaccctggagctggggggcaagaacccctgctacgtggacgacaactgcgacccccagaccgtggccaaccgcgtggcctggttctgctacttcaatgccggccagacctgcgtggcccctgactacgtcctgtgcagccccgagatgcaggagaggctgctgcccgccctgcagagcaccatcacccgtttctatggcgacgacccccagagctccccaaacctgggccacatcatcaaccagaaacagttccagcggctgcgggcattgctgggctgcagccgcgtggccattgggggccagagcaacgagagcgatcgctacatcgcccccacggtgctggtggacgtgcaggagacggagcctgtgatgcaggaggagatcttcgggcccatcctgcccatcgtgaacgtgcagagcgtggacgaggccatcaagttcatcaaccggcaggagaagcccctggccctgtacgccttctccaacagcagccaggttgtgaaccagatgctggagcggaccagcagcggcagctttggaggcaatgagggcttcacctacatatctctgctgtccgtgccattcgggggagtcggccacagtgggatgggccggtaccacggcaagttcaccttcgacaccttctcccaccaccgcacctgcctgctcgccccctccggcctggagaaattaaaggagatccactacccaccctataccgactggaaccagcagctgttacgctggggcatgggctcccagagctgcaccctcctgtgagcgtcccacccgcctccaacgggtcacacagagaaacctgagtctagccatgaggggcttatgctcccaactcacattgttcctccagaccgcaggttcccccagcctcaggttgctggagctgtcacatgactgcatcctgcctgccagggctgcaaagcaaggtcttgcttctatctgggggacgctgctcgagagaggccaagaggccgcagaacatgccaggtgtcctcactcaccccaccctccccaattccagccctttgccctctcggtcagggttggccagacccagtcacaggggcagtgtcaccctggaaaatacagtgccctgccttcttaggggcatcagccctgaacggttgagagcgtggagccctccaggcctttgctctcccctctaggcacacgcgcacttccatctctgccccatcccaactgcaccagcactgcctcccccagggatcctctcacatcccacactggtctctgcaccacccctctggttcacaccgcaccctgcactcacccacagcagctccatccactgggaaaactggggtttgcatcactccactgcacagtgttagtgggacctgggggcaagtcccttgacttctctgagcctcagtttccttatgtgaaagttgctggaaccaaaatggagtcacttatgccaaactctaataaaatggagtcggggggccacatagaagccctcacacacacatgcccgtaacaggatttatcacaagacacgcctgcatgtagaccagacacagggcgtatggaaagcacgtcctcaagactgtagtattccagatgagctgcagatgcttacctaccacggccgtctccaccagaaaaccatcgccaactcctgcgatcagcttgtgacttacaaaccttgtttaaaagctgcttacatggacttctgtcctttaaaagcttccccttggctgtggccctctgtgtatgcctgggatccttccaagcactcatagcccagataggaatcctctgctcctcccaaataaattcatctgttctgga

SEQ ID NO: 1581 - DNA, 2122 bp, Homo sapiens
  source 1..2122: mol_type = unassigned DNA
tccagcgaacagccccgcttctaacccgagatgctgctgccggcgcccgcgctccgccgcgccctgctgtcccgcccctggaccggggccggcctgcggtggaagcacacctcctccctgaaggtggccaacgagcccgtcttagccttcacgcagggcagccctgagcgagatgccctgcaaaaggccttgaaggacctgaagggccggatggaagccatcccatgcgtggtgggggatgaggaggtgtggacgtcggacgtgcagtaccaagtgtcgccttttaaccatggacataaggtggccaagttctgttatgcagacaagagcctgctcaacaaagccattgaggctgccctggctgcccggaaagagtgggacctgaagcctattgcagaccgggcccagatcttcctgaaggcggcagacatgctgagtgggccgcgcagggctgagatcctcgccaagaccatggtgggacagggtaagaccgtgatccaagcggagattgacgctgcagcggaactcatcgacttcttccggttcaatgccaagtatgcggtggagctggaggggcagcagcccatcagcgtgcccccgagcaccaacagcacggtgtaccggggtctggagggcttcgtggcggccatctcgccctttaacttcactgcaatcggcggcaacctggcgggggcaccggccctgatgggcaacgtggtcctatggaagcccagtgacactgccatgctggccagctatgctgtctaccgcatccttcgggaggctggcctgccccccaacatcatccagtttgtgccagctgatgggcccctatttggggacactgtcaccagctcagagcacctctgtggcatcaacttcacaggcagtgtgcccaccttcaaacacctgtggaagcaggtggcccagaacctggaccggttccacaccttcccacgcctggctggagagtgcggcggaaagaacttccacttcgtgcaccgctcggccgacgtggagagcgtggtgagcgggaccctccgctcagccttcgagtacggtggccagaagtgttccgcgtgctcgcgtctctacgtgccgcactcgctgtggccgcagatcaaagggcggctgctggaggagcacagtcggatcaaagtgggcgaccctgcagaggattttgggaccttcttctctgcagtgattgatgccaagtcctttgcccgtatcaagaagtggctggagcacgcacgctcctcacccagcctcaccatcctggccgggggcaagtgtgatgactccgtgggctactttgtggagccctgcatcgtggagagcaaggaccctcaggagcccatcatgaaggaggagatcttcgggcctgtactgtctgtgtacgtctacccggatgacaagtacaaggagacgctgcagctggttgacagcaccaccagctatggcctcacgggggcagtgttctcccaggataaggacgtcgtgcaggaggccacaaaggtgctgaggaatgctgccggcaacttctacatcaacgacaagtccactggctcgatagtgggccagcagccctttgggggggcccgagcctctggaaccaatgacaagccagggggcccacactacatcctgcgctggacgtcgccgcaggtcatcaaggagacacataagcccctgggggactggagctacgcgtacatgcagtgagcccctctcgggctccaccgtccagctgtctgtccgtccagatgcctcctgcttggattctgagtggtcagagatctgtaaagcatgactttcaaggatggttcttaggggactgtgaaagtgttgggtcttcctccaggatgcctgcatgggaccccacccggagctggtgtggccattccccaagtgccactggcccatggatgggggtgggtgctggtgccagctgggctgggtgtgggttctgtgtccttccaggatatgtgtcatttcccatgaggggccggggcaggtggctgggtgggggcacaggctggagtattcttagttctactggttctacactgtgaggtggcaatgggatttgctcagatgccacccaataaaatgcctgttactt

SEQ ID NO: 1582 - DNA, 785 bp, Homo sapiens
  source 1..785: mol_type = unassigned DNA
cccgcttctaacccgagatgctgctgccggcgcccgcgctccgccgcgccctgctgtcccgcccctggaccggggccggcctgcggtggaagcacacctcctccctgaaggtggccaacgagcccgtcttagccttcacgcagggcagccctgagcgagatgccctgcaaaaggccttgaaggacctgaagggccggatggaagccatcccatgcgtggtgggggatgaggaggtgtggacgtcggacgtgcagtaccaagtgtcgccttttaaccatggacataaggtggccaagttctgttatgcagacaagagcctgctcaacaaagccattgaggctgccctggctgcccggaaagagtgggacctgaagcctattgcagaccgggcccagatcttcctgaaggcggcagacatgctgagtgggccgcgcagggctgagatcctcgccaagaccatggtgggacagggtaagaccgtgatccaagcggagattgacgctgcagcggaactcatcgacttcttccggttcaatgccaagtatgcggtggagctggaggggcagcagcccatcagcgtgcccccgagcaccaacagcacggtgtaccggggtctggagggcttcgtggcggccatctcgccctttaacttcactgcaatcggcggcaacctggcgggggcaccggccctgatgcttcgagagggagttgtgactctgcctctttgccagatgacaaaactgagacacacagccgtgacttacttggcaagactgagtgactag

SEQ ID NO: 1583 - DNA, 3074 bp, Homo sapiens
  source 1..3074: mol_type = unassigned DNA
cccgcttctaacccgagatgctgctgccggcgcccgcgctccgccgcgccctgctgtcccgcccctggaccggggccggcctgcggtggaagcacacctcctccctgaaggtggccaacgagcccgtcttagccttcacgcagggcagccctgagcgagatgccctgcaaaaggccttgaaggacctgaagggccggatggaagccatcccatgcgtggtgggggatgaggaggtgtggacgtcggacgtgcagtaccaagtgtcgagcctgctcaacaaagccattgaggctgccctggctgcccggaaagagtgggacctgaagcctattgcagaccgggcccagatcttcctgaaggcggcagacatgctgagtgggccgcgcagggctgagatcctcgccaagaccatggtgggacagggtaagaccgtgatccaagcggagattgacgctgcagcggaactcatcgacttcttccggttcaatgccaagtatgcggtggagctggaggggcagcagcccatcagcgtgcccccgagcaccaacagcacggtgtaccggggtctggagggcttcgtggcggccatctcgccctttaacttcactgcaatcggcggcaacctggcgggggcaccggccctgatgggcaacgtggtcctatggaagcccagtgacactgccatgctggccagctatgctgtctaccgcatccttcgggaggctggcctgccccccaacatcatccagtttgtgccagctgatgggcccctatttggggacactgtcaccagctcagagcacctctgtggcatcaacttcacaggcagtgtgcccaccttcaaacacctgtggaagcaggtggcccagaacctggaccggttccacaccttcccacgcctggctggagagtgcggcggaaagaacttccacttcgtgcaccgctcggccgacgtggagagcgtggtgagcgggaccctccgctcagccttcgagtacggtggccagaagtgttccgcgtgctcgcgtctctacgtgccgcactcgctgtggccgcagatcaaagggcggctgctggaggagcacagtcggatcaaagtgggcgaccctgcagaggattttgggaccttcttctctgcagtgattgatgccaagtcctttgcccgtatcaagaagtggctggagcacgcacgctcctcacccagcctcaccatcctggccgggggcaagtgtgatgactccgtgggctactttgtggagccctgcatcgtggagagcaaggaccctcaggagcccatcatgaaggaggagatcttcgggcctgtactgtctgtgtacgtctacccggatgacaagtacaaggagacgctgcagctggttgacagcaccaccagctatggcctcacgggggcagtgttctcccaggataaggacgtcgtgcaggaggccacaaaggtgctgaggaatgctgccggcaacttctacatcaacgacaagtccactggctcgatagtgggccagcagccctttgggggggcccgagcctctggaaccaatgacaagccagggggcccacactacatcctgcgctggacgtcgccgcaggtcatcaaggagacacataagcccctgggggactggagctacgcgtacatgcagtgagcccctctcgggctccaccgtccagctgtctgtccgtccaggtggccgacctcactgcacagaccccactccagcccctccaccccttcttcatgcacagctgcctttctataatccgggcttgactcccttcttaccactgtattctggcctctcccatgcctcaggctctggtttgagatcgtgctggggaggaacatggccactaccccttatcccatcggccatgtgggaggtatgaccctggtgcctggcaggttctccctctgccctccactgggcccagtggctcagggacctggggaaaggagatggagcagctcttgggatcctttggggaaaaggaggccattctgggccccttggcaaacctcaccactcacagaggctcctggccttgatccctgcccctccaggtgtccagggtaaagtgtaactcagactgacctgtggggcacagggggcaccagctggccttgccctctctggtctgggctgtctaccttcctcactgtatctttgcccagacccacctgggccagtaggcccctgtccccagccacacaccttagatgctggcatgccttactccaggtgcctgtgtttggccgaggcctgtgtgattcccggtctgcaccacatggcggggttggggggccgctggaggccacctgccaaggcgtgggatgggatggtcctgccggtttaggccgtgattctggaaaaccttggatgggccttcgtcctatgtcagccttccctttgatcctcaggccctacctgtagagacctccactcctagagccagtctcagggtctgggatttccctgcaggagctcagccaccactgtgccatggtgacacaggccaaggcagacattggccctcccttctcccagcccccagaggcctggccttgggttcgtcagcatgggccgaggacgttgcctgtagaatcctcctctgcctgggagtggctctgtgtggaccagtccctcactggcccattctttttttgacgcagccaatctgtgaccacgattcctcccacagatgcctcctgcttggattctgagtggtcagagatctgtaaagcatgactttcaaggatggttcttaggggactgtgaaagtgttgggtcttcctccaggatgcctgcatgggaccccacccggagctggtgtggccattccccaagtgccactggcccatggatgggggtgggtgctggtgccagctgggctgggtgtgggttctgtgtccttccaggatatgtgtcatttcccatgaggggccggggcaggtggctgggtgggggcacaggctggagtattcttagttctactggttctacactgtgaggtggcaatgggatttgctcagatgccacccaataaaatgcctgttactt

SEQ ID NO: 1584 - DNA, 3363 bp, Homo sapiens
  source 1..3363: mol_type = unassigned DNA
gggaaaacgcatgcatttcaggacttcgctttcgggttcccttgtcctgtgttgtgtaatgcccccgttatggcactagaaatattttttattagccgaagctaaatatagtgggactttggctgatcccgagctcggaggacagccggggtgatccgtttccccccgaggatcgaggtggtgcgctctggacggggttgtgcattctcgccgcgcccgggcggacgatccagcgaacagccccgcttctaacccgagatgctgctgccggcgcccgcgctccgccgcgccctgctgtcccgcccctggaccggggccggcctgcggtggaagcacacctcctccctgaaggtggccaacgagcccgtcttagccttcacgcagggcagccctgagcgagatgccctgcaaaaggccttgaaggacctgaagggccggatggaagccatcccatgcgtggtgggggatgaggaggtgtggacgtcggacgtgcagtaccaagtgtcgccttttaaccatggacataaggtggccaagttctgttatgcagacaagagcctgctcaacaaagccattgaggctgccctggctgcccggaaagagtgggacctgaagcctattgcagaccgggcccagatcttcctgaaggcggcagacatgctgagtgggccgcgcagggctgagatcctcgccaagaccatggtgggacagggtaagaccgtgatccaagcggagattgacgctgcagcggaactcatcgacttcttccggttcaatgccaagtatgcggtggagctggaggggcagcagcccatcagcgtgcccccgagcaccaacagcacggtgtaccggggtctggagggcttcgtggcggccatctcgccctttaacttcactgcaatcggcggcaacctggcgggggcaccggccctgatgggcaacgtggtcctatggaagcccagtgacactgccatgctggccagctatgctgtctaccgcatccttcgggaggctggcctgccccccaacatcatccagtttgtgccagctgatgggcccctatttggggacactgtcaccagctcagagcacctctgtggcatcaacttcacaggcagtgtgcccaccttcaaacacctgtggaagcaggtggcccagaacctggaccggttccacaccttcccacgcctggctggagagtgcggcggaaagaacttccacttcgtgcaccgctcggccgacgtggagagcgtggtgagcgggaccctccgctcagccttcgagtacggtggccagaagtgttccgcgtgctcgcgtctctacgtgccgcactcgctgtggccgcagatcaaagggcggctgctggaggagcacagtcggatcaaagtgggcgaccctgcagaggattttgggaccttcttctctgcagtgattgatgccaagtcctttgcccgtatcaagaagtggctggagcacgcacgctcctcacccagcctcaccatcctggccgggggcaagtgtgatgactccgtgggctactttgtggagccctgcatcgtggagagcaaggaccctcaggagcccatcatgaaggaggagatcttcgggcctgtactgtctgtgtacgtctacccggatgacaagtacaaggagacgctgcagctggttgacagcaccaccagctatggcctcacgggggcagtgttctcccaggataaggacgtcgtgcaggaggccacaaaggtgctgaggaatgctgccggcaacttctacatcaacgacaagtccactggctcgatagtgggccagcagccctttgggggggcccgagcctctggaaccaatgacaagccagggggcccacactacatcctgcgctggacgtcgccgcaggtcatcaaggagacacataagcccctgggggactggagctacgcgtacatgcagtgagcccctctcgggctccaccgtccagctgtctgtccgtccaggtggccgacctcactgcacagaccccactccagcccctccaccccttcttcatgcacagctgcctttctataatccgggcttgactcccttcttaccactgtattctggcctctcccatgcctcaggctctggtttgagatcgtgctggggaggaacatggccactaccccttatcccatcggccatgtgggaggtatgaccctggtgcctggcaggttctccctctgccctccactgggcccagtggctcagggacctggggaaaggagatggagcagctcttgggatcctttggggaaaaggaggccattctgggccccttggcaaacctcaccactcacagaggctcctggccttgatccctgcccctccaggtgtccagggtaaagtgtaactcagactgacctgtggggcacagggggcaccagctggccttgccctctctggtctgggctgtctaccttcctcactgtatctttgcccagacccacctgggccagtaggcccctgtccccagccacacaccttagatgctggcatgccttactccaggtgcctgtgtttggccgaggcctgtgtgattcccggtctgcaccacatggcggggttggggggccgctggaggccacctgccaaggcgtgggatgggatggtcctgccggtttaggccgtgattctggaaaaccttggatgggccttcgtcctatgtcagccttccctttgatcctcaggccctacctgtagagacctccactcctagagccagtctcagggtctgggatttccctgcaggagctcagccaccactgtgccatggtgacacaggccaaggcagacattggccctcccttctcccagcccccagaggcctggccttgggttcgtcagcatgggccgaggacgttgcctgtagaatcctcctctgcctgggagtggctctgtgtggaccagtccctcactggcccattctttttttgacgcagccaatctgtgaccacgattcctcccacagatgcctcctgcttggattctgagtggtcagagatctgtaaagcatgactttcaaggatggttcttaggggactgtgaaagtgttgggtcttcctccaggatgcctgcatgggaccccacccggagctggtgtggccattccccaagtgccactggcccatggatgggggtgggtgctggtgccagctgggctgggtgtgggttctgtgtccttccaggatatgtgtcatttcccatgaggggccggggcaggtggctgggtgggggcacaggctggagtattcttagttctactggttctacactgtgaggtggcaatgggatttgctcagatgccacccaataaaatgcctgttactt

SEQ ID NO: 1585 - DNA, 844 bp, Homo sapiens
  source 1..844: mol_type = unassigned DNA
aatgcccccgttatggcactagaaatattttttattagccgaagctaaatatagtgggactttggctgatcccgagctcggaggacagccggggtgatccgtttccccccgaggatcgaggtggtgcgctctggacggggttgtgcattctcgccgcgcccgggcggacgatccagcgaacagccccgcttctaacccgagatgctgctgccggcgcccgcgctccgccgcgccctgctgtcccgcccctggaccggggccggcctgcggtggaagcacacctcctccctgaaggtggccaacgagcccgtcttagccttcacgcagggcagccctgagcgagatgccctgcaaaaggccttgaaggacctgaagggccggatggaagccatcccatgcgtggtgggggatgaggaggtgtggacgtcggacgtgcagtaccaagtgtcgagcctgctcaacaaagccattgaggctgccctggctgcccggaaagagtgggacctgaagcctattgcagaccgggcccagatcttcctgaaggcggcagacatgctgagtgggccgcgcagggctgagatcctcgccaagaccatggtgggacagggtaagaccgtgatccaagcggagattgacgctgcagcggaactcatcgacttcttccggttcaatgccaagtatgcggtggagctggaggggcagcagcccatcagcgtgcccccgagcaccaacagcacggtgtaccggggtctggagggcttcgtggcggccatctcgccctttaacttcactgcaatcggcggcaacctggcgggggcaccggccctgatggtgagatgtgggc

SEQ ID NO: 1586 - DNA, 485 bp, Homo sapiens
  source 1..485: mol_type = unassigned DNA
aacaaagccattgaggctgccctggctgcccggaaagagtgggacctgaagcctattgcagaccgggcccagatcttcctgaaggcggcagacatgctgagtgggccgcgcagggctgagatcctcgccaagaccatggtgggacagggtaagaccgtgatccaagcggagattgacgctgcagcggaactcatcgacttcttccggttcaatgccaagtatgcggtggagctggaggggcagcagcccatcagcgtgcccccgagcaccaacagcacggtgtaccggggtctggagggcttcgtggcggccatctcgccctttaacttcactgcaatcggcggcaacctggcgggggcaccggccctgatgcttcgagagggagttgtgactctgcctctttgccagatgacaaaactgagacacacagccgtgacttacttggcaagactgagtgactagtaaataaatgatggagcagagaa

SEQ ID NO: 1587 - DNA, 3241 bp, Homo sapiens
  source 1..3241: mol_type = unassigned DNA
gtgccaaggggatctcagctggttcacattctgagactgtgttctggaatgtgctgccctttcagcttagagagaggagtttgggtctttttgggataaagcctgccttgtgggagaagaaagggagagtaacgctttgcatgtggaaaatacttcaacgtggttttgcatctgtgtgtttaaacttcaaacaaccgccctgcggtggaagcacacctcctccctgaaggtggccaacgagcccgtcttagccttcacgcagggcagccctgagcgagatgccctgcaaaaggccttgaaggacctgaagggccggatggaagccatcccatgcgtggtgggggatgaggaggtgtggacgtcggacgtgcagtaccaagtgtcgccttttaaccatggacataaggtggccaagttctgttatgcagacaagagcctgctcaacaaagccattgaggctgccctggctgcccggaaagagtgggacctgaagcctattgcagaccgggcccagatcttcctgaaggcggcagacatgctgagtgggccgcgcagggctgagatcctcgccaagaccatggtgggacagggtaagaccgtgatccaagcggagattgacgctgcagcggaactcatcgacttcttccggttcaatgccaagtatgcggtggagctggaggggcagcagcccatcagcgtgcccccgagcaccaacagcacggtgtaccggggtctggagggcttcgtggcggccatctcgccctttaacttcactgcaatcggcggcaacctggcgggggcaccggccctgatgggcaacgtggtcctatggaagcccagtgacactgccatgctggccagctatgctgtctaccgcatccttcgggaggctggcctgccccccaacatcatccagtttgtgccagctgatgggcccctatttggggacactgtcaccagctcagagcacctctgtggcatcaacttcacaggcagtgtgcccaccttcaaacacctgtggaagcaggtggcccagaacctggaccggttccacaccttcccacgcctggctggagagtgcggcggaaagaacttccacttcgtgcaccgctcggccgacgtggagagcgtggtgagcgggaccctccgctcagccttcgagtacggtggccagaagtgttccgcgtgctcgcgtctctacgtgccgcactcgctgtggccgcagatcaaagggcggctgctggaggagcacagtcggatcaaagtgggcgaccctgcagaggattttgggaccttcttctctgcagtgattgatgccaagtcctttgcccgtatcaagaagtggctggagcacgcacgctcctcacccagcctcaccatcctggccgggggcaagtgtgatgactccgtgggctactttgtggagccctgcatcgtggagagcaaggaccctcaggagcccatcatgaaggaggagatcttcgggcctgtactgtctgtgtacgtctacccggatgacaagtacaaggagacgctgcagctggttgacagcaccaccagctatggcctcacgggggcagtgttctcccaggataaggacgtcgtgcaggaggccacaaaggtgctgaggaatgctgccggcaacttctacatcaacgacaagtccactggctcgatagtgggccagcagccctttgggggggcccgagcctctggaaccaatgacaagccagggggcccacactacatcctgcgctggacgtcgccgcaggtcatcaaggagacacataagcccctgggggactggagctacgcgtacatgcagtgagcccctctcgggctccaccgtccagctgtctgtccgtccaggtggccgacctcactgcacagaccccactccagcccctccaccccttcttcatgcacagctgcctttctataatccgggcttgactcccttcttaccactgtattctggcctctcccatgcctcaggctctggtttgagatcgtgctggggaggaacatggccactaccccttatcccatcggccatgtgggaggtatgaccctggtgcctggcaggttctccctctgccctccactgggcccagtggctcagggacctggggaaaggagatggagcagctcttgggatcctttggggaaaaggaggccattctgggccccttggcaaacctcaccactcacagaggctcctggccttgatccctgcccctccaggtgtccagggtaaagtgtaactcagactgacctgtggggcacagggggcaccagctggccttgccctctctggtctgggctgtctaccttcctcactgtatctttgcccagacccacctgggccagtaggcccctgtccccagccacacaccttagatgctggcatgccttactccaggtgcctgtgtttggccgaggcctgtgtgattcccggtctgcaccacatggcggggttggggggccgctggaggccacctgccaaggcgtgggatgggatggtcctgccggtttaggccgtgattctggaaaaccttggatgggccttcgtcctatgtcagccttccctttgatcctcaggccctacctgtagagacctccactcctagagccagtctcagggtctgggatttccctgcaggagctcagccaccactgtgccatggtgacacaggccaaggcagacattggccctcccttctcccagcccccagaggcctggccttgggttcgtcagcatgggccgaggacgttgcctgtagaatcctcctctgcctgggagtggctctgtgtggaccagtccctcactggcccattctttttttgacgcagccaatctgtgaccacgattcctcccacagatgcctcctgcttggattctgagtggtcagagatctgtaaagcatgactttcaaggatggttcttaggggactgtgaaagtgttgggtcttcctccaggatgcctgcatgggaccccacccggagctggtgtggccattccccaagtgccactggcccatggatgggggtgggtgctggtgccagctgggctgggtgtgggttctgtgtccttccaggatatgtgtcatttcccatgaggggccggggcaggtggctgggtgggggcacaggctggagtattcttagttctactggttctacactgtgaggtggcaatgggatttgctcagatgccacccaataaaatgcctgttactt

SEQ ID NO: 1588 - DNA, 2957 bp, Homo sapiens
  source 1..2957: mol_type = unassigned DNA
ccgagatgctgctgccggcgcccgcgctccgccgcgccctgctgtcccgcccctggaccggggccggcctgcggtggaagcacacctcctccctgaaggtggccaacgagcccgtcttagccttcacgcagggcagccctgagcgagatgccctgcaaaaggccttgaaggacctgaagggccggatggaagccatcccatgcgtggtgggggatgaggaggtgtggacgtcggacgtgcagtaccaagtgtcgccttttaaccatggacataaggtggccaagttctgttatgcagacaagagcctgctcaacaaagccattgaggctgccctggctgcccggaaagagtgggacctgaagcctattgcagaccgggcccagatcttcctgaaggcggcagacatgctgagtgggccgcgcagggctgagatcctcgccaagaccatggtgggacagggtaagaccgtgatccaagcggagattgacgctgcagcggaactcatcgacttcttccggttcaatgccaagtatgcggtggagctggaggggcagcagcccatcagcgtgcccccgagcaccaacagcacggtgtaccggggtctggagggcttcgtggcggccatctcgccctttaacttcactgcaatcggcggcaacctggcgggggcaccggccctgatgggcaacgtggtcctatggaagcccagtgacactgccatgctggccagctatgctgtctaccgcatccttcgggaggctggcctgccccccaacatcatccagtttgtgccagctgatgggcccctatttggggacactgtcaccagctcagagcacctctgtggcatcaacttcacaggcagtgtgcccaccttcaaacacctgtggaagcaggtggcccagaacctggaccggttccacaccttcccacgcctggctggagagtgcggcggaaagaacttccacttcgtgcaccgctcggccgacgtggagagcgtggtgagcgggaccctccgctcagccttcgagtacggtggccagaagtgttccgcgtgctcgcgtctctacgtgccgcactcgctgtggccgcagatcaaagggcggctgctggaggagcacagtcggatcaaagtgggcgaccctgcagaggattttgggaccttcttctctgcagtgattgatgccaaggagatcttcgggcctgtactgtctgtgtacgtctacccggatgacaagtacaaggagacgctgcagctggttgacagcaccaccagctatggcctcacgggggcagtgttctcccaggataaggacgtcgtgcaggaggccacaaaggtgctgaggaatgctgccggcaacttctacatcaacgacaagtccactggctcgatagtgggccagcagccctttgggggggcccgagcctctggaaccaatgacaagccagggggcccacactacatcctgcgctggacgtcgccgcaggtcatcaaggagacacataagcccctgggggactggagctacgcgtacatgcagtgagcccctctcgggctccaccgtccagctgtctgtccgtccaggtggccgacctcactgcacagaccccactccagcccctccaccccttcttcatgcacagctgcctttctataatccgggcttgactcccttcttaccactgtattctggcctctcccatgcctcaggctctggtttgagatcgtgctggggaggaacatggccactaccccttatcccatcggccatgtgggaggtatgaccctggtgcctggcaggttctccctctgccctccactgggcccagtggctcagggacctggggaaaggagatggagcagctcttgggatcctttggggaaaaggaggccattctgggccccttggcaaacctcaccactcacagaggctcctggccttgatccctgcccctccaggtgtccagggtaaagtgtaactcagactgacctgtggggcacagggggcaccagctggccttgccctctctggtctgggctgtctaccttcctcactgtatctttgcccagacccacctgggccagtaggcccctgtccccagccacacaccttagatgctggcatgccttactccaggtgcctgtgtttggccgaggcctgtgtgattcccggtctgcaccacatggcggggttggggggccgctggaggccacctgccaaggcgtgggatgggatggtcctgccggtttaggccgtgattctggaaaaccttggatgggccttcgtcctatgtcagccttccctttgatcctcaggccctacctgtagagacctccactcctagagccagtctcagggtctgggatttccctgcaggagctcagccaccactgtgccatggtgacacaggccaaggcagacattggccctcccttctcccagcccccagaggcctggccttgggttcgtcagcatgggccgaggacgttgcctgtagaatcctcctctgcctgggagtggctctgtgtggaccagtccctcactggcccattctttttttgacgcagccaatctgtgaccacgattcctcccacagatgcctcctgcttggattctgagtggtcagagatctgtaaagcatgactttcaaggatggttcttaggggactgtgaaagtgttgggtcttcctccaggatgcctgcatgggaccccacccggagctggtgtggccattccccaagtgccactggcccatggatgggggtgggtgctggtgccagctgggctgggtgtgggttctgtgtccttccaggatatgtgtcatttcccatgaggggccggggcaggtggctgggtgggggcacaggctggagtattcttagttctactggttctacactgtgaggtggcaatgggatttgctcagatgccacccaataaaatgcctgttactt

SEQ ID NO: 1589 - DNA, 2266 bp, Homo sapiens
  source 1..2266: mol_type = unassigned DNA
gtttcctgtcgccgtcgttgcccgggccatggcgacctgcatttggctgcggagctgtggggcccggcgcctcgggtcgacgtttccaggctgccgcctccgcccccgcgccggcggcctggtccctgcctccgggcctgcgcccggcccggcccagctccgctgctacgctgggcgcctggcgggcctctctgcggcgctgctgcgcaccgacagcttcgtgggcggccgctggctcccggccgccgccaccttccccgtgcaagacccggccagcggcgccgctctgggcatggtagccgactgcggggtgcgagaggcccgcgccgccgtgcgcgctgcctacgaggctttctgccgctggagggaggtctccgccaaggagaggagttcattacttcggaagtggtacaatttaatgatacaaaataaggatgaccttgccagaataatcacagctgaaagtggaaagccactgaaggaggcacatggagaaattctctattccgcctttttcctagagtggttctctgaggaagcccgccgtgtttacggagacattatccacaccccggcaaaggacaggcgggccctggtcctcaagcagcccataggcgtggctgcagtcatcaccccgtggaatttccccagtgccatgatcacccggaaggtgggggccgccctggcagccggctgtactgtcgtggtgaagcctgccgaagacacgcccttctccgccctggccctggctgaggtaaatcagggatttcttcttgatttggatccattgttgcttgcaagccaggctgggattccttcaggtgtatacaatgttattccctgttctcgaaagaatgccaaggaagtaggggaggcaatttgtactgatcctctggtgtccaaaatttcctttactggttcaacaactacaggaaagatcctgttgcaccacgcagcaaactctgtgaaaagggtctctatggagctgggcggccttgctccatttatagtatttgacagtgccaacgtggaccaggctgtagcaggggccatggcatctaaatttaggaacactggacagacttgtgtttgctcaaaccaattcttggtgcaaaggggcatccatgatgcctttgtaaaagcattcgccgaggccatgaagaagaacctgcgcgtaggtaatggatttgaggaaggaactactcagggcccattaattaatgaaaaagcggtagaaaaggtggagaaacaggtgaatgatgccgtttctaaaggtgccaccgttgtgacaggtggaaaacgacaccaacttggaaaaaatttctttgagcctaccctgctgtgcaatgtcacccaggacatgctgtgcactcatgaagagactttcgggcctctggcaccagttatcaagttcgatacagaggaggaggctatagcaatcgctaacgcagctgatgttgggttagcaggttatttttactctcaagacccagcccagatctggagagtggcagagcagctggaagtgggcatggttggcgtcaacgaaggattaatttcctctgtggagtgcccttttggtggagtgaagcagtccggccttgggcgagaggggtccaagtatggcattgatgagtatctggaactcaagtatgtgtgttacgggggcttgtaggattctttggttctttaaaaaaatttaaaaggagacttatctacatatataggtacatgccatccattattttaaataaactaataggttttcagaattatgaatttttcagaactcatccagtccttgtaatcttaaacagatgcaaatcctacccctgcccttaatgtaactagggaccaatatgtgccacgtgcctgtggctgcagactcccagagaaccagcactgggtttacagaatgaggccctggctccccaccacagccccagctgcctcagagcaggcacagcacaaggcaggcccagccccatgggccgtcacaaaggcttgatcactgcctgggcagtggcacaaccatcccccatgtcgctacagaacatgggcccagagcaccttgaaggagacccttgactgtgactggcaggcaggtgaggggcacagcacccctccccggcatctgccagctcagcacagaagacaccgaatgtgcatctggaggtgttgcggcagaggtttgagtgaaccctctttcaaagacaataaatagcacagaattgtccgtgcttctgtgaggcacgaaggagcacct

SEQ ID NO: 1590 - DNA, 5248 bp, Homo sapiens
  source 1..5248: mol_type = unassigned DNA
tgtggctctgcaaccttccgccagctcccacgctttccccgcgcgtccccggcgcctcctcgctcctcttgcttccccgcgacccctgcgttcccgtgcgcgcgcgcccgcttgcctgtttcctgtcgccgtcgttgcccgggccatggcgacctgcatttggctgcggagctgtggggcccggcgcctcgggtcgacgtttccaggctgccgcctccgcccccgcgccggcggcctggtccctgcctccgggcctgcgcccggcccggcccagctccgctgctacgctgggcgcctggcgggcctctctgcggcgctgctgcgcaccgacagcttcgtgggcggccgctggctcccggccgccgccaccttccccgtgcaagacccggccagcggcgccgctctgggcatggtagccgactgcggggtgcgagaggcccgcgccgccgtgcgcgctgcctacgaggctttctgccgctggagggaggtctccgccaaggagaggagttcattacttcggaagtggtacaatttaatgatacaaaataaggatgaccttgccagaataatcacagctgaaagtggaaagccactgaaggaggcacatggagaaattctctattccgcctttttcctagagtggttctctgaggaagcccgccgtgtttacggagacattatccacaccccggcaaaggacaggcgggccctggtcctcaagcagcccataggcgtggctgcagtcatcaccccgtggaatttccccagtgccatgatcacccggaaggtgggggccgccctggcagccggctgtactgtcgtggtgaagcctgccgaagacacgcccttctccgccctggccctggctgagcttgcaagccaggctgggattccttcaggtgtatacaatgttattccctgttctcgaaagaatgccaaggaagtaggggaggcaatttgtactgatcctctggtgtccaaaatttcctttactggttcaacaactacaggaaagatcctgttgcaccacgcagcaaactctgtgaaaagggtctctatggagctgggcggccttgctccatttatagtatttgacagtgccaacgtggaccaggctgtagcaggggccatggcatctaaatttaggaacactggacagacttgtgtttgctcaaaccaattcttggtgcaaaggggcatccatgatgcctttgtaaaagcattcgccgaggccatgaagaagaacctgcgcgtaggtaatggatttgaggaaggaactactcagggcccattaattaatgaaaaagcggtagaaaaggtggagaaacaggtgaatgatgccgtttctaaaggtgccaccgttgtgacaggtggaaaacgacaccaacttggaaaaaatttctttgagcctaccctgctgtgcaatgtcacccaggacatgctgtgcactcatgaagagactttcgggcctctggcaccagttatcaagttcgatacagaggaggaggctatagcaatcgctaacgcagctgatgttgggttagcaggttatttttactctcaagacccagcccagatctggagagtggcagagcagctggaagtgggcatggttggcgtcaacgaaggattaatttcctctgtggagtgcccttttggtggagtgaagcagtccggccttgggcgagaggggtccaagtatggcattgatgagtatctggaactcaagtatgtgtgttacgggggcttgtaggattctttggttctttaaaaaaatttaaaaggagacttatctacatatataggtacatgccatccattattttaaataaactaataggttttcagaattatgaatttttcagaactcatccagtccttgtaatcttaaacagatgcaaatcctacccctgcccttaatgtaactagggaccaatatgtgccacgtgcctgtggctgcagactcccagagaaccagcactgggtttacagaatgaggccctggctccccaccacagccccagctgcctcagagcaggcacagcacaaggcaggcccagccccatgggccgtcacaaaggcttgatcactgcctgggcagtggcacaaccatcccccatgtcgctacagaacatgggcccagagcaccttgaaggagacccttgactgtgactggcaggcaggtgaggggcacagcacccctccccggcatctgccagctcagcacagaagacaccgaatgtgcatctggaggtgttgcggcagaggtttgagtgaaccctctttcaaagacaataaatagcacagaattgtccgtgcttctgtgaggcacgaaggagcacctctccctattcctgaaccatattttaattgatgcctttattgtcccaaatttaccacttaaagaattctattttcatttctgtcctgtttgccacttcatttcatttccttgagtaaatgagctgaagtgtaaagcaaagaatagcagaagcagcttggtaggatggaaggcacgcagtggcatggcctggctccttccctgagtggccttgttgccttgggcgtgtgttcagcacctcccatcccatggatacagtggagattccatacaggccttacttagctccttgcgatactgtgagccagagagaaagtaaaagcacttcacaaaaaaatgaaaattctaaggacatacaagagccattgttacgagcagcaccgcccagcccttccttgcctactgtcagtggctttgccaagatgggaggaggccagtgcccacttgcccaccgacctgagcctgagtaagtggctgtcacctgagcctgttctttctgtcctggtgtggtgctgctccctcacctccaaaagagcaaaagtactttcaccacagtcaacccaaaagggaaagaatttctgtaattgccaacccactttgtagaagaggcatgagcccttgaatttcaggcaccttttatctaatgagagtttttacagctcatcattcaaataacgcacaaaaaacaaaagccgctatgaccggcgttgcctctcactttgaaagaaagactccgtaatcttaaacagatgcaaatccaattaggcggccaagtaggtggagacgaagcaccttcctttccccatctctgtctgtgtagactccacttacatcttgtggttattctgggttgtggaaggaaaatgtgaatgaaagtagtgctggatgcaattactcctgaaccccacctaggatttaacatccctcattgagccactgggaagctatggttgagtaactaaaggtctggcaagaccctgggcacacagggagctgcctagcatctggcctggagtgtactagccacattcccaaggtcccaaggagaaggaagagctgaaattcatctcctagtgacagtgccccggccctgtcaagaatcacatactcagcattttgacagttaatgtcttctctttatttgtgtagtttttaggtggttttatataacattttaattacttgtgatttagatgtatccatcctttttctattaagaatacaaatgctgggctgggcacagtggctcacgcctgtaatcccaacaccttgggaggccaaggcaggcagatcacgacatcaggagatcgagaccatcctggctaacacggtgaaaccccgtctctactaaaaatacaaaaaaaattagtcggatgtggtggcaggtgcctgtagtcccagctactctggaggctgaggcaggagaatggcgtgaacccaggaggcggagcttgcagtgagcagagatcacgccactgcactccagcctggatgacagagcgagactccgcctcaaaaaaagaatacaaatgctccaacattattttttataactctggattaccgatgctgagatgtgtgcaggaatacttccaaataaatttttaacattgtaagccagtagattctttggctgggtggcaaattttgagtcttcttgcatatttggctcatgggttcataaattgaggccagagactcattgtatatccttgatcaattttctaattaaaggaaatagcttattgtttagtaaaatggcccttggttgtgggaagaaagagaattatttttaactgaacgtttttgttgttttttaaataaagtagccatatgtaacgggattttaaaaatatatacattttacaacatggactagaaaaggaccattagatcaggggttggcaaactatggcccacgaatcaaacctggcctgccacctgtttttatacaacctgtgagctaagaatggtttatatgttttcaaatgattgggcagaaaatcaaaagaagaacaatatttcatgacacctgaaaattctatgaaattcagatttcagtgtccataaacaaaatgttattagagcatagccacacccattcatttatggtattgtctgggactgctttcttggcagagttgaatagttgggacagggacagtatagcctgcaaagcctaaaagatttactacttgtctccttaaagaaaaagtttgccagctcctgatctagaccaagagggagatattgaccttacttgcatttatccggcattatttcaacacctcctgtgaagaaagtacttttctggcatagctaccgtgagttctcagcaggaacttcccagcgatgataatgtacatgaaattagccacgtaacaagagtctatttgccttgaaaaaacaattatccttgaacttcctccagctatgcagggattctcattaaagagctgatctgcatctgtttatccattttagtagcttttaaatatgattttatgtgaagtgccatttctttattctactaaagagagacagcagaaataaagatcagaagcaaatgtgagcaaatctgttttactgttaacttcaattatgaacttgaaattgtgccacatgactttttcctctaaaaactggatcctagtgttttaattacctgtgtgcagctattttaaatagcattttacttgaataatatgtatgttgtcattgtttcatgctatactttgtgggataaaacttgggaatgagtgtggtaagaaatttataaagttttgcttttaaaacgtggacataactcatttttctagtttttgacaattgtgtgttttagtgtctagtctgcagagagctgtgtgattaataaacgtggaattaacagaatttcctctccctgta

SEQ ID NO: 1591 - DNA, 1945 bp, Homo sapiens
  source 1..1945: mol_type = unassigned DNA
tgtggctctgcaaccttccgccagctcccacgctttccccgcgcgtccccgcggcgccgctctgggcatggtagccgactgcggggtgcgagaggcccgcgccgccgtgcgcgctgcctacgaggctttctgccgctggagggaggtctccgccaaggagaggagttcattacttcggaagtggtacaatttaatgatacaaaataaggatgaccttgccagaataatcacagctgaaagtggaaagccactgaaggaggcacatggagaaattctctattccgcctttttcctagagtggttctctgaggaagcccgccgtgtttacggagacattatccacaccccggcaaaggacaggcgggccctggtcctcaagcagcccataggcgtggctgcagtcatcaccccgtggaatttccccagtgccatgatcacccggaaggtgggggccgccctggcagccggctgtactgtcgtggtgaagcctgccgaagacacgcccttctccgccctggccctggctgagcttgcaagccaggctgggattccttcaggtgtatacaatgttattccctgttctcgaaagaatgccaaggaagtaggggaggcaatttgtactgatcctctggtgtccaaaatttcctttactggttcaacaactacaggaaagatcctgttgcaccacgcagcaaactctgtgaaaagggtctctatggagctgggcggccttgctccatttatagtatttgacagtgccaacgtggaccaggctgtagcaggggccatggcatctaaatttaggaacactggacagacttgtgtttgctcaaaccaattcttggtgcaaaggggcatccatgatgcctttgtaaaagcattcgccgaggccatgaagaagaacctgcgcgtaggtaatggatttgaggaaggaactactcagggcccattaattaatgaaaaagcggtagaaaaggtggagaaacaggtgaatgatgccgtttctaaaggtgccaccgttgtgacaggtggaaaacgacaccaacttggaaaaaatttctttgagcctaccctgctgtgcaatgtcacccaggacatgctgtgcactcatgaagagactttcgggcctctggcaccagttatcaagttcgatacagaggaggaggctatagcaatcgctaacgcagctgatgttgggttagcaggttatttttactctcaagacccagcccagatctggagagtggcagagcagctggaagtgggcatggttggcgtcaacgaaggattaatttcctctgtggagtgcccttttggtggagtgaagcagtccggccttgggcgagaggggtccaagtatggcattgatgagtatctggaactcaagtatgtgtgttacgggggcttgtaggattctttggttctttaaaaaaatttaaaaggagacttatctacatatataggtacatgccatccattattttaaataaactaataggttttcagaattatgaatttttcagaactcatccagtccttgtaatcttaaacagatgcaaatcctacccctgcccttaatgtaactagggaccaatatgtgccacgtgcctgtggctgcagactcccagagaaccagcactgggtttacagaatgaggccctggctccccaccacagccccagctgcctcagagcaggcacagcacaaggcaggcccagccccatgggccgtcacaaaggcttgatcactgcctgggcagtggcacaaccatcccccatgtcgctacagaacatgggcccagagcaccttgaaggagacccttgactgtgactggcaggcaggtgaggggcacagcacccctccccggcatctgccagctcagcacagaagacaccgaatgtgcatctggaggtgttgcggcagaggtttgagtgaaccctctttc

SEQ ID NO: 1592 - DNA, 5499 bp, Homo sapiens
  source 1..5499: mol_type = unassigned DNA
ccaatgaggaagcctggcaggatggagggcgaggcctggcagctgtagtgcttctgggcagtagaggcgcggggtgcggagctagggcggccgagagccatggcggcgctattggcggcggcggcagtgcgagcccggatcctgcaggtttcttccaaggtgaaatccagtcccacctggtattcagcatcttccttctcttcttcagtgccaactgtaaagctcttcattggtgggaaattcgttgaatccaaaagtgacaaatggatcgatatccacaacccagccaccaatgaggtcattggtcgggtccctcaggccaccaaggcagaaatggatgcagccattgcttcctgcaaacgtgcttttcctgcatgggcagacacttcagtattaagccgccagcaggtcttgctccgctatcaacaacttattaaagaaaacttgaaagaaattgccaagttaatcacattggaacaagggaagaccctagctgatgctgaaggagatgtatttcgaggccttcaggtggttgagcatgcctgtagtgtgacatccctcatgatgggagagaccatgccatccatcaccaaagacatggacctttattcctaccgtctgcctctgggagtgtgtgcaggcattgctccattcaattttcctgccatgatccccctttggatgtttcccatggccatggtgtgtggaaataccttcctaatgaaaccatctgagcgagtccctggagcaactatgcttcttgctaagttgctccaggattctggtgcccctgatggaacattaaacatcatccatggacagcatgaagctgtaaattttatttgcgatcatccggacatcaaagcaatcagctttgtgggatccaacaaggcaggagagtatatcttcgagagaggatcaagacatggcaagagggttcaagccaatatgggagccaagaaccatggggtagtcatgccagatgccaataaggaaaataccctgaaccagctggttggggcagcatttggagctgctggtcagcgctgcatggctctttcaacagcagtccttgtgggagaagccaagaagtggctgccagagctggtggagcatgccaaaaacctgagagtcaatgcaggagatcagcctggagctgatcttggccctctgatcactccccaggccaaagagcgagtctgtaatctgattgatagtggaacaaaggagggagcttccatccttcttgatggacgaaaaattaaagtgaaaggctatgaaaatggcaactttgttggaccaaccatcatctcgaatgtcaagccaaatatgacctgttacaaagaggagatttttggtccagttcttgtggttctggagacagaaacattggatgaagccatccagattgtaaataacaacccatatggaaatggaactgccatcttcaccaccaatggagccactgctcggaaatatgcccacttggtggatgttggacaggtgggagtgaatgtccccattccagtgcctttgccaatgttctcattcaccggctctcgatcctccttcaggggagacaccaatttctatggcaaacagggcatccaattctacactcagttaaagaccattacttctcagtggaaagaagaagatgctactctttcctcacctgctgttgtcatgcctaccatgggccgttagaaacaagtttgtttaagactgactccatcctgagtaatctccctttatttttgaccagcttcatttgtcagctttgctcagatcagatcgatgggattggaatacattgtaactaaaatcttcctcaggactattaacccccgcaaagtttctatagggaactgcctagtgtaacaatgaaaccagatttctcacttgctcttcatacttctattttgaggtaactgttgtaactatgaaatgcttatctgaaagtagtgcttaaacctgatttctaaaaattatcccattttctgatgatttgaaggggagaaaagccagtgtatgtaaagaaaatgttccagccaggcgcggtggctcacgcctgtaattccatcattttgggaggccacagtgggcagattgcttgagcccaggagttgaagaacgtggcgaaaccccgtatctattatttaaaaaaattgaaaaagtaaaaaaagaaaagggaaaaaaaattttttaaagaagatgttccaataattgcaagaagaactcttagatggggaaacaggacagaaataactcaccgcttttggttgatcctcaaacatagcgctacctaaatgccactgggagagacctcctgcaaagttttctttagcccctcttttatcccacaatacacaagatataatccatttttatatatcccaaagttgtggcaacagcttctttcttttctgctcaatgccactttgtttcctagtaattcatgaccactattaattctatcattgtcactgctcctgcttaagatcacttctcaaggatacctcagtaagcaatggataaatcaactttttgttatatgtgccaagtactaagtttcagggttctcttcagcaatcattaattaatacttcagccattaattcagatgcaaataattttcttttttcttttttttgagatggagtttcactcttgttgcccaggctggagtgcaatggcgtgatctcagctcaccgcaacctccgcctcccaggttcaagcgattctcctgcctcagcccccctagtagctgggattacaggcatgcgccaccacacccagctaattttgtatttttagtagagacggggtttctccgtgttggtcaggctggtctcgaactcctgacctcaggtgatccgcctgcctcggcctcccaaagtgctgggattacaggcatgagccaccacacccagccagatgcaaataattttcttagaaaattatttcaaaagttattttaggcccagaaatcaaggattgttccaaccatgaaaatgggtaagacacctgccttaagcaaatctaacctgctattacttgccaaattttatatattcttttctcttgcctgtatttctaattagtgatttgtttaatgaagaactcttcatgtagagcaattaactgggcctaagaaatttcgaagctttccatgacataaagtggttaaaaaaaaatgctttgacagtcttcttctgccattagttcaactgcctttacgcttttttttttttttttttttttgagatggagtttcactcttgttgcccaggctagagtgcaatggcgtgatcttggctcactgcaacctctgcctcccgggttcaagcaattctcctgcctcagcctcctgagtagctgggatttcaggcatacgccaccatgcctggctaattttgtatttttagtagagacagggtttctccatgttggtcaggctggtctcgaactcccgacctcaggtgatctgcctgccttggcctcccaaagtgctgggattacaggtgtgagccaccacccccagccgcctctatgctttttgtttctttgatatatctaaacttaaggtcagaacagaaattcatgtgctgaacagaatggattctttttgcagtaccaatccaattgaatcctctttttattttcctgcgtccttaccagtcactttgatagtgctaactaacctacactatgggggttattcatgaattaagtatgataaaaaaaaaaaagaccttgaaaatgttgtgtaccctgtggatttgaggcttattactaccacctggctggataaaatgtcaaaaccttcaatcacttaaggtgactggaacttttgtaaaatacacttatgatcctactgggccttttttttttttttttctgctttcctaaatatgaggcaatagaaatttataatttgagactacagtaccccttgttttagctcttatcacagctggcaactggtagtgattttttttgttgttgttttgttttgttttgagatggagtctcgctctgttgcccagggtggagtgcagtggcacgatctcggctcactgcaacctccacctcctgggttcaagtaattctcctgcctcagtctcccgagtagctgggattacaggtgcatgcccccacacccggataattttttgtacttttagtagagacagggtttcaccatgttagccaggatggtctcaatctcctgacctaatgatccgcccacctcggcctcccaaagtgctgggattacaggcgtgaaccaccgcacctggccctggtagtgatatttaatccaatccaacaactataggctgggttaaataaaaggtcattattgtctatattccaagtggaattaaatgtagtcacagagattcctaacattttccttatatttaagggaaatcacttctaaaaaaacacactaatcagaactgtgatgctctaattagaaacaactcatctggccaactatttgctgctcagagtttcttatttcttagatgaaaaaaactcatcagttatattcatgtgatcgcggctaaaaagtcagtattttctttttgttctaatgtggcttcatttgaaatttctcagattctacattgtactaattatgaataacaaattataaattaaaaactcttaaagagaaaaacttggcttaaaaaaatcatttcatatctccttataagcctttgtcctctaggttgtaatgactctgacttcccacctgtgatggaaagctaagagtcacaaggtcactatgtttactcttacgtaaaagatagtacacattttggctaggctgtttacttcaaaaggcaacctataggtttctacacaaaaagaggcacacatttgcatttgcattagtataatatgcatttgtacggatattgctttaaaaatttatgtaatctactaatgctatttattactcattccactgatccctgaagtctctcaactagtagagaaaataaccgtgatttagcaagaagcgacatggggaagggtgacaacaatatacattgtttgattagatacagactccttactgtgtcagactcctgaggttcttttggaatagtgggtagcaccacttcaccagaagagtctgatattgcaatttgctgggtgatgaagattttatcttgaagcttactttcatccctgcaataatgacaaaataacagaaccgtcaacaactctacacacatgaaacctggtttagaataacagacttgtcatattactttcaattagcacattcaagatgcccacaagaaccatcgtgttgggctcatgtttattacttaagcaagagagctcttacccaaattcctttgtttccccactgtcagaaacaacatagtctggaactggaggcctagaactctggttgtatttcctgtagtgggtaaaagtcaacaaagataatgaatgaggcagtgtctcctcatgcct

SEQ ID NO: 1593 - DNA, 4964 bp, Homo sapiens
  source 1..4964: mol_type = unassigned DNA
accagatggcagcagcccactcctccctgtagcactcccattgttccaggcaggattcagccgcaggctcctccggaagaccaggggcagacggggcggtggcggggtcgtgcccagtgggaggggtcgggtctgcccaatgggttctcccgggcggggggcggggctctatttcagcagctctcagggccttgggctcatcccgagtcccgggctcagtatgtggcgccttcctcgcgcgctgtgtgtgcacgctgcaaagaccagcaagctctctggaccttggagcaggcctgccgccttcatgtccactctcctcatcaatcagccccagtatgcgtggctgaaagagctggggctccgcgaggaaaacgagggcgtgtataatggaagctggggaggccggggagaggttattacgacctattgccctgctaacaacgagccaatagcaagagtccgacaggccagtgtggcagactatgaagaaactgtaaagaaagcaagagaagcatggaaaatctgggcagatattcctgctccaaaacgaggagaaatagtaagacagattggcgatgccttgcgggagaagatccaagtactaggaagcttggtgtctttggagatggggaaaatcttagtggaaggtgtgggtgaagttcaggagtatgtggatatctgtgactatgctgttggtttatcaaggatgattggaggacctatcttgccttctgaaagatctggccatgcactgattgagcagtggaatcccgtaggcctggttggaatcatcacggcattcaatttccctgtggcagtgtatggttggaacaacgccatcgccatgatctgtggaaatgtctgcctctggaaaggagctccaaccacttccctcattagtgtggctgtcacaaagataatagccaaggttctggaggacaacaagctgcctggtgcaatttgttccttgacttgtggtggagcagatattggcacagcaatggccaaagatgaacgagtgaacctgctgtccttcactgggagcactcaggtgggaaaacaggtgggcctgatggtgcaggagaggtttgggagaagtctgttggaacttggaggaaacaatgccattattgcctttgaagatgcagacctcagcttagttgttccatcagctctcttcgctgctgtgggaacagctggccagaggtgtaccactgcgaggcgactgtttatacatgaaagcatccatgatgaggttgtaaacagacttaaaaaggcctatgcacagatccgagttgggaacccatgggaccctaatgttctctatgggccactccacaccaagcaggcagtgagcatgtttcttggagcagtggaagaagcaaagaaagaaggtggcacagtggtctatgggggcaaggttatggatcgccctggaaattatgtagaaccgacaattgtgacaggtcttggccacgatgcgtccattgcacacacagagacttttgctccgattctctatgtctttaaattcaagaatgaagaagaggtctttgcatggaataatgaagtaaaacagggactttcaagtagcatctttaccaaagatctgggcagaatctttcgctggcttggacctaaaggatcagactgtggcattgtaaatgtcaacattccaacaagtggggctgagattggaggtgcctttggaggagaaaagcacactggtggtggcagggagtctggcagtgatgcctggaaacagtacatgagaaggtctacttgtactatcaactacagtaaagaccttcctctggcccaaggaatcaagtttcagtaaaggtgttttagatgaacatcccttaatttgaggtgttccagcagctgtttttggagaagacaaagaaaattaaagttttccctgaataaatgcattattatgactgtgacagtgactaatccccctatgaccccaaagccctgattaaatcaagagattccttttttaaaaatcaaaataaaattgttacaacatagccatagttactaaaagatgagttaggtggatttttattatgtcaactagttgtacatggctttttaaaagttaatgattattttgtaattagaaaaaaatagtacgtaccagggtaggaatttgggaaaatacagaaccgaggagaaaacagaagtctttgcagtagatacagggtgtctcctgaccaagtgaaggattcaggggcggggggtgaatattgcttgacattacccacctatggcatgtgttggatgtcgtgtgattgaaagggggatgcattcccctgtatgcttggaccacagttcagtattcatgtggaataacttgcagtgcttaaaatgacaacaggcattcatcacagttatggctcttgcttatgaaggctgtgtcaacttggaagagatttctggggtagacagattttgttcctgtgctggagtctgccacctgctggaggactctgaggccaaaattgcccgtgcagagttgtatagaaaatgcgtctggaggctgggcaaggtggcttacgcctataatcccagcactttgagaggccgaggcgggtggatcagtagaggctaggagtttgagaccagcctggccgatatcgtgaaaccccgtctttaccaaaaaatacaaaaattagcccagtgtggtggcaggcacctgtaatcccagctattagggaggctgaggcaggagaattgtgtgaacccaggaggcagaggttgcagtgagcctagattgtgccactgcctgggcaacagtgagatcctgtctacaaaaaaaaaaaaaaaaaaaagtgcatctggatttttttatacaaccttagaccaccttctttagctttaggcgtctgcggttgcccttggatctgttctcaatcctcagtgtgtgtggcagcatgtggtcatagagagctgggcaaagttcactttctctttgctgacagtctcaccttttctcactgggaagctgcacaggagcctttgggctggttcagcccagaggcccctgttctcctgccttcctggcattctctgctccccttctgcatggcacccctctactcctgccaggttagaatggagcagaggcctttgaacaagatgacatttgtagacaacctgatccatcaggatgtggagagatctggacaaatggcaaataatttggggttgaattatggcccagagaagtaagcaaatgaaaaactaaacaattataaatgtatctgggaagcaaaggtattcataatatgtcccatggccagctgcgagcagtatttaactagacatgctgttgtcaatattgaacatgaatcaagccaaatactgatatagctattgagagaaggttggcaggaagaaatcatgggtgagggtatgtgggagtgataatcttagctatagattttaggtaaaactgattctgaaagctttctttgaaacaaatttataatttttcttctacatgtttctagcacaaggactcaattttttttggttataatgttcattaaaacatatgccttcaatttgttcctctttgttcttttttgctgatttagcagatataaatcacttgttagtatttttaactatccaagttaaaatgtacatttgtaagtgttattactggtcttatatttgaaggtgcaaggggtcttgtgctgctcattactggttatcttgagcatttcataactgctgcctcctcctaaatcctgtgttccaaccgctactgctggcaatgcccagcctccattgtggatgcggggaattgtgttcagcatgcttgcttctgccacggcactaaagcctaacttgcttaggatcttgctgtacttggagagagcatccattcgctgagcctagcagccaggctcttgtgactccctgggaagtgggtgaagacctggctcctggctgcagcagtgaggaggcaggccctccaggtgaagacttctcacaatggagggaaggcagttttctcaaaggaaattgagtgctattatgtactctgcttcctactttctctttcagggtgggaatctgttaagcctcctctctctcttgctctgcaaccacagaacacttctttttttttggtgtctcagttttgcccacactggagtgcagtggtgcaatagtggctcactgcagcctccaactcctgggctcaatctatccttccacctcatgctccccagtagctgggactacaggtgcatgccactgtgcccagctgattattatttttttttgtaaagattgggtcatactacattgctcatgctcgtcttgaacttgtggcctcaagcgatcctcctgcctcagcctcttgagttgttgggattacaggagtgtgccaccatgcccagctctgtggaaaattctctgtggcattctgtctcctgaaaatgctgaagggaccaagagggctctgtgtccttcctcttctcttccctggcactttcagaccattttcttgttgccttcattctaacaaaggttgcagattggaaagctgatttggaatgctttttaagtgttttcagtttcaatatttttatgaaattcctatggtctccaacaaacttttttttttttttttttttctacacctggagcttatcctgcagaagcttcctgccaatgattgttttggaggaaattaaaagaaaaccaaacgaaacctctcctatccaaggggaagaactttatccccatattgattgaatataggattctagatttaaaatgttgtaggcagttagagtttgctctttttttttttctattggaaaggtccacaaatgttttattgacatttttgtctttaatccatttggatttggggtacatgttacgatttgtctacgttaatttcccttttaaaaataaaaataattcctcaactccaa

SEQ ID NO: 1594 - DNA, 1252 bp, Homo sapiens
  source 1..1252: mol_type = unassigned DNA
atgtggcgccttcctcgcgcgctgtgtgtgcacgctgcaaagaccagcaagctctctggaccttggagcaggcctgccgccttcatgtccacttccctcattagtgtggctgtcacaaagataatagccaaggttctggaggacaacaagctgcctggtgcaatttgttccttgacttgtggtggagcagatattggcacagcaatggccaaagatgaacgagtgaacctgctgtccttcactgggagcactcaggtgggaaaacaggtgggcctgatggtgcaggagaggtttgggagaagtctgttggaacttggaggaaacaatgccattattgcctttgaagatgcagacctcagcttagttgttccatcagctctcttcgctgctgtgggaacagctggccagaggtgtaccactgcgaggcgactgtttatacatgaaagcatccatgatgaggttgtaaacagacttaaaaaggcctatgcacagatccgagttgggaacccatgggaccctaatgttctctatgggccactccacaccaagcaggcagtgagcatgtttcttggagcagtggaagaagcaaagaaagaaggtggcacagtggtctatgggggcaaggttatggatcgccctggaaattatgtagaaccgacaattgtgacaggtcttggccacgatgcgtccattgcacacacagagacttttgctccgattctctatgtctttaaattcaagaatgaagaagaggtctttgcatggaataatgaagtaaaacagggactttcaagtagcatctttaccaaagatctgggcagaatctttcgctggcttggacctaaaggatcagactgtggcattgtaaatgtcaacattccaacaagtggggctgagattggaggtgcctttggaggagaaaagcacactggtggtggcagggagtctggcagtgatgcctggaaacagtacatgagaaggtctacttgtactatcaactacagtaaagaccttcctctggcccaaggaatcaagtttcagtaaaggtgttttagatgaacatcccttaatttgaggtgttccagcagctgtttttggagaagacaaagaaaattaaagttttccctgaataaatgcattattatgactgtgacagtgactaatccccctatgaccccaaagccctgattaaatcaagagattccttttttaaaaatcaaaataaaattgttacaacatagccatagttact

SEQ ID NO: 1595 - DNA, 1935 bp, Homo sapiens
  source 1..1935: mol_type = unassigned DNA
aggggcagacggggcggtggcggggtcgtgcccagtgggaggggtcgggtctgcccaatgggttctcccgggcggggggcggggctctatttcagcagctctcagggccttgggctcatcccgagtcccgggctcagtatgtggcgccttcctcgcgcgctgtgtgtgcacgctgcaaagaccagcaagctctctggaccttggagcaggcctgccgccttcatgtccactctcctcatcaatcagccccagtatgcgtggctgaaagagctggggctccgcgaggaaaacgagggcgtgtataatggaagctggggaggccggggagaggttattacgacctattgccctgctaacaacgagccaatagcaagagtccgacaggccagtgtggcagactatgaagaaactgtaaagaaagcaagagaagcatggaaaatctgggcagatattcctgctccaaaacgaggagaaatagtaagacagattggcgatgccttgcgggagaagatccaagtactaggaagcttggtgtctttggagatggggaaaatcttagtggaaggtgtgggtgaagttcaggagtatgtggatatctgtgactatgctgttggtttatcaaggatgattggaggacctatcttgccttctgaaagatctggccatgcactgattgagcagtggaatcccgtaggcctggttggaatcatcacggcattcaatttccctgtggcagtgtatggttggaacaacgccatcgccatgatctgtggaaatgtctgcctctggaaaggagctccaaccacttccctcattagtgtggctgtcacaaagataatagccaaggttctggaggacaacaagctgcctggtgcaatttgttccttgacttgtggtggagcagatattggcacagcaatggccaaagatgaacgagtgaacctgctgtccttcactgggagcactcaggtgggaaaacaggtgggcctgatggtgcaggagaggtttgggagaagtctgttggaacttggaggaaacaatgccattattgcctttgaagatgcagacctcagcttagttgttccatcagctctcttcgctgctgtgggaacagctggccagaggtgtaccactgcgaggcgactggttatggatcgccctggaaattatgtagaaccgacaattgtgacaggtcttggccacgatgcgtccattgcacacacagagacttttgctccgattctctatgtctttaaattcaagaatgaagaagaggtctttgcatggaataatgaagtaaaacagggactttcaagtagcatctttaccaaagatctgggcagaatctttcgctggcttggacctaaaggatcagactgtggcattgtaaatgtcaacattccaacaagtggggctgagattggaggtgcctttggaggagaaaagcacactggtggtggcagggagtctggcagtgatgcctggaaacagtacatgagaaggtctacttgtactatcaactacagtaaagaccttcctctggcccaaggaatcaagtttcagtaaaggtgttttagatgaacatcccttaatttgaggtgttccagcagctgtttttggagaagacaaagaaaattaaagttttccctgaataaatgcattattatgactgtgacagtgactaatccccctatgaccccaaagccctgattaaatcaagagattccttttttaaaaatcaaaataaaattgttacaacatagccatagttactaaaagatgagttaggtggatttttattatgtcaactagttgtacatggctttttaaaagttaatgattattttgtaattagaaaaaaatagtacgtaccagggtaggaatttgggaaaatacagaaccgaggagaaaacagaagtctttgcagtagataca

SEQ ID NO: 1596 - DNA, 1587 bp, Homo sapiens
  source 1..1587: mol_type = unassigned DNA
gtaaagaggaaaggcagaatttttccttgctatggctggaacaaacgcacttttgatgctggaaaacttcatagatggaaaatttttaccttgtagctcatatatagattcttacgacccatcaacaggggaagtgtattgcagagtgccaaatagtggaaaagacgagatcgaagccgcggtcaaggccgccagagaagcctttcccagctggtcatcccgcagcccccaggagcgctcacgggtcctgaaccaggtggcggatttgctggagcagtccctggaggagtttgcccaggccgagtctaaagaccaagggaaaaccttagcactggcaagaaccatggacattccccggtctgtgcagaacttcaggttcttcgcttcctccagcctgcaccacacgtcagagtgcacgcagatggaccacctgggctgcatgcactacacggtgcgggccccggtgggagtcggtgttccaccaggtgtggtcaatattgtgtttggaaccgggcccagggtgggtgaggccctggtgtcccacccagaggtgcccctgatctccttcaccgggagccagcccaccgctgagcggatcacccagctgagcgctccccactgcaaaaagctctccctggagctggggggcaagaatcctgccatcatctttgaggacgccaacctggatgagtgcattccggcaaccgtcaggtccagctttgccaaccagggtgaaatctgtctctgtaccagcaggatctttgtccagaagagcatctatagtgaatttttaaagagatttgtagaagctaccagaaagtggaaagtcggcattccctctgatccactggtgagcataggtgctctgataagtaaagcacatttggagaaagtcagaagttacgtcaagagagctcttgctgaaggtgcccaaatttggtgcggtgagggagtggataagttgagcctccctgccaggaaccaggcaggctactttatgcttcccacggtgataacagacattaaggatgaatcctgctgcatgacggaagagatatttggtccagtgacgtgtgtcgtcccctttgatagtgaagaggaggtgattgaaagagccaacaacgttaagtatgggctggcggctaccgtgtggtccagcaatgtggggcgcgtccaccgggtggctaagaagctgcagtctggcttggtctggaccaactgctggctcatcagggagctgaaccttcctttcggggggatgaagagttctggaataggtagagagggagccaaggactcttacgacttcttcactgagatcaaaaccatcaccgttaaacactgatctttgctaatggtggagccactatggccaatgcctggctgcaggcatcagttgttcaatgtggtagatgaaaatcatggcatgaattccagctatgccttgacttggcagaaggttatctctagcttatcctcagttcttagtaactttacccactagtgaagagatactgtctattttcaatgtggactcggaaaaaaagacttataagtaggaagatagaacaatgatgccagttgtca

SEQ ID NO: 1597 - DNA, 2558 bp, Homo sapiens
  source 1..2558: mol_type = unassigned DNA
agtccagacagtggtggggacaacctgagtgctcagtcgtaaagaggaaaggcagaatttttccttgctatggctggaacaaacgcacttttgatgctggaaaacttcatagatggaaaatttttaccttgtagctcatatatagattcttacgacccatcaacaggggaagtgtattgcagagtgccaaatagtggaaaagacgagatcgaagccgcggtcaaggccgccagagaagcctttcccagctggtcatcccgcagcccccaggagcgctcacgggtcctgaaccaggtggcggatttgctggagcagtccctggaggagtttgcccaggccgagtctaaagaccaagggaaaaccttagcactggcaagaaccatggacattccccggtctgtgcagaacttcaggttcttcgcttcctccagcctgcaccacacgtcagagtgcacgcagatggaccacctgggctgcatgcactacacggtgcgggccccggtgggagtcgctggtctgatcagcccctggaatttgccactctacttgctgacctggaagatagctccagcgatggctgcagggaacactgtgatagccaagcccagtgagctgacttcagtgactgcgtggatgttgtgcaaactcctggataaagcaggtgttccaccaggtgtggtcaatattgtgtttggaaccgggcccagggtgggtgaggccctggtgtcccacccagaggtgcccctgatctccttcaccgggagccagcccaccgctgagcggatcacccagctgagcgctccccactgcaaaaagctctccctggagctggggggcaagaatcctgccatcatctttgaggacgccaacctggatgagtgcattccggcaaccgtcaggtccagctttgccaaccagggtgaaatctgtctctgtaccagcaggatctttgtccagaagagcatctatagtgaatttttaaagagatttgtagaagctaccagaaagtggaaagtcggcattccctctgatccactggtgagcataggtgctctgataagtaaagcacatttggagaaagtcagaagttacgtcaagagagctcttgctgaaggtgcccaaatttggtgcggtgagggagtggataagttgagcctccctgccaggaaccaggcaggctactttatgcttcccacggtgataacagacattaaggatgaatcctgctgcatgacggaagagatatttggtccagtgacgtgtgtcgtcccctttgatagtgaagaggaggtgattgaaagagccaacaacgttaagtatgggctggcggctaccgtgtggtccagcaatgtggggcgcgtccaccgggtggctaagaagctgcagtctggcttggtctggaccaactgctggctcatcagggagctgaaccttcctttcggggggatgaagagttctggaataggtagagagggagccaaggactcttacgacttcttcactgagatcaaaaccatcaccgttaaacactgatctttgctaatggtggagccactatggccaatgcctggctgcaggcatcagttgttcaatgtggtagatgaaaatcatggcatgaattccagctatgccttgacttggcagaaggttatctctagcttatcctcagttcttagtaactttacccactagtgaagagatactgtctattttcaatgtggactcggaaaaaaagacttataagtaggaagatagaacaatgatgccagttgtcaggctcctcccaggttatgttttcatagtgtttctttcatcatcttcattgaactcttgggaatctccagataatcagattatttcatttggtaaattttaaaaaatatgcaatcaggcacagtgcctcatgcctataatcccagcactttgggaggccaaggtgggtggatcacttgagttcaggagttcgagatcagcctaggcaacatggtgaaatcctgtctttaccaaaagtttaaaaattagcttggtgtggtgccctctgcctatagccccagctacttgggaggctgaggtgggaggatcgcttgagcccaggcggttgaggctgcagtgagccatgatcattccactgcatttcagcctgggggatacagtgagaccttgtctttaaaaaaaaaatgctgcaaaaccaaaaataaatagccataatttgccatctttggagagattatggagataatctccttgtctattagccactagcatggctaattgatcattgattggacctcattacataagggggctgtggacgtctttggaatttgttaggggaaggctatgtggtaagctctactaaatgtatctgtacaaggatgaagaaaaacaaaataactactacttttggaggaaacttggaacaagaagagtacatagtttgatccattcctacggtcgagtctaatcaattccatttcttagtgtatgcatctaatgaggcttacaacttgctaaccccaaaagaagcaataaatgttaagcaattttagtaaccagta

SEQ ID NO: 1598 - DNA, 2383 bp, Homo sapiens
  source 1..2383: mol_type = unassigned DNA
acagtggtggggacaacctgagtgctcagtcgtaaagaggaaaggcagaatttttccttgctatggctggaacaaacgcacttttgatgctggaaaacttcatagatggaaaatttttaccttgtagctcatatatagattcttacgacccatcaacaggggaagtgtattgcagagtgccaaatagtggaaaagacgagatcgaagccgcggtcaaggccgccagagaagcctttcccagctggtcatcccgcagcccccaggagcgctcacgggtcctgaaccaggtggcggatttgctggagcagtccctggaggagtttgcccaggccgagtctaaagaccaagggaaaaccttagcactggcaagaaccatggacattccccggtctgtgcagaacttcaggttcttcgcttcctccagcctgcaccacacgtcagagtgcacgcagatggaccacctgggctgcatgcactacacggtgcgggccccggtgggagtcgctggtctgatcagcccctggaatttgccactctacttgctgacctggaagatagctccagcgatggctgcagggaacactgtgatagccaagcccagtgagctgacttcagtgactgcgtggatgttgtgcaaactcctggataaagcaggtgttccaccaggtgtggtcaatattgtgtttggaaccgggcccagggtgggtgaggccctggtgtcccacccagaggtgcccctgatctccttcaccgggagccagcccaccgctgagcggatcacccagctgagcgctccccactgcaaaaagctctccctggagctggggggcaagaatcctgccatcatctttgaggacgccaacctggatgagtgcattccggcaaccgtcaggtccagctttgccaaccaggtcagaagttacgtcaagagagctcttgctgaaggtgcccaaatttggtgcggtgagggagtggataagttgagcctccctgccaggaaccaggcaggctactttatgcttcccacggtgataacagacattaaggatgaatcctgctgcatgacggaagagatatttggtccagtgacgtgtgtcgtcccctttgatagtgaagaggaggtgattgaaagagccaacaacgttaagtatgggctggcggctaccgtgtggtccagcaatgtggggcgcgtccaccgggtggctaagaagctgcagtctggcttggtctggaccaactgctggctcatcagggagctgaaccttcctttcggggggatgaagagttctggaataggtagagagggagccaaggactcttacgacttcttcactgagatcaaaaccatcaccgttaaacactgatctttgctaatggtggagccactatggccaatgcctggctgcaggcatcagttgttcaatgtggtagatgaaaatcatggcatgaattccagctatgccttgacttggcagaaggttatctctagcttatcctcagttcttagtaactttacccactagtgaagagatactgtctattttcaatgtggactcggaaaaaaagacttataagtaggaagatagaacaatgatgccagttgtcaggctcctcccaggttatgttttcatagtgtttctttcatcatcttcattgaactcttgggaatctccagataatcagattatttcatttggtaaattttaaaaaatatgcaatcaggcacagtgcctcatgcctataatcccagcactttgggaggccaaggtgggtggatcacttgagttcaggagttcgagatcagcctaggcaacatggtgaaatcctgtctttaccaaaagtttaaaaattagcttggtgtggtgccctctgcctatagccccagctacttgggaggctgaggtgggaggatcgcttgagcccaggcggttgaggctgcagtgagccatgatcattccactgcatttcagcctgggggatacagtgagaccttgtctttaaaaaaaaaatgctgcaaaaccaaaaataaatagccataatttgccatctttggagagattatggagataatctccttgtctattagccactagcatggctaattgatcattgattggacctcattacataagggggctgtggacgtctttggaatttgttaggggaaggctatgtggtaagctctactaaatgtatctgtacaaggatgaagaaaaacaaaataactactacttttggaggaaacttggaacaagaagagtacatagtttgatccattcctacggtcgagtctaatcaattccatttcttagtgtatgcatctaatgaggcttacaacttgctaaccccaaaagaagcaataaatgttaagcaattttagtaa

SEQ ID NO: 1599 - DNA, 2696 bp, Homo sapiens
  source 1..2696: mol_type = unassigned DNA
ggatcctaggatgcttacatgcaatgatgaacccgaaaacacttgcaaagtgctacgcaaatattgatcacgaagaaggaagtcctcttcccgcctggagactgtgtggggtatggcggggtggtggggagaatgtggtgtcttgctccaccctcctggcgaggggagggcctggcctggaccgcagaggaatcgagtgactgcccctaaaatctcctagaaccgatcccgcggccccgcccctcccgcggccccgcccctcccgcggcccgtcagcctctgccgcggagctgcgtccgccactcatgtttctccgagcaggcctggccgcgctctccccgcttcttcgcagtcttcggccctctcctgtcgccgccatgagcactggcaccttcgtcgtgtcgcagccgctcaattaccgcggcggggcccgcgtggagccggcggacgcctccggtaccgagaaagctttcgagccagcaaccggccgagtgatagctactttcacatgttcaggagaaaaggaagtaaatttggctgttcaaaatgcaaaggctgcttttaaaatatggagtcaaaaatctggcatggagcgttgccgaatccttttggaggctgccaggataataagggaacgggaggatgaaattgctactatggagtgcatcaacaatggcaagtccatctttgaggcccgcttggacattgacatttcctggcagtgcctggagtattatgcgggcttggctgcatccatggctggtgaacacatccagctcccaggtggatcgtttggttataccagaagagaaccacttggggtatgtgtgggaataggagcatggaactacccctttcagattgcctcttggaagtcggctccagcattagcctgtggtaatgccatggtctttaaaccttctccctttacacctgtttctgcattgctactggctgaaatctacagtgaggctggtgtacctcctgggctcttcaatgtggtgcagggaggggctgccacaggccagtttctgtgtcagcatcccgatgtggccaaagtctccttcactggaagtgtgcccactggcatgaagatcatggagatgtcagctaaaggaatcaaacctgttaccttggaacttggaggcaaatctccactcatcatcttctcagactgtgatatgaacaatgctgtaaagggggcgctgatggccaacttcctcacacaaggccaggtttgctgtaatggcacaagagtatttgtgcagaaagaaattcttgataaatttacagaggaagtggtgaaacagacccaaaggattaaaattggagatccccttctggaagatacaaggatgggtccactcatcaaccgaccacacctggagcgagtccttgggtttgtcaaagtggcaaaggagcagggtgctaaagtgttatgtggtggagatatatatgtacctgaagatcccaaattaaaggatggatattacatgagaccttgtgtattaactaattgcagagacgacatgacctgtgtgaaggaagagatctttgggcctgttatgtccattttatcatttgacactgaagctgaggttctagaaagagccaatgataccacttttggactagcagctggcgtctttaccagggacatccaacgggctcatagagtggtagctgagcttcaggctgggacgtgcttcattaacaactataacgtcagcccagtggagttgccctttggtggatataagaagtcaggatttggcagagagaacggccgtgtgacaatcgaatattattcacagctgaagactgtgtgtgtggagatgggtgatgtggaatctgctttttgaaaacctgcagtgaaacctattgacatggccacgctgtggaatgatgtgaattggccctgtttacagaggcagtacaactgaatgttattttacatccagaattttggcgttcagtataagagaatggttcatgttactctttctctctccatcagcttcctcactgaaaatgtgcattaagtgccttgtagatactaatcaagaaagctgtgattctcctcaaagcgtatttttgtgaaatcttttaagagccagtaacatacttctagagaacaggaaaagagactaggataatacatcttccacacatttggcccactgataatgttaattctctggcgtatttcaaagaacttgttcctggctgatccaagtgcagtggtatttacaactaattgatcacaaccagtttgtagatttctttgttccttctccattcccactgcttcacttgcctagtcttgaagaaaaaaaacaaaaaacaaaaaaaaaccttgttcctttataggttcctggtagaatcagtagagatgatttcagctcattgacatttttttaagctatatccccttgtcattccattgagaaagctgacaactgggatagggaggggattagataatagatggggtcaaattctgtgtgaatgtgaacttgcctagtaagcactttgtctctgttcactactgcgatagaggaaatctatctccctatcttgggtccttgaactacagcctgctgtcttacaccagtggagctaccctttaaatgtacaaattatttgtatgctaatgtaatatggtgaaattaaaataaatcacactgttaattgtt

SEQ ID NO: 1600 - DNA, 1674 bp, Homo sapiens
  source 1..1674: mol_type = unassigned DNA
gtttcctgtgttctgcagcgttgacttgagcacaagacagtgacagtggagagtctaaggccgagtgatagctactttcacatgttcaggagaaaaggaagtaaatttggctgttcaaaatgcaaaggctgcttttaaaatatggagtcaaaaatctggcatggagcgttgccgaatccttttggaggctgccaggataataagggaacgggaggatgaaattgctactatggagtgcatcaacaatggcaagtccatctttgaggcccgcttggacattgacatttcctggcagtgcctggagtattatgcgggcttggctgcatccatggctggtgaacacatccagctcccaggtggatcgtttggttataccagaagagaaccacttggggtatgtgtgggaataggagcatggaactacccctttcagattgcctcttggaagtcggctccagcattagcctgtggtaatgccatggtctttaaaccttctccctttacacctgtttctgcattgctactggctgaaatctacagtgaggctggtgtacctcctgggctcttcaatgtggtgcagggaggggctgccacaggccagtttctgtgtcagcatcccgatgtggccaaagtctccttcactggaagtgtgcccactggcatgaagatcatggagatgtcagctaaaggaatcaaacctgttaccttggaacttggaggcaaatctccactcatcatcttctcagactgtgatatgaacaatgctgtaaagggggcgctgatggccaacttcctcacacaaggccaggtttgctgtaatggcacaagagtatttgtgcagaaagaaattcttgataaatttacagaggaagtggtgaaacagacccaaaggattaaaattggagatccccttctggaagatacaaggatgggtccactcatcaaccgaccacacctggagcgagtccttgggtttgtcaaagtggcaaaggagcagggtgctaaagtgttatgtggtggagatatatatgtacctgaagatcccaaattaaaggatggatattacatgagaccttgtgtattaactaattgcagagacgacatgacctgtgtgaaggaagagatctttgggcctgttatgtccattttatcatttgacactgaagctgaggttctagaaagagccaatgataccacttttggactagcagctggcgtctttaccagggacatccaacgggctcatagagtggtagctgagcttcaggctgggacgtgcttcattaacaactataacgtcagcccagtggagttgccctttggtggatataagaagtcaggatttggcagagagaacggccgtgtgacaatcgaatattattcacagctgaagactgtgtgtgtggagatgggtgatgtggaatctgctttttgaaaacctgcagtgaaacctattgacatggccacgctgtggaatgatgtgaattggccctgtttacagaggcagtacaactgaatgttattttacatccagaattttggcgttcagtataagagaatggttcatgttactctttctctctccatcagcttcctcactgaaaatgtgcattaagtgccttgtagatactaatcaagaaagctgtgattctcctcaaagcgtatttttgtgaa

SEQ ID NO: 1601 - DNA, 5070 bp, Homo sapiens
  source 1..5070: mol_type = unassigned DNA
acatagagggcgccagtgacgcccacacacgtgctggtgtcccgggaagagttcctggcaaagagctcaggaacgttggatcttaatcaaggctttctccgtcggggtggatgggttggactttaggctccagcaagccccgccccactcggcgggtcggtgccgccgggtcccaggtgcccgctacttcccagaacctccgcctcccgctccgggccctcgaaccagcgcggacaccacaatggaccgggcgtccgagctgctcttctacgtgaacggccgcaaggtgatagaaaaaaatgtcgatcctgaaacaatgctgttgccttatttgaggaagaagcttcgactcacaggaactaagtatggctgtggaggaggaggctgtggtgcttgtacagtgatgatatcacgatacaaccccatcaccaagaggataaggcatcacccagccaatgcctgtctgattcccatctgttctctgtatggtgctgccgtcaccacagtagaaggcataggaagcacccacaccagaattcatcctgttcaggagaggattgccaagtgtcatggcacccagtgtggcttctgcacacctgggatggtgatgtccatctacacgctgctcaggaaccacccagagcccactctggatcagttaactgatgcccttggtggtaacctgtgccgttgcactggatacaggcccataattgatgcatgcaagactttctgtaaaacttcgggctgctgtcaaagtaaagaaaatggggtttgctgtttggatcaaggaatcaatggattgccagaatttgaggaaggaagtaagacaagtccaaaactcttcgcagaagaggagtttctgccattggatccaacccaggaactgatatttcctcctgagctaatgataatggctgagaaacagtcgcaaaggaccagggtgtttggcagtgagagaatgatgtggttttcccccgtgaccctgaaggaactgctggaatttaaattcaagtatccccaggctcctgttatcatgggaaacacctctgtggggcctgaagtgaaatttaaaggcgtctttcacccagttataatttctcctgatagaattgaagaactgagtgttgtaaaccatgcatataatggactcacccttggtgctggtctcagcctagcccaggtgaaggacattttggctgatgtagtccagaagcttccagaggagaagacacagatgtaccatgctctcctgaagcatttgggaactctggctgggtcccagatcaggaacatggcttctttagggggacacatcattagcaggcatccagattcagatctgaatcccatcctggctgtgggtaactgtaccctcaacttgctatcaaaagaaggaaaacgacagattcctttaaatgagcaattcctcagcaagtgccctaatgcagatcttaagcctcaagaaatcttggtctcagtgaacatcccctactcaaggaagtgggaatttgtgtcagccttccgacaagcccagcgacaggagaatgcgctagcgatagtcaattcaggaatgagagtcttttttggagaaggggatggcattattagagagttatgcatctcatatggaggcgttggtccagccaccatctgtgccaagaattcctgccagaaactcattggaaggcactggaacgaacagatgctggatatagcctgcaggcttattctgaatgaagtctcccttttgggctcggcgccaggtgggaaagtggagttcaagaggactctcatcatcagcttcctcttcaagttctacctggaagtgtcacagattttgaaaaagatggatccagttcactatcctagccttgcagacaagtatgaaagtgctttagaagatcttcattccaaacatcactgcagtacattaaagtaccagaatataggcccaaagcagcatcctgaagacccaattggccaccccatcatgcatctgtctggtgtgaagcatgccacgggggaggccatctactgtgatgacatgcctctggtggaccaggaacttttcttgacttttgtgactagttcaagagctcatgctaagattgtgtctattgatctgtcagaagctctcagcatgcccggtgtggtggacatcatgacagcagaacatcttagtgacgtcaactccttctgcttttttactgaagctgagaaatttctggcgacagataaggtgttctgtgtgggtcagcttgtctgtgctgtgcttgccgattctgaggttcaggcaaagcgagctgctaagcgagtgaagattgtctatcaagacttggagccgctgatactaacaattgaggaaagtatacaacacaactcctccttcaagccagaaaggaaactggaatatggaaatgttgacgaagcatttaaagtggttgatcaaattcttgaaggtgaaatacatatgggaggtcaagaacatttttatatggaaacccaaagcatgcttgtcgttcccaagggagaggatcaagaaatggatgtctacgtgtccacacagtttcccaaatatatacaggacattgttgcctcaaccttgaagctcccagctaacaaggtcatgtgccatgtaaggcgtgttggtggagcgtttggagggaaggtgttaaaaaccggaatcattgcagccgtcactgcatttgccgcaaacaaacatggccgtgcagttcgctgtgttctggaacgaggagaagacatgttaataactggaggccgccatccttaccttggaaagtacaaagctggattcatgaacgatggcagaatcttggccctggacatggagcattacagcaatgcaggcgcctccttggatgaatcattattcgtgatagaaatgggacttctgaaaatggacaatgcttacaagtttcccaatctccgctgccggggttgggcatgcagaaccaaccttccatccaacacagcttttcgtgggtttggctttcctcaggcagcgctgatcaccgaatcttgtatcacggaagttgcagccaaatgtggactatcccctgagaaggtgcgaatcataaacatgtacaaggaaattgatcaaacaccctacaaacaagagatcaatgccaagaacctaatccagtgttggagagaatgtatggccatgtcttcctactccttgaggaaagttgctgtggaaaagttcaatgcagagaattattggaagaagaaaggactggccatggtccccctgaagtttcctgttggccttggctcacgtgctgctggtcaggctgctgccttggttcacatttatcttgatggctctgtgctggtcactcacggtggaattgaaatggggcagggggtccacactaaaatgattcaggtggtcagccgtgaattaagaatgccaatgtcgaatgtccacctgcgtggaacaagcacagaaactgtccctaatgcaaatatctctggaggttctgtggtggcagatctcaacggtttggcagtaaaggatgcctgtcaaactcttctaaaacgcctcgaacccatcatcagcaagaatcctaaaggaacttggaaagactgggcacagactgcttttgatgaaagcattaacctttcagctgttggatacttcagaggttatgagtcagacatgaactgggagaaaggcgaaggccagcccttcgaatactttgtttatggagctgcctgttccgaggttgaaatagactgcctgacgggggatcataagaacatcagaacagacattgtcatggatgttggctgcagtataaatccagccattgacataggccagattgaaggtgcatttattcaaggcatgggactttatacaatagaggaactgaattattctccccagggcattctgcacactcgtggtccagaccaatataaaatccctgccatctgtgacatgcccacggagttgcacattgctttgttgcctccttctcaaaactcaaatactctttattcatctaagggtctgggagagtcgggggtgttcctggggtgttccgtgtttttcgctatccatgacgcagtgagtgcagcacgacaggagagaggcctgcatggacccttgacccttaatagtccactgaccccggagaagattaggatggcctgtgaagacaagttcacaaaaatgattccgagagatgaacctggatcctacgttccttggaatgtacccatctgaatcaaatgcaaacttctggagaaaacagagtgcctcttcccagatggcaatctgtcctatctctgtgctggaagatgctagatctgaaagacagagtttccacagttcagaaatcatcccacagtgttgcttttctatggagctgatttaaagtattccatttagatttgatagatatgcttaagcaatctataaatcattttcaatgttataaacactaattggtttcctctagggtgatatccgtcattactctgtctcttcaatccatccagctaaatggaataggtgatgacttgcatgtgactcctacttggcttctatccaccaacagaaattataccatatagtgaaaggcaattttctaaataatttcattactaatatgaactgtgaagttgtcattttttcatttgtccttttctgctatcaccttcctcttgtcagaatgaatatagacactgtatctaagtgggaccaaagaaaaaatagcgaactttcaccaaagttttcatgaaaacccaaaagctttaaaagttactatcaagaaattgaaaggaaacccacagaataggataaaatatttgtaaatcatatatttgataaaagtcttgtaaccagatacataaagagctcttacaactcaataaaaggcaagtaatttaaaaataggcaaaagaattgctggatggtatggtagttctatttttagtttttaccctaactactctgacttgatcatttaacattctgtgtatgtaacaaaatatcacatgcataaatattatgtatcaataaaattttttaatggg

SEQ ID NO: 1602 - DNA, 581 bp, Homo sapiens
  source 1..581: mol_type = unassigned DNA
tttgagcagtgactgggatgcagtgaggagcaagccatgcaaacatctggggagacagcatccaggcagtgggaatggcaggtgcaaaggtcctgaggtgatagaaaaaaatgtcgatcctgaaacaatgctgttgccttatttgaggaagaagcttcgactcacaggaactaagtatggctgtggaggaggaggctgtggtgcttgtacagtgatgatatcacgatacaaccccatcaccaagaggataaggcatcacccagccaatgcctgtctgattcccatctgttctctgtatggtgctgccgtcaccacagtagaaggcataggaagcacccacaccagaattcatcctgttcaggagaggattgccaagtgtcatggcacccagtgtggcttctgcacacctgggatggtgatgtccatctacacgctgctcaggaaccacccagagcccactctggatcagttaactgatgcccttggtggtaacctgtgccgttgcactggatacaggcccataattgatgcatgcaagactttctgtaaaacttcgggctgctgtcaaagtaaagaaaatg

SEQ ID NO: 1603 - DNA, 2234 bp, Homo sapiens
  source 1..2234: mol_type = unassigned DNA
aaaaagactccctgtggtgttcagaatcactcctacagtcaggttctccacaatggatctcagtgctgcaagtcaccgcatacctctaagtgatggaaacagcattcccatcatcggacttggtacctactcagaacctaaatcgacccctaagggagcctgtgcaacatcggtgaaggttgctattgacacagggtaccgacatattgatggggcctacatctaccaaaatgaacacgaagttggggaggccatcagggagaagatagcagaaggaaaggtgcggagggaagatatcttctactgtggaaagctatgggctacaaatcatgtcccagagatggtccgcccaaccctggagaggacactcagggtcctccagctagattatgtggatctttacatcattgaagtacccatggcctttaagccaggagatgaaatataccctagagatgagaatggcaaatggttatatcacaagtcaaatctgtgtgccacttgggaggttgagtgccatccgtatttcacccagccaaaactcttgaaattttgccaacaacatgacattgtcattactgcatatagccctttggggaccagtaggaatccaatctgggtgaatgtttcttctccacctttgttaaaggatgcacttctaaactcattggggaaaaggtacaataagacagcagctcaaattgttttgcgtttcaacatccagcgaggggtggttgtcattcctaaaagctttaatcttgaaaggatcaaagaaaattttcagatctttgacttttctctcactgaagaagaaatgaaggacattgaagccttgaataaaaatgtccgctttgtagaattgctcatgtggcgcgatcatcctgaatacccatttcatgatgaatactgactgcagggagttcctgaacagatttttcactcccacgagtgccaagacggtgcaatgggtagtcccctagatgtgaaaatgaagagagagggttttaccatcctgagaagaaataatgatggaaacatgtttaatgtttgtgcagtgtaaatgactttgactcagtcacattgaagtaaaaatattaaaatctgttgaaataactcttaggaaattatcaactaattttttcagatcagtatcttctagattccagacagaaaaaaattacacttcagaaaagacatcaaaggcaacatatgacaacaagtaatttatgaatctgggtagtagcgttggtaatctgagttctttaagggttaacaggacaacgaagtgcatgtggcagtgtgctggcagtggccttgaggctttggaccattggttacaaaacagacacagccaagataagatccacacacacattattaacaaggaagtgatttgctgcaccttgagttgagagggctacatgtagaaaagtcttaaaatagagctaaacaccacagtggtcaacaaagccatcataatgttggtgtttgtttccctccaatgtatgtatgtttagtttttatccaacctgaggaatgaaaacttaactggatctctcttgcatccttaaagggcctgagtctcaacatggctgctgatccatacttacacatcttactgtcaatcttgcctacattgattatagaaccactattacgtgaaaaggcttgaaacaaccaacatatacaaataaaaccctgccttgtaaaatagtaaaagagaagccatatattggcttttcttcttaacttgggagatatattgaaacaaggtgctttataagattattgtacttaagactttaatagtgttacttggatagcttatatgaattttgagaattttatatgaattttgagaaagcaagttcaaaagaactctggtaattttcctgtatgtacaatttaaagagtgaataagattattagaattcagcaatagagatatatctattttcaattcaactacagaaatatattttattggccgggtgcggtggctcatgcctataatcccagcactttgggaggccaaggtgggcagatcaggaggtcaggagatcgagaccatcttggctaacaaggtgaaaccccgtctctactaaaaatacaaaaaattagccaggcgcggtggcgggggcctgtaatcccagctactcaggaggctgaggcagaagaatggcatgaacccgggaggaggagcttgcagtgagccgagatagcgccactgcagt

SEQ ID NO: 1604 - DNA, 1236 bp, Homo sapiens
  source 1..1236: mol_type = unassigned DNA
tttctttgatggaataggccctaggacacctttctaaaaagactccctgtggtgttcagaatcactcctacagtcaggttctccacaatggatctcagtgctgcaagtcaccgcatacctctaagtgatggaaacagcattcccatcatcggacttggtacctactcagaacctaaatcgacccctaagggagcctgtgcaacatcggtgaaggttgctattgacacagggtaccgacatattgatggggcctacatctaccaaaatgaacacgaagttggggaggccatcagggagaagatagcagaaggaaaggtgcggagggaagatatcttctactgtggaaagctatgggctacaaatcatgtcccagagatggtccgcccaaccctggagaggacactcagggtcctccagctagattatgtggatctttacatcattgaagtacccatggcctttaagccaggagatgaaatataccctagagatgagaatggcaaatggttatatcacaagtcaaatctgtgtgccacttgggaggcgatggaagcttgcaaagacgctggcttggtgaaatccctgggagtgtccaattttaaccgcaggcagctggagctcatcctgaacaagccaggactcaaacacaagccagtcagcaaccaggttgagtgccatccgtatttcacccagccaaaactcttgaaattttgccaacaacatgacattgtcattactgcatatagccctttggggaccagtaggaatccaatctgggtgaatgtttcttctccacctttgttaaaggatgcacttctaaactcattggggaaaaggtacaataagacagcagctcaaattgttttgcgtttcaacatccagcgaggggtggttgtcattcctaaaagctttaatcttgaaaggatcaaagaaaattttcaggtggcgcgatcatcctgaatacccatttcatgatgaatactgactgcagggagttcctgaacagatttttcactcccacgagtgccaagacggtgcaatgggtagtcccctagatgtgaaaatgaagagagagggttttaccatcctgagaagaaataatgatggaaacatgtttaatgtttgtgcagtgtaaatgactttgactcagtcacattgaagtaaaaatattaaaatctgttgaaataactcttaggaaattatcaactaattttttcagatcagtatcttctagat

SEQ ID NO: 1605 - DNA, 1166 bp, Homo sapiens
  source 1..1166: mol_type = unassigned DNA
acttaagctgaggatcgttggatctctggcggggtgcagaactgagcccaggccacagtaccctattcacgctctgtgcttgtgccaagggggcaatggcggcttcctgtgttctactgcacactgggcagaagatgcctctgattggtctgggtacctggaagagtgagcctggtcaggtaaaagcagctgttaagtatgcccttagcgtaggctaccgccacattgattgtgctgctatctacggcaatgagcctgagattggggaggccctgaaggaggacgtgggaccaggcaaggcggtgcctcgggaggagctgtttgtgacatccaagctgtggaacaccaagcaccaccccgaggatgtggagcctgccctccggaagactctggctgacctccagctggagtatctggacctgtacctgatgcactggccttatgcctttgagcggggagacaaccccttccccaagaatgctgatgggactatatgctacgactccacccactacaaggagacttggaaggctctggaggcactggtggctaaggggctggtgcaggcgctgggcctgtccaacttcaacagtcggcagattgatgacatactcagtgtggcctccgtgcgtccagctgtcttgcaggtggaatgccacccatacttggctcaaaatgagctaattgcccactgccaagcacgtggcctggaggtaactgcttatagccctttgggctcctctgatcgtgcatggcgtgatcctgatgagcctgtcctgctggaggaaccagtagtcctggcattggctgaaaagtatggccgatctccagctcagatcttgctcaggtggcaggtccagcggaaagtgatctgcatccccaaaagtatcactccttctcgaatccttcagaacatcaaggtgtttgacttcacctttagcccagaagagatgaagcagctaaatgccctgaacaaaaattggagatatattgtgcctatgcttacggtggatgggaagagagtcccaagggatgcagggcatcctctgtacccctttaatgacccgtactgagaccacagcttcttggcctcccttccagctctgcagctaatgaggtcctgccacaacggaaagagggagttaataaagccattggagcatcca

SEQ ID NO: 1606 - DNA, 1818 bp, Homo sapiens
  source 1..1818: mol_type = unassigned DNA
tcttggtgttgcagctgctctctgggcctcagtttgcttgaactaaatgtaacggggccaacttaggtgaactttgggaatccagccaacctgactttagggagagtatggagccacggatggcattgtgaatccggagggccgacaccagaagaacctgcaacgtggcatctgctaccttacttcccccggaaaagcgcctgcggcggcgcctaggcgcgcggtgcaatgtgggccagcaaaaggcgaggctggccccgccccttgcaccgcccacgtggccagcgccacctgcctcattgtgcccaggagttctccaaacccgcgctgcggagtgagtgaccaagttccggccagttcgacctcgaggatccagaggtggagacggtactacctcccagctctgttttccatccccttcaggtccttcctcgggaggcggcgaaggcggtccaccctgcgcgtgatcctttatgcccggcccctgcccctccctccgggtggaacttccccctcaccgccagacttaagctgaggatcgttggatctctggcggggtgcagaactgagcccaggccacagtaccctattcacgctctgtgcttgtgccaaggtttcaagtgatcctcccgcctcagcctgcccaggtgctgagattacatgtatgagccactgcacctggaaaggagccagaaatgtgaagtgctagctgaaggatgagcagcagctagccaggcaaagggggcaatggcggcttcctgtgttctactgcacactgggcagaagatgcctctgattggtctgggtacctggaagagtgagcctggtcaggtaaaagcagctgttaagtatgcccttagcgtaggctaccgccacattgattgtgctgctatctacggcaatgagcctgagattggggaggccctgaaggaggacgtgggaccaggcaaggcggtgcctcgggaggagctgtttgtgacatccaagctgtggaacaccaagcaccaccccgaggatgtggagcctgccctccggaagactctggctgacctccagctggagtatctggacctgtacctgatgcactggccttatgcctttgagcggggagacaaccccttccccaagaatgctgatgggactatatgctacgactccacccactacaaggagacttggaaggctctggaggcactggtggctaaggggctggtgcaggcgctgggcctgtccaacttcaacagtcggcagattgatgacatactcagtgtggcctccgtgcgtccagctgtcttgcaggtggaatgccacccatacttggctcaaaatgagctaattgcccactgccaagcacgtggcctggaggtaactgcttatagccctttgggctcctctgatcgtgcatggcgtgatcctgatgagcctgtcctgctggaggaaccagtagtcctggcattggctgaaaagtatggccgatctccagctcagatcttgctcaggtggcaggtccagcggaaagtgatctgcatccccaaaagtatcactccttctcgaatccttcagaacatcaaggtgtttgacttcacctttagcccagaagagatgaagcagctaaatgccctgaacaaaaattggagatatattgtgcctatgcttacggtggatgggaagagagtcccaagggatgcagggcatcctctgtacccctttaatgacccgtactgagaccacagcttcttggcctcccttccagctctgcagctaatgaggtcctgccacaacggaaagagggagttaataaagccattggagcatcca

SEQ ID NO: 1607 - DNA, 840 bp, Homo sapiens
  source 1..840: mol_type = unassigned DNA
cccttgcaccgcccacgtggccagcgccacctgcctcattgtgcccaggagttctccaaacccgcgctgcggagtccttcctcgggaggcggcgaaggcggtccaccctgcgcgtgatcctttatgcccggcccctgcccctccctccgggtggaacttccccctcaccgccagacttaagctgaggatcgttggatctctggcggggtgcagaactgagcccaggccacagtaccctattcacgctctgtgcttgtgccaaggtttcaagtgatcctcccgcctcagcctgcccaggtgctgagattacatgtatgagccactgcacctggaaaggagccagaaatgtgaagtgctagctgaaggatgagcagcagctagccaggcaaagggggcaatggcggcttcctgtgttctactgcacactgggcagaagatgcctctgattggtctgggtacctggaagagtgagcctggtcaggtaaaagcagctgttaagtatgcccttagcgtaggctaccgccacattgattgtgctgctatctacggcaatgagcctgagattggggaggccctgaaggaggacgtgggaccaggcaaggcggtgcctcgggaggagctgtttgtgacatccaagctgtggaacaccaagcaccaccccgaggatgtggagcctgccctccggaagactctggctgacctccagctggagtatctggacctgtacctgatgcactggccttatgcctttgagcggggagacaaccccttccccaagaatgctgatgggactatatgctacgactccacccactacaaggagacttggaaggctctgga

SEQ ID NO: 1608 - DNA, 1384 bp, Homo sapiens
  source 1..1384: mol_type = unassigned DNA
gacctcacgggctatttaaaggtacgcgccgcggccaaggccgcaccgtactgggcgggggtctggggagcgcagcagccatggcaagccgtctcctgctcaacaacggcgccaagatgcccatcctggggttgggtacctggaagtcccctccagggcaggtgactgaggccgtgaaggtggccattgacgtcgggtaccgccacatcgactgtgcccatgtgtaccagaatgagaatgaggtgggggtggccattcaggagaagctcagggagcaggtggtgaagcgtgaggagctcttcatcgtcagcaagctgtggtgcacgtaccatgagaagggcctggtgaaaggagcctgccagaagacactcagcgacctgaagctggactacctggacctctaccttattcactggccgactggctttaagcctgggaaggaatttttcccattggatgagtcgggcaatgtggttcccagtgacaccaacattctggacacgtgggcggccatggaagagctggtggatgaagggctggtgaaagctattggcatctccaacttcaaccatctccaggtggagatgatcttaaacaaacctggcttgaagtataagcctgcagttaaccagattgagtgccacccatatctcactcaggagaagttaatccagtactgccagtccaaaggcatcgtggtgaccgcctacagccccctcggctctcctgacaggccctgggccaagcccgaggacccttctctcctggaggatcccaggatcaaggcgatcgcagccaagcacaataaaactacagcccaggtcctgatccggttccccatgcagaggaacttggtggtgatccccaagtctgtgacaccagaacgcattgctgagaactttaaggtctttgactttgaactgagcagccaggatatgaccaccttactcagctacaacaggaactggagggtctgtgccttgttgagctgtacctcccacaaggattaccccttccatgaagagttttgaagctgtggttgcctgctcgtccccaagtgacctatacctgtgtttcttgcctcatttttttccttgcaaatgtagtatggcctgtgtcactcagcagtgggacagcaacctgtagagtggccagcgagggcgtgtctagcttgatgttggatctcaagagccctgtcagtagagtagaagtctcttccagtttgctttgcccttctttctaccctgctggggaaagtacaacctgaatacccttttctgaccaaagagaagcaaaatctaccaggtcaaaatagtgccactaacggttgagttttgactgcttggaactggaatcctttcagcaagacttctctttgcctcaa

SEQ ID NO: 1609 - DNA, 858 bp, Homo sapiens
  source 1..858: mol_type = unassigned DNA
tgaagattgattgcaatgggagtggtttctctgtttctttgtatagtcgaacagatatttacttcttccaagaagatacaattcagaggaatttttatggcaaaagttcctaaaagtaaagctttagaggccaccaaattggcaattgaagctggcttccgccatattgattctgctcatttatacaataatgaggagcaggttggactggccatccgaagcaagattgcagatggcagtgtgaagagagaagacatattctacacttcaaagctttggtgcaattcccatcgaccagagttggtccgaccagccttggaaaggtcactgaaaaatcttcaattggattatgttgacctctaccttattcattttccagtgtctgtaaagccaggtgaggaagtgatcccaaaagatgaaaatggaaaaatactatttgacacagtggatctctgtgccacatgggaggccgtggagaagtgtaaagatgcaggattggccaagtccatcggggtgtccaacttcaaccgcaggcagctggagatgatcctcaacaagccagggctcaagtacaagcctgtctgcaaccagcctagagataattccatcttttccttgagtcctgactggtgattccaggcctccttgatcaaattgactgtccccaaatgttacacacatttcagcattaaagttactacacttttcccagtaaattacatttttttgttttattttatgttttaaaacttagagtcaatcagtgaagatctacagtggaaatacatatgtataaaattagtgaatttggtataatgatacggtgctgtgataatttaataaaagcattgagaaatt

SEQ ID NO: 1610 - DNA, 3389 bp, Homo sapiens
  source 1..3389: mol_type = unassigned DNA
ttttcttaggtaagaaacggttgaactggatgcaatttttatcacagcttgtgtaagactgcctctgtccctcctctcacatgccattggttaaccagcagacagtgtgctcaggggcgttgccagctcattgctcttatagcctgtgagggaggaagaaagaaacatttgccagccaggctagtgacagaaatggattcgaaatatcagtgtgtgaagctgaatgatggtcacttcatgcctgtcctgggatttggcacctatgcgcctgcagaggttcctaaaagtaaagctttagaggccaccaaattggcaattgaagctggcttccgccatattgattctgctcatttatacaataatgaggagcaggttggactggccatccgaagcaagattgcagatggcagtgtgaagagagaagacatattctacacttcaaagctttggtgcaattcccatcgaccagagttggtccgaccagccttggaaaggtcactgaaaaatcttcaattggattatgttgacctctaccttattcattttccagtgtctgtaaagccaggtgaggaagtgatcccaaaagatgaaaatggaaaaatactatttgacacagtggatctctgtgccacatgggaggccgtggagaagtgtaaagatgcaggattggccaagtccatcggggtgtccaacttcaaccgcaggcagctggagatgatcctcaacaagccagggctcaagtacaagcctgtctgcaaccaggtggaatgtcatccttacttcaaccagagaaaactgctggatttctgcaagtcaaaagacattgttctggttgcctatagtgctctgggatcccaccgagaagaaccatgggtggacccgaactccccggtgctcttggaggacccagtcctttgtgccttggcaaaaaagcacaagcgaaccccagccctgattgccctgcgctaccagctacagcgtggggttgtggtcctggccaagagctacaatgagcagcgcatcagacagaacgtgcaggtgtttgaattccagttgacttcagaggagatgaaagccatagatggcctaaacagaaatgtgcgatatttgacccttgatatttttgctggcccccctaattatccattttctgatgaatattaacatggagggcattgcatgaggtctgccagaaggccctgcgtgtggatggtgacacagaggatggctctatgctggtgactggacacatcgcctctggttaaatctctcctgcttggtgatttcagcaagctacagcaaagcccattggccagaaaggaaagacaataattttgttttttcattttgaaaaaattaaatgctctctcctaaagattcttcacctactttggtctccataacttctatgttttctttccttctgacacactagtgcccctaaattgtgatttgcctatacgtttagggccggggttggaagatgttaacaaccatttaagattcatttctgcagtgggagtgggtggagtttcaccctctgggaaaggggcaggtgacaggtatttatcagtcagtgcctctctagctcttgtaggaagaagcacacgcaggatggagtctagaggatgagcgatattgactagcaattcatgggctccctccagcagtgcgagggtcagagtttctggagccttgggaggaggcatccctgtgagggggggttagggagatgggagggcaccaggaaaagtgattagaagtcaggtatgggaaggctaaataggacagagtcgagtacatctctgcttggaaaaacatatcaacacccttttttttgaacattatatcttgctcataaaagaaaactttccacattgttttaacaaaccccacagctgagagtcaggcctgaatctttgatgtgtgcccattcacaacgttgaccctattggtttgtggtggggcagggcatcaaagacatcattgactaatcacattcccctgaatagctcatatttagaaaatattcttagattctaaaaatgtactattaatttgtgatattcagtcttttaaatattttatacattaaacaggcatagttacaaatataaaacaaaaatatcccaaagccattatgcatggcactcaagattaaaatgggaaataatacatctaataaatcaaatgttccaagacttcaaaggtcttttggaaacaggctatgtaaaacagcacactggtttcaaactttggtaaattttaagaacaactcttacaaaggcatttaattcttatacataattttcaggggacctaagttaatcagctaatcatgaagacatgattttcattttagaaaacacttttgaaaacttgggataatctcatgccttaatgatcaaagcattatgagaaggacagtggtttttaacctgggcatatgttctaacacatttactctccactattcgtactctggtagccatgttaaccccatcagagattccttctcaagccatgtctcagagctgagaggcatcccagcaagttttgcagctcacagttttttccgtaaattacttattctataaaattggagtaggccataaactttggagggccctagaccaattttttggattatttttcgtcttctatcattccgctgatcttagatattctctgcattaaatattaaatatcacttctaggctgaaaaatccccctaaaaatatttctagctcagatttttcctccaaattctgcaatagaagatcacaatgtgaactctgcatctccatgttaaagtctaatggacattcacacttagcatgtctcaaagaaatctcatgtaaaccatggccatcctgttctaccttaactttctgagtctatggaatgataatttcacatctcataaacttgactgatgtaagtgtcaagaaaagattgacattttgttaaaagttagtagtgaagtgtgtaacgcttaagcaaactttcatatttcaaatctctttagcaagtgtaactcttttttcaagatgtgaaataatcattaggtcagtcatttgtaaatagtacatctgctatggactttttccagttcttcaccatccatttttataaaactcttattgttaaaaaaaaagttactcagaatttcataaagccaaacacctgatttcaggaacacttgagatgtaagaaaattttatagggacctccaatcactaattttcctattttttctctcaaagaaatgctgaagggaggaattcaggttgaatgaaaggaaatagtaacttacagccatatagagttataaagacttcttgtaaatgtgaacatatggtaaaatataaaaacatgtatttttgaaa

SEQ ID NO: 1611 - DNA, 2021 bp, Homo sapiens
  source 1..2021: mol_type = unassigned DNA
agaaagccatgtaaccatgaaggcagagattgaagtgattcaactataagccaaggcatgccaactgctactgggagccaccaaaagctagtcaaaggcaagggaaccatcttcccgagagctttcatggggagcatggccctataaacaactggatttttgactcaagtctccagaactggaagagaatacaatcctcttttgttgttctaaaccatccaatttgcacaaaaacgtgttttgaacctactctaaccaactgtcaaaaggctgtgttaagtgattctctgacaagaaccgggatttagctgaactaagaagcaaaaattctgcatcattttggtggcgtgtacagggacatgaggaaggaaccttggccattctgatgtttaaccaagagttgagctgagtggctctgaccagcgtggaagatgagagcagcctgaacttacactgtgaaaatgccctggagaaatgcagagatgcaggtttaatgaagtccatcagggtgtccagtttcaatcactaactgttggaactgatcctcagacaagccaggactcaagtacaagcccatctacaaccagatgagcccttagggccactggggccatttctgactttgtgctcttcacacacttccttacattagaataatgtaagaaacggttgaactggatgcaatttttatcacagcttgtgtaagactgcctctgtccctcctctcacatgccattggttaaccagcagacagtgtgctcaggggcgttgccagctcattgctcttatagcctgtgagggaggaagaaagaaacatttgccagccaggctagtgacagaaatggattcgaaatatcagtgtgtgaagctgaatgatggtcacttcatgcctgtcctgggatttggcacctatgcgcctgcagaggttcctaaaagtaaagctttagaggccaccaaattggcaattgaagctggcttccgccatattgattctgctcatttatacaataatgaggagcaggttggactggccatccgaagcaagattgcagatggcagtgtgaagagagaagacatattctacacttcaaagctttggtgcaattcccatcgaccagagttggtccgaccagccttggaaaggtcactgaaaaatcttcaattggattatgttgacctctaccttattcattttccagtgtctgtaaagccaggtgaggaagtgatcccaaaagatgaaaatggaaaaatactatttgacacagtggatctctgtgccacatgggaggccgtggagaagtgtaaagatgcaggattggccaagtccatcggggtgtccaacttcaaccgcaggcagctggagatgatcctcaacaagccagggctcaagtacaagcctgtctgcaaccaggtggaatgtcatccttacttcaaccagagaaaactgctggatttctgcaagtcaaaagacattgttctggttgcctatagtgctctgggatcccaccgagaagaaccatgggtggacccgaactccccggtgctcttggaggacccagtcctttgtgccttggcaaaaaagcacaagcgaaccccagccctgattgccctgcgctaccagctacagcgtggggttgtggtcctggccaagagctacaatgagcagcgcatcagacagaacgtgcaggtgtttgaattccagttgacttcagaggagatgaaagccatagatggcctaaacagaaatgtgcgatatttgacccttgatatttttgctggcccccctaattatccattttctgatgaatattaacatggagggcattgcatgaggtctgccagaaggccctgcgtgtggatggtgacacagaggatggctctatgctggtgactggacacatcgcctctggttaaatctctcctgcttggtgatttcagcaagctacagcaaagcccattggccagaaaggaaagacaataattttgttttttcattttgaaaaaattaaatgctctctcct

SEQ ID NO: 1612 - DNA, 744 bp, Homo sapiens
  source 1..744: mol_type = unassigned DNA
attcgaaatatcagtgtgtgaagctgaatgatggtcacttcatgcctgtcctgggatttggcacctatgcgcctgcagaggttggactggccatccgaagcaagattgcagatggcagtgtgaagagagaagacatattctacacttcaaagctttggtgcaattcccatcgaccagagttggtccgaccagccttggaaaggtcactgaaaaatcttcaattggattatgttgacctctaccttattcattttccagtgtctgtaaagccaggtgaggaagtgatcccaaaagatgaaaatggaaaaatactatttgacacagtggatctctgtgccacatgggaggccgtggagaagtgtaaagatgcaggattggccaagtccatcggggtgtccaacttcaaccgcaggcagctggagatgatcctcaacaagccagggctcaagtacaagcctgtctgcaaccaggtggaatgtcatccttacttcaaccagagaaaactgctggatttctgcaagtcaaaagacattgttctggttgcctatagtgctctgggatcccaccgagaagaaccatgggtggacccgaactccccggtgctcttggaggacccagtcctttgtgccttggcaaaaaagcacaagcgaaccccagccctgattgccctgcgctaccagctacagcgtggggttgtggtcctggccaagagctacaatgagcagcgcatcagacagaacgtgc

SEQ ID NO: 1613 - DNA, 3381 bp, Homo sapiens
  source 1..3381: mol_type = unassigned DNA
ttttcttaggtaagaaacggttgaactggatgcaatttttatcacagcttgtgtaagactgcctctgtccctcctctcacatgccattggttaaccagcagacagtgtgctcaggggcgttgccagctcattgctcttatagcctgtgagggaggaagaaacatttgctaaccaggccagtgacagaaatggattcgaaataccagtgtgtgaagctgaatgatggtcacttcatgcctgtcctgggatttggcacctatgcgcctgcagaggttcctaaaagtaaagctctagaggccgtcaaattggcaatagaagccgggttccaccatattgattctgcacatgtttacaataatgaggagcaggttggactggccatccgaagcaagattgcagatggcagtgtgaagagagaagacatattctacacttcaaagctttggagcaattcccatcgaccagagttggtccgaccagccttggaaaggtcactgaaaaatcttcaattggactatgttgacctctatcttattcattttccagtgtctgtaaagccaggtgaggaagtgatcccaaaagatgaaaatggaaaaatactatttgacacagtggatctctgtgccacatgggaggccatggagaagtgtaaagatgcaggattggccaagtccatcggggtgtccaacttcaaccacaggctgctggagatgatcctcaacaagccagggctcaagtacaagcctgtctgcaaccaggtggaatgtcatccttacttcaaccagagaaaactgctggatttctgcaagtcaaaagacattgttctggttgcctatagtgctctgggatcccatcgagaagaaccatgggtggacccgaactccccggtgctcttggaggacccagtcctttgtgccttggcaaaaaagcacaagcgaaccccagccctgattgccctgcgctaccagctgcagcgtggggttgtggtcctggccaagagctacaatgagcagcgcatcagacagaacgtgcaggtgtttgaattccagttgacttcagaggagatgaaagccatagatggcctaaacagaaatgtgcgatatttgacccttgatatttttgctggcccccctaattatccattttctgatgaatattaacatggagggcattgcatgaggtctgccagaaggccctgcgtgtggatggtgacacagaggatggctctatgctggtgactggacacatcgcctctggttaaatctctcctgcttggcgacttcagtaagctacagctaagcccatcggccggaaaagaaagacaataattttgtttttcattttgaaaaaattaaatgctctctcctaaagattcttcacctactttggtctccataacttctatgttttctctccttctgacacactagtgcccccaaattgtgatttgcctatacgtttagggccggggttggaagatgttaacaaccatttaagattcatttctgcagtgggagtgggtggagtttcaccctctgggaaaggggcaggtgacaggtatttatcagtcagtgcctctctagctcttgtaggaagaagcacacgcaggatggagtctagaggatgagcgatattgactagcaattcatgggctccctccagcagtgcgagggtcagagtttctggagccttgggaggaggcatccctgtgagggggggttagggagatgggagggcaccaggaaaagtgattagaagtcaggtatgggaaggctaaataggacagagtcgagtacatctctgcttggaaaaacatatcaacacccttttttttgatcattatatcttgttcataaaagaaaactttccacattgttttaacaaaccccacagctgagagtcaggcctgaatctttgatgtgtgcccattcacaacgttgaccctattggtttgtggtggggcaggacatcgaagatatcattgactcatcacattcccctgaatagctcatatttagaaaatattcttagattgtaaaaatgtactgttcatttgttatatgcaatcttttaaatgttttatactttaaacaaggcatagttacaagtataaaacataaatatcccaaagccattatgcatggcactcaagattaaaatgggaaataatacatctaataaatcaaatgttccaagacttcaaatgtcttttggaaacaggctatgtaaaacagcacactggtttcaaactttggtaaattttaagaagaactcttacaaaggcatttaattcttatacataattttcaggggaactaatcaaatcagctaatcatgaagacatgattttcgttttagaaaacacttttgaaaacttgggataatctcatgtcttaatgatcaaagcattatgagaaggacagtggttttttacctgggcacactttctaacacatttactctccactattcgtactctggtagccatgttaaccccatcagagattccttctcaagccatgtctcagagctgataggcatcccagcaagttttgcagctcacaatttttctgtaaattacttattctataaaattggaagaggccataaactttggagggccctagaccaattttttggattatttctggtctactctcattccgttgatgatcttagatattctctgcattaaatatcacctctaggctgagaaatccaccaaaaaatatttctagctcagcgttttcctccaaatcttcaatggaagatcataatgtgaactctgcatctccatgttaaagtttaatggacattcacacttagcatgtctcaaagaaatctcatgtaaaccatggccatcctgttctaccttaactttctgagtctatggaatgataatttcacatctcataaacttgactgatgtaagtgtcaagaaaagattgacattttgttaaaacttcgtagccaagtgtgtaacgcttaagcagactttcatatttcaaatctctatagcacgtgtaactcttttttcaagatgtgaaataatcattaggtcagtcatttgtaaatagtacggctgctgtgggctttttccagttcttcaccatccatttttataaaactcttattgttaaaaaaaaaaagttactcagaatttcataaagccaaacacctgatttcaggaacacttgagatgtaagaaaattttatagggacctccaatcactaattttcctattttttctctcaaagaaatgctgaagggaggaattcaggttgaatgaaaggaaatagtaacttacagccatatagagttataaagacttcttgtaaatgtgaacatatggtaaaatataaaaacatgtatttttgaaa

SEQ ID NO: 1614 - DNA, 1589 bp, Homo sapiens
  source 1..1589: mol_type = unassigned DNA
gagatctggttgtttgaaagtgtgtagcacctccaccttctctctctctctccctctccctctcctgccagccaagtgaagacatgcttacttccccttcaccttccttcatgatgttaccattggaatgacatactgcatcctatagttataccatccactctgaaatcaatgtgaatttaacttcagttccatacagaaacttcttttccacaggtaagaaacggttgaactggatgcaatttttatcacagcttgtgtaagactgcctctgtccctcctctcacatgccattggttaaccagcagacagtgtgctcaggggcgttgccagctcattgctcttatagcctgtgagggaggaagaaacatttgctaaccaggccagtgacagaaatggattcgaaataccagtgtgtgaagctgaatgatggtcacttcatgcctgtcctgggatttggcacctatgcgcctgcagaggttcctaaaagtaaagctctagaggccgtcaaattggcaatagaagccgggttccaccatattgattctgcacatgtttacaataatgaggagcaggttggactggccatccgaagcaagattgcagatggcagtgtgaagagagaagacatattctacacttcaaagctttggagcaattcccatcgaccagagttggtccgaccagccttggaaaggtcactgaaaaatcttcaattggactatgttgacctctatcttattcattttccagtgtctgtaaagccaggtgaggaagtgatcccaaaagatgaaaatggaaaaatactatttgacacagtggatctctgtgccacatgggaggccatggagaagtgtaaagatgcaggattggccaagtccatcggggtgtccaacttcaaccacaggctgctggagatgatcctcaacaagccagggctcaagtacaagcctgtctgcaaccaggtggaatgtcatccttacttcaaccagagaaaactgctggatttctgcaagtcaaaagacattgttctggttgcctatagtgctctgggatcccatcgagaagaaccatgggtggacccgaactccccggtgctcttggaggacccagtcctttgtgccttggcaaaaaagcacaagcgaaccccagccctgattgccctgcgctaccagctgcagcgtggggttgtggtcctggccaagagctacaatgagcagcgcatcagacagaacgtgcaggtgtttgaattccagttgacttcagaggagatgaaagccatagatggcctaaacagaaatgtgcgatatttgacccttgatatttttgctggcccccctaattatccattttctgatgaatattaacatggagggcattgcatgaggtctgccagaaggccctgcgtgtggatggtgacacagaggatggctctatgctggtgactggacacatcgcctctggttaaatctctcctgcttggcgacttcagtaagctacagctaagcccatcggccggaaaagaaagacaataattttgtttttcattttgaaaaaattaaatgctctctcctaaagattcttcacct

SEQ ID NO: 1615 - DNA, 1478 bp, Homo sapiens
  source 1..1478: mol_type = unassigned DNA
gctaaccaggccagtgacagaaatggattcgaaataccagtgtgtgaagctgaatgatggtcacttcatgcctgtcctgggatttggcacctatgcgcctgcagaggttcctaaaagtaaagctctagaggccgtcaaattggcaatagaagccgggttccaccatattgattctgcacatgtttacaataatgaggagcaggttggactggccatccgaagcaagattgcagatggcagtgtgaagagagaagacatattctacacttcaaagctttggagcaattcccatcgaccagagttggtccgaccagccttggaaaggtcactgaaaaatcttcaattggactatgttgacctctatcttattcattttccagtgtctgtaaaggccatggagaagtgtaaagatgcaggattggccaagtccatcggggtgtccaacttcaaccacaggctgctggagatgatcctcaacaagccagggctcaagtacaagcctgtctgcaaccaggtggaatgtcatccttacttcaaccagagaaaactgctggatttctgcaagtcaaaagacattgttctggttgcctatagtgctctgggatcccatcgagaagaaccatgggtggacccgaactccccggtgctcttggaggacccagtcctttgtgccttggcaaaaaagcacaagcgaaccccagccctgattgccctgcgctaccagctgcagcgtggggttgtggtcctggccaagagctacaatgagcagcgcatcagacagaacgtgcaggtgtttgaattccagttgacttcagaggagatgaaagccatagatggcctaaacagaaatgtgcgatatttgacccttgatatttttgctggcccccctaattatccattttctgatgaatattaacatggagggcattgcatgaggtctgccagaaggccctgcgtgtggatggtgacacagaggatggctctatgctggtgactggacacatcgcctctggttaaatctctcctgcttggcgacttcagtaagctacagctaagcccatcggccggaaaagaaagacaataattttgtttttcattttgaaaaaattaaatgctctctcctaaagattcttcacctactttggtctccataacttctatgttttctctccttctgacacactagtgcccccaaattgtgatttgcctatacgtttagggccggggttggaagatgttaacaaccatttaagattcatttctgcagtgggagtgggtggagtttcaccctctgggaaaggggcaggtgacaggtatttatcagtcagtgcctctctagctcttgtaggaagaagcacacgcaggatggagtctagaggatgagcgatattgactagcaattcatgggctccctccagcagtgcgagggtcagagtttctggagccttgggaggaggcatccctgtgagggggggtta

SEQ ID NO: 1616 - DNA, 945 bp, Homo sapiens
  source 1..945: mol_type = unassigned DNA
atttgctaaccaggccagtgacagaaatggattcgaaataccagtgtgtgaagctgaatgatggtcacttcatgcctgtcctgggatttggcacctatgcgcctgcagaggttcctaaaagtaaagctctagaggccgtcaaattggcaatagaagccgggttccaccatattgattctgcacatgtttacaataatgaggagcaggttggactggccatccgaagcaagattgcagatggcagtgtgaagagagaagacatattctacacttcaaagctttggagcaattcccatcgaccagagttggtccgaccagccttggaaaggtcactgaaaaatcttcaattggactatgttgacctctatcttattcattttccagtgtctgtaaaggaggacatagggattttaacatggaagaagagccctaaacataactcctaattcctttctatggaacagaaagcaattttgaatccatacttccgtgattgcatgtctacaagaaaagagagtgcagaatcctcaaagcctctgcctcaaaaacttgaggaaatgacaatcatctccttgaaggcacaaggtcttatttatgattcctgatttcacctcttgggatgttcacagacacagagtttcatgaagctgtggtgtccagaaaacctgctgcacatagggtgcacaatgagtttccatcttcttgcctcttttcaaggggcaagaactcagtccgggaatgtcttaaactacaaaccttcatgggaaaccttgttgcttctgcttcctctcttttcacactggaggttttatttttgcttagccatgaattcttgtgtcattcataacttttgtcttaaggtactgaaaactagtcaggctagttaatgcaaaagggtatattagatatgataatgggaaatcaaagccagggctacattaagaa

SEQ ID NO: 1617 - DNA, 1807 bp, Homo sapiens
  source 1..1807: mol_type = unassigned DNA
ccctcatcaggattacagctttatcaggactgcatcttcttcagaaatgaatatttctcttacaacgcaaagaaagaaaaatcaaaataaattttctgattgaaaatgtaaaaaggcaaatatttttacagttttaactttaattttttattgaggaccaactatttgaaaaattctcattagtcattcctttaaattatgtgtatgtgagagaaagacgtaagatggttaattatttcaaatgatgcagtataaagaaggggcattatcacggcagaaacgaaaaaagatatttgtagctggaggtttttatagtctaacatatggttgctatttgttctacaaatccttttgaataatttaatatagagatttagaatagaaaataatactttagatagaaattaatgagtttattataaccatatattataataatttacttaggaattctctttgataagaaacaaatgaactgaatgcaattttctccacagaccatataagactgcctatgtacctcctcctacatgccattggttaaccatcagtcagtttgcaggggtggggggaggggtttcctgcccattgtttttgtaatctctgaggagaagcagcagcaaacatttgctagtcagacaagtgacagggaatggattccaaacaccagtgtgtaaagctaaatgatggccacttcatgcctgtattgggatttggcacctatgcacctccagaggttccgagaagtaaagctttggaggtcacaaaattagcaatagaagctgggttccgccatatagattctgctcatttatacaataatgaggagcaggttggactggccatccgaagcaagattgcagatggcagtgtgaagagagaagacatattctacacttcaaagctttggtccacttttcatcgaccagagttggtccgaccagccttggaaaactcactgaagaaagctcaattggactatgttgacctctatcttattcattctccaatgtctctaaagccaggtgaggaactttcaccaacagatgaaaatggaaaagtaatatttgacatagtggatctctgtaccacctgggaggccatggagaagtgtaaggatgcaggattggccaagtccattggggtgtcaaacttcaaccgcaggcagctggagatgatcctcaacaagccaggactcaagtacaagcctgtctgcaaccaggtagaatgtcatccgtatttcaaccggagtaaattgctagatttctgcaagtcgaaagatattgttctggttgcctatagtgctctgggatctcaacgagacaaacgatgggtggacccgaactccccggtgctcttggaggacccagtcctttgtgccttggcaaaaaagcacaagcgaaccccagccctgattgccctgcgctaccagctgcagcgtggggttgtggtcctggccaagagctacaatgagcagcgcatcagacagaacgtgcaggtttttgagttccagttgactgcagaggacatgaaagccatagatggcctagacagaaatctccactattttaacagtgatagttttgctagccaccctaattatccatattcagatgaatattaacatggagggctttgcctgatgtctaccagaagccctgtgtgtggatggtgacgcagaggacgtctctatgccggtgactggacatatcacctctacttaaatccgtcctgtttagcgacttcagtcaactacagctgagtccataggccagaaagacaataaatttttatcattttgaaataa

SEQ ID NO: 1618 - DNA, 1262 bp, Homo sapiens
  source 1..1262: mol_type = unassigned DNA
aacatgttccttgaggttgaagcaaatctgaccgattttcaatgtaaaaataacatataaaaactgttctcggagttatttctaaacagaactaagatcagaattctttgaatcatcagaatcatctcttttgaaaaatcgattcatcaaatgaatcttcagccaacaactgttcaagaaggatgcaaatatcacaggttccgagaagtaaagctttggaggtcacaaaattagcaatagaagctgggttccgccatatagattctgctcatttatacaataatgaggagcaggttggactggccatccgaagcaagattgcagatggcagtgtgaagagagaagacatattctacacttcaaagctttggtccacttttcatcgaccagagttggtccgaccagccttggaaaactcactgaagaaagctcaattggactatgttgacctctatcttattcattctccaatgtctctaaagccaggtgaggaactttcaccaacagatgaaaatggaaaagtaatatttgacatagtggatctctgtaccacctgggaggccatggagaagtgtaaggatgcaggattggccaagtccattggggtgtcaaacttcaaccgcaggcagctggagatgatcctcaacaagccaggactcaagtacaagcctgtctgcaaccaggtagaatgtcatccgtatttcaaccggagtaaattgctagatttctgcaagtcgaaagatattgttctggttgcctatagtgctctgggatctcaacgagacaaacgatgggtggacccgaactccccggtgctcttggaggacccagtcctttgtgccttggcaaaaaagcacaagcgaaccccagccctgattgccctgcgctaccagctgcagcgtggggttgtggtcctggccaagagctacaatgagcagcgcatcagacagaacgtgcaggtttttgagttccagttgactgcagaggacatgaaagccatagatggcctagacagaaatctccactattttaacagtgatagttttgctagccaccctaattatccatattcagatgaatattaacatggagggctttgcctgatgtctaccagaagccctgtgtgtggatggtgacgcagaggacgtctctatgccggtgactggacatatcacctctacttaaatccgtcctgtttagcgacttcagtcaactacagctgagtccataggccagaaagacaataaatttttatcattttg

SEQ ID NO: 1619 - DNA, 1194 bp, Homo sapiens
  source 1..1194: mol_type = unassigned DNA
acaggatctgcttagtgaaagaagtggcaagcaatggatcccaaatatcagcgtgtagagctaaatgatggtcacttcatgcccgtattgggatttggcacctatgcacctccagaggttccgaggaacagagctgtagaggtcaccaaattagcaatagaagctggcttccgccatattgattctgcttatttatacaataatgaggagcaggttggactggccatccgaagcaagattgcagatggcagtgtgaagagagaagacatattctacacttcaaagctttggtgcactttctttcaaccacagatggtccaaccagccttggaaagctcactgaaaaaacttcaactggactatgttgacctctatcttcttcatttcccaatggctctcaagccaggtgagacgccactaccaaaagatgaaaatggaaaagtaatattcgacacagtggatctctctgccacatgggaggtcatggagaagtgtaaggatgcaggattggccaagtccatcggggtgtcaaacttcaactgcaggcagctggagatgatcctcaacaagccaggactcaagtacaagcctgtctgcaaccaggtagaatgtcatccttacctcaaccagagcaaactgctggatttctgcaagtcaaaagacattgttctggttgcccacagtgctctgggaacccaacgacataaactatgggtggacccaaactccccagttcttttggaggacccagttctttgtgccttagcaaagaaacacaaacaaaccccagccctgattgccctgcgctaccagctgcagcgtggggttgtggtcctggccaagagctacaatgagcagcggatcagagagaacatccaggtttttgaattccagttgacatcagaggatatgaaagttctagatggtctaaacagaaattatcgatatgttgtcatggattttcttatggaccatcctgattatccattttcagatgaatattagcatagagggtgttgcacgacatctagcagaaggccctgtgtgtggatggtgatgcagaggatgtctctatgctggtgactggacacacagcctctggttaaatccctcccctcctgcttggcaacttcagctagctagatatatccatggtccagaaagcaaacataataaatttttatcttgaagtaa

SEQ ID NO: 1620 - DNA, 1414 bp, Homo sapiens
  source 1..1414: mol_type = unassigned DNA
aggaagaagtgaatagaagaaaagagggtgttgcaaatcaaaagcacatagagatatcatcttacaccagtcagaatggctattcttaaaatgtcagacaacaacagatattggattgccacatcatcaggaccacaccttcatcaggaatgaatattcctactacaattaaagaagaaacaaaattaatttgttggtgaaaaacatgttgctgaaggaaacaggatctgcttagtgaaagaagtggcaagcaatggatcccaaatatcagcgtgtagagctaaatgatggtcacttcatgcccgtattgggatttggcacctatgcacctccagaggttccgaggaacagagctgtagaggtcaccaaattagcaatagaagctggcttccgccatattgattctgcttatttatacaataatgaggagcaggttggactggccatccgaagcaagattgcagatggcagtgtgaagagagaagacatattctacacttcaaagctttggtgcactttctttcaaccacagatggtccaaccagccttggaaagctcactgaaaaaacttcaactggactatgttgacctctatcttcttcatttcccaatggctctcaagccaggtgagacgccactaccaaaagatgaaaatggaaaagtaatattcgacacagtggatctctctgccacatgggaggtcatggagaagtgtaaggatgcaggattggccaagtccatcggggtgtcaaacttcaactgcaggcagctggagatgatcctcaacaagccaggactcaagtacaagcctgtctgcaaccaggtagaatgtcatccttacctcaaccagagcaaactgctggatttctgcaagtcaaaagacattgttctggttgcccacagtgctctgggaacccaacgacataaactatgggtggacccaaactccccagttcttttggaggacccagttctttgtgccttagcaaagaaacacaaacaaaccccagccctgattgccctgcgctaccagctgcagcgtggggttgtggtcctggccaagagctacaatgagcagcggatcagagagaacatccaggtttttgaattccagttgacatcagaggatatgaaagttctagatggtctaaacagaaattatcgatatgttgtcatggattttcttatggaccatcctgattatccattttcagatgaatattagcatagagggtgttgcacgacatctagcagaaggccctgtgtgtggatggtgatgcagaggatgtctctatgctggtgactggacacacagcctctggttaaatccctcccctcctgcttggcaacttcagctagctagatatatccatggtccagaaagcaaacataataaatttttatcttgaagtaa

SEQ ID NO: 1621 - DNA, 411 bp, Homo sapiens
  source 1..411: mol_type = unassigned DNA
acaggatctgcttagtgaaagaagtggcaagcaatggatcccaaatatcagcgtgtagagctaaatgatggtcacttcatgcccgtattgggatttggcacctatgcacctccagaggttccgaggaacagagctgtagaggtcaccaaattagcaatagaagctggcttccgccatattgattctgcttatttatacaataatgaggagcaggttggactggccatccgaagcaagattgcagatggcagtgtgaagagagaagacatattctacacttcaaagctttggtgcactttctttcaaccacagatggtccaaccagccttggaaagctcactgaaaaaacttcaactggactatgttgacctctatcttcttcatttcccaatggctctcaagagtacaacc

SEQ ID NO: 1622 - DNA, 2347 bp, Homo sapiens
  source 1..2347: mol_type = unassigned DNA
cctgtggtgttcagaatcactcctacagtcaggttctccacaatggatctcagtgctgcaagtcaccgcatacctctaagtgatggaaacagcattcccatcatcggacttggtacctactcagaacctaaatcgacccctaagggagcctgtgcaacatcggtgaaggttgctattgacacagggtaccgacatattgatggggcctacatctaccaaaatgaacacgaagttggggaggccatcagggagaagatagcagaaggaaaggtgcggagggaagatatcttctactgtggaaagctatgggctacaaatcatgtcccagagatggtccgcccaaccctggagaggacactcagggtcctccagctagattatgtggatctttacatcattgaagtacccatggcctttaagccaggagatgaaatataccctagagatgagaatggcaaatggttatatcacaagtcaaatctgtgtgccacttgggaggcgatggaagcttgcaaagacgctggcttggtgaaatccctgggagtgtccaattttaaccgcaggcagctggagctcatcctgaacaagccaggactcaaacacaagccagtcagcaaccaggttgagtgccatccgtatttcacccagccaaaactcttgaaattttgccaacaacatgacattgtcattactgcatatagccctttggggaccagtaggaatccaatctgggtgaatgtttcttctccacctttgttaaaggatgcacttctaaactcattggggaaaaggtacaataagacagcagctcaaattgttttgcgtttcaacatccagcgaggggtggttgtcattcctaaaagctttaatcttgaaaggatcaaagaaaattttcagatctttgacttttctctcactgaagaagaaatgaaggacattgaagccttgaataaaaatgtccgctttgtagaattgctcatgtggcgcgatcatcctgaatacccatttcatgatgaatactgactgcagggagttcctgaacagatttttcactcccacgagtgccaagacggtgcaatgggtagtcccctagatgtgaaaatgaagagagagggttttaccatcctgagaagaaataatgatggaaacatgtttaatgtttgtgcagtgtaaatgactttgactcagtcacattgaagtaaaaatattaaaatctgttgaaataactcttaggaaattatcaactaattttttcagatcagtatcttctagattccagacagaaaaaaattacacttcagaaaagacatcaaaggcaacatatgacaacaagtaatttatgaatctgggtagtagcgttggtaatctgagttctttaagggttaacaggacaacgaagtgcatgtggcagtgtgctggcagtggccttgaggctttggaccattggttacaaaacagacacagccaagataagatccacacacacattattaacaaggaagtgatttgctgcaccttgagttgagagggctacatgtagaaaagtcttaaaatagagctaaacaccacagtggtcaacaaagccatcataatgttggtgtttgtttccctccaatgtatgtatgtttagtttttatccaacctgaggaatgaaaacttaactggatctctcttgcatccttaaagggcctgagtctcaacatggctgctgatccatacttacacatcttactgtcaatcttgcctacattgattatagaaccactattacgtgaaaaggcttgaaacaaccaacatatacaaataaaaccctgccttgtaaaatagtaaaagagaagccatatattggcttttcttcttaacttgggagatatattgaaacaaggtgctttataagattattgtacttaagactttaatagtgttacttggatagcttatatgaattttgagaattttatatgaattttgagaaagcaagttcaaaagaactctggtaattttcctgtatgtacaatttaaagagtgaataagattattagaattcagcaatagagatatatctattttcaattcaactacagaaatatattttattggccgggtgcggtggctcatgcctataatcccagcactttgggaggccaaggtgggcagatcaggaggtcaggagatcgagaccatcttggctaacaaggtgaaaccccgtctctactaaaaatacaaaaaattagccaggcgcggtggcgggggcctgtaatcccagctactcaggaggctgaggcagaagaatggcatgaacccgggaggaggagcttgcagtgagccgagatagcgccactgcagt

SEQ ID NO: 1623 - DNA, 1208 bp, Homo sapiens
  source 1..1208: mol_type = unassigned DNA
aatagagggcttgggtccggaagtgatggactggaggcttgactaatgtgaaaggggcgtctgaaagagaagccagctgccatgccatgaactgcaatgtgaaaaggccaatgtagcaaggatatgtccagccaacagccagtgaggatctgaggccctcagaccagcagcccatgagcaactgaattttgctaataaccatgtaagtgaacacagaagtggacactcagggtcctccagctagattatgtggatctttacatcattgaagtacccatggcctttaagccaggagatgaaatataccctagagatgagaatggcaaatggttatatcacaagtcaaatctgtgtgccacttgggaggcgatggaagcttgcaaagacgctggcttggtgaaatccctgggagtgtccaattttaaccgcaggcagctggagctcatcctgaacaagccaggactcaaacacaagccagtcagcaaccaggttgagtgccatccgtatttcacccagccaaaactcttgaaattttgccaacaacatgacattgtcattactgcatatagccctttggggaccagtaggaatccaatctggaggcagctccataaacttgccttgcttgatcttcccatactacgagtaactctccattcagtgcatactctgcactcagagaaactggttacaggtgacctgcagtgtcctgggtgaatgtttcttctccacctttgttaaaggatgcacttctaaactcattggggaaaaggtacaataagacagcagctcaaattgttttgcgtttcaacatccagcgaggggtggttgtcattcctaaaagctttaatcttgaaaggatcaaagaaaattttcagatctttgacttttctctcactgaagaagaaatgaaggacattgaagccttgaataaaaatgtccgctttgtagaattgctcatgtggcgcgatcatcctgaatacccatttcatgatgaatactgactgcagggagttcctgaacagatttttcactcccacgagtgccaagacggtgcaatgggtagtcccctagatgtgaaaatgaagagagagggttttaccatcctgagaagaaataatgatggaaacatgtttaatgtttgtgcagtgtaaatgactttgactcagtcacattgaagtaaaaatattaaaatctgttgaaataac

SEQ ID NO: 1624 - DNA, 1957 bp, Homo sapiens
  source 1..1957: mol_type = unassigned DNA
cttatttggcagctgctgcctcacccacagcttttgatatctaggaggactcttctctcccaaactacctgtcaccatggcccaccgatttccagccctcacccaggagcagaagaaggacagccagggaaagctgttcagaaacatcctcaaggaaaaggggatcgtggtgggaatcaagttagaccaaggaggtgctcctcttgcaggaacaaacaaagaaaccaccattcaagggcttgatggcctctcagagcgctgtgctcagtacaagaaagatggtgttgactttgggaagtggcgtgctgtgctgaggattgccgaccagtgtccatccagcctcgctatccaggaaaacgccaacgccctggctcgctacgccagcatctgtcagcagaatggactggtacctattgttgaaccagaggtaattcctgatggagaccatgacctggaacactgccagtatgttactgagaaggtcctggctgctgtctacaaggccctgaatgaccatcatgtttacctggagggcaccctgctaaagcccaacatggtgactgctggacatgcctgcaccaagaagtatactccagaacaagtagctatggccaccgtaacagctctccaccgtactgttcctgcagctgttcctggcatctgctttttgtctggtggcatgagtgaagaggatgccactctcaacctcaatgctatacctactagggtccaatgcccgccagcctagctccagtgcttctagtaggagggctgaaagggagcaacttttcctccaatcctggaaattcgacacaattagatttgaactgctggaaatacaacacatgttaaatcttaagtacaagggggaaaaaataaatcagttattgaaacataaaaatgaataccaaggacctgatcaaatttcacacagcagtttccttgcaacactttcagctccccatgctccagaatacccacccaagaaaataataggctttaaaacaatatcggctcctcatccaaagaacaactgctgattgaaacacctcattagctgagtgtagagaagtgcatcttatgaaacagtcttagcagtggtaggttgggaaggagatagctgcaaccaaaaaagaaataaatattctataaaccttcagctgctatcgggtttcacttttctgctcttgctgtccaaagactcagtgtatttcattacttttgactctactagacatgactgggtttcaacagtaaaggtcttcaactcttgctagtcattggaatcaagccgcaaaattttaaaaactgagatgctcaggccacaccccagctcaattaaatcagaaaccctagacttgggatcctctaactattagatttcttaaagctccctcagtaattccaatgtacagtcaagtttgagaactaccaatctaaatttcaagtttgagggtatttgaaaattaaagccattcacaatacgaagccagctaaaaatgtagaatgattttgagcaacttgtggagtataataagagaattaatgtgacttcaatgcttggagcattcttgttcaagtggcccaggtttggtgaaacaggactaccttgtcatctgcacgtccaggcatatttcgtagttttgcagtaaataatattcacataatgatactgtattgactttcaattttcagaattaacctatagttacagcacttaagacaaccagagttataaaagagaatttaaatattataactttggacaatataaaagtgatgatttaactgacagaagctaggaaatataagggggaggagaagtggaagaaagcaaagagagtcaggaatactacttaaaactgatgggttaagaaatagtgctttaattctatttaagtaataaaagaaatggatgtaaatcataaaaatatatatctaaaattaaaatattgat

SEQ ID NO: 1625 - DNA, 2451 bp, Homo sapiens
  source 1..2451: mol_type = unassigned DNA
aaaaacatgatgagaagtctataaaaattgtgtgctaccaaagatctgtcttatttggcagctgctgcctcacccacagcttttgatatctaggaggactcttctctcccaaactacctgtcaccatggcccaccgatttccagccctcacccaggagcagaagaaggagctctcagaaattgcccagagcattgttgccaatggaaaggggatcctggctgcagatgaatctgtaggtaccatggggaaccgcctgcagaggatcaaggtggaaaacactgaagagaaccgccggcagttccgagaaatcctcttctctgtggacagttccatcaaccagagcatcgggggtgtgatccttttccacgagaccctctaccagaaggacagccagggaaagctgttcagaaacatcctcaaggaaaaggggatcgtggtgggaatcaagttagaccaaggaggtgctcctcttgcaggaacaaacaaagaaaccaccattcaagggcttgatggcctctcagagcgctgtgctcagtacaagaaagatggtgttgactttgggaagtggcgtgctgtgctgaggattgccgaccagtgtccatccagcctcgctatccaggaaaacgccaacgccctggctcgctacgccagcatctgtcagcagaatggactggtacctattgttgaaccagaggtaattcctgatggagaccatgacctggaacactgccagtatgttactgagaaggtcctggctgctgtctacaaggccctgaatgaccatcatgtttacctggagggcaccctgctaaagcccaacatggtgactgctggacatgcctgcaccaagaagtatactccagaacaagtagctatggccaccgtaacagctctccaccgtactgttcctgcagctgttcctggcatctgctttttgtctggtggcatgagtgaagaggatgccactctcaacctcaatgctatcaacctttgccctctaccaaagccctggaaactaagtttctcttatggacgggccctgcaggccagtgcactggctgcctggggtggcaaggctgcaaacaaggaggcaacccaggaggcttttatgaagcgggccatggctaactgccaggcggccaaaggacagtatgttcacacgggttcttctggggctgcttccacccagtcgctcttcacagcctgctatacctactagggtccaatgcccgccagcctagctccagtgcttctagtaggagggctgaaagggagcaacttttcctccaatcctggaaattcgacacaattagatttgaactgctggaaatacaacacatgttaaatcttaagtacaagggggaaaaaataaatcagttattgaaacataaaaatgaataccaaggacctgatcaaatttcacacagcagtttccttgcaacactttcagctccccatgctccagaatacccacccaagaaaataataggctttaaaacaatatcggctcctcatccaaagaacaactgctgattgaaacacctcattagctgagtgtagagaagtgcatcttatgaaacagtcttagcagtggtaggttgggaaggagatagctgcaaccaaaaaagaaataaatattctataaaccttcagctgctatcgggtttcacttttctgctcttgctgtccaaagactcagtgtatttcattacttttgactctactagacatgactgggtttcaacagtaaaggtcttcaactcttgctagtcattggaatcaagccgcaaaattttaaaaactgagatgctcaggccacaccccagctcaattaaatcagaaaccctagacttgggatcctctaactattagatttcttaaagctccctcagtaattccaatgtacagtcaagtttgagaactaccaatctaaatttcaagtttgagggtatttgaaaattaaagccattcacaatacgaagccagctaaaaatgtagaatgattttgagcaacttgtggagtataataagagaattaatgtgacttcaatgcttggagcattcttgttcaagtggcccaggtttggtgaaacaggactaccttgtcatctgcacgtccaggcatatttcgtagttttgcagtaaataatattcacataatgatactgtattgactttcaattttcagaattaacctatagttacagcacttaagacaaccagagttataaaagagaatttaaatattataactttggacaatataaaagtgatgatttaactgacagaagctaggaaatataagggggaggagaagtggaagaaagcaaagagagtcaggaatactacttaaaactgatgggttaagaaatagtgctttaattctatttaagtaataaaagaaatggatgtaaatcataaaaatatatatctaaaattaaaatattgat

SEQ ID NO: 1626 - DNA, 1033 bp, Homo sapiens
  source 1..1033: mol_type = unassigned DNA
atctgtcttatttggcagctgctgcctcacccacagcttttgatatctaggaggactcttctctcccaaactacctgtcaccatggcccaccgatttccagccctcacccaggagcagaagaaggagctctcagaaattgcccagagcattgttgccaatggaaaggggatcctggctgcagatgaatctgtaggtaccatggggaaccgcctgcagaggatcaaggtggaaaacactgaagagaaccgccggcagttccgagaaatcctcttctctgtggacagttccatcaaccagagcatcgggggtgtgatccttttccacgagaccctctaccagaaggacagccagggaaagctgttcagaaacatcctcaaggaaaaggggatcgtggtgggaatcaagttagaccaaggaggtgctcctcttgcaggaacaaacaaagaaaccaccattcaagggcttgatggcctctcagagcgctgtgctcagtacaagaaagatggtgttgactttgggaagtggcgtgctgtgctgaggattgccgaccagtgtccatccagcctcgctatccaggaaaacgccaacgccctggctcgctacgccagcatctgtcagcagaatggactggtacctattgttgaaccagaggtaattcctgatggagaccatgacctggaacactgccagtatgttactgagaaggtcctggctgctgtctacaaggccctgaatgaccatcatgtttacctggagggcaccctgctaaagcccaacatggtgactgctggacatgcctgcaccaagaagtatactccagaacaagtagctatggccaccgtaacagctctccaccgtactgttcctgcagctgttcctggcatctgctttttgtctggtggcatgagtgaagaggatgccactctcaacctcaatgctatcaacctttgccctctaccaaagccctggaaactaagtttctctggggtggcaaggctgcaaacaaggaggcaacccaggaggcttttatga

SEQ ID NO: 1627 - DNA, 1652 bp, Homo sapiens
  source 1..1652: mol_type = unassigned DNA
cccggaggagtcacgtagctctgcgacatccgcagcctcatttaccagagggagccagggctgcagcctcatctgtttgcggatcagaacccgagctgtgcttgtggctgcggctgctaactggctgcgcacagggagctgtcaccatgcctcactcgtacccagccctttctgctgagcagaagaaggagttgtctgacattgccctgcggattgtagccccgggcaaaggcattctggctgcggatgagtctgtaggcagcatggccaagcggctgagccaaattggggtggaaaacacagaggagaaccgccggctgtaccgccaggtcctgttcagtgctgatgaccgtgtgaaaaagtgcattggaggcgtcattttcttccatgagaccctctaccagaaagatgataatggtgttcccttcgtccgaaccatccaggataagggcatcgtcgtgggcatcaaggttgacaagggtgtggtgcctctagctgggactgatggagaaaccaccactcaagggctggatgggctctcagaacgctgtgcccaatacaagaaggatggtgctgactttgccaagtggcgctgtgtgctgaaaatcagtgagcgtacaccctctgcacttgccattctggagaacgccaacgtgctggcccgttatgccagtatctgccagcagaatggcattgtgcctattgtggaacctgaaatattgcctgatggagaccacgacctcaaacgttgtcagtatgttacagagaaggtcttggctgctgtgtacaaggccctgagtgaccatcatgtatacctggaggggaccctgctcaagcccaacatggtgaccccgggccatgcctgtcccatcaagtataccccagaggagattgccatggcaactgtcactgccctgcgtcgcactgtgcccccagctgtcccaggagtgaccttcctgtctgggggtcagagcgaagaagaggcatcattcaacctcaatgccatcaaccgctgcccccttccccgaccctgggcgcttaccttctcctatgggcgtgccctgcaagcctctgcactcaatgcctggcgagggcaacgggacaatgctggggctgccactgaggagttcatcaagcgggctgaggtgaatgggcttgcagcccagggcaagtatgaaggcagtggagaagatggtggagcagcagcacagtcactctacattgccaaccatgcctactgagtatccactccataccacagcccttggcccagccatctgcacccacttttgcttgtagtcatggccagggccaaatagctatgcagagcagagatgccttcacctggcaccaacttgtcttcctttctctcttcccttcccctctctcattgctgcacctgggaccataggatgggaggatagggagcccctcatgactgagggcagaagaaattgctagaagtcagaacaggatggctgggtctccccctacctcttccagctcccacaattttcccatgatgaggtagcttctccctgggctctccttcttgcctgccctgtctcctgggatcagagggtagtacagaagccctgactcatgccttgagtacataccatacagcaaataaatggtagcaaaacattcta

SEQ ID NO: 1628 - DNA, 1708 bp, Homo sapiens
  source 1..1708: mol_type = unassigned DNA
cccggaggagtcacgtagctctgcgacatccgcagcctcatttaccagagggagccagggctgcagcctcatctgtttgcggatcagaacccgagctgtgcttgtggctgcggctgctaactggctgcgcacagaagctgagagaagagggtggcaataagtacttttgcctcattctgaagccttggaaggagctgtcaccatgcctcactcgtacccagccctttctgctgagcagaagaaggagttgtctgacattgccctgcggattgtagccccgggcaaaggcattctggctgcggatgagtctgtaggcagcatggccaagcggctgagccaaattggggtggaaaacacagaggagaaccgccggctgtaccgccaggtcctgttcagtgctgatgaccgtgtgaaaaagtgcattggaggcgtcattttcttccatgagaccctctaccagaaagatgataatggtgttcccttcgtccgaaccatccaggataagggcatcgtcgtgggcatcaaggttgacaagggtgtggtgcctctagctgggactgatggagaaaccaccactcaagggctggatgggctctcagaacgctgtgcccaatacaagaaggatggtgctgactttgccaagtggcgctgtgtgctgaaaatcagtgagcgtacaccctctgcacttgccattctggagaacgccaacgtgctggcccgttatgccagtatctgccagcagaatggcattgtgcctattgtggaacctgaaatattgcctgatggagaccacgacctcaaacgttgtcagtatgttacagagaaggtcttggctgctgtgtacaaggccctgagtgaccatcatgtatacctggaggggaccctgctcaagcccaacatggtgaccccgggccatgcctgtcccatcaagtataccccagaggagattgccatggcaactgtcactgccctgcgtcgcactgtgcccccagctgtcccaggagtgaccttcctgtctgggggtcagagcgaagaagaggcatcattcaacctcaatgccatcaaccgctgcccccttccccgaccctgggcgcttaccttctcctatgggcgtgccctgcaagcctctgcactcaatgcctggcgagggcaacgggacaatgctggggctgccactgaggagttcatcaagcgggctgaggtgaatgggcttgcagcccagggcaagtatgaaggcagtggagaagatggtggagcagcagcacagtcactctacattgccaaccatgcctactgagtatccactccataccacagcccttggcccagccatctgcacccacttttgcttgtagtcatggccagggccaaatagctatgcagagcagagatgccttcacctggcaccaacttgtcttcctttctctcttcccttcccctctctcattgctgcacctgggaccataggatgggaggatagggagcccctcatgactgagggcagaagaaattgctagaagtcagaacaggatggctgggtctccccctacctcttccagctcccacaattttcccatgatgaggtagcttctccctgggctctccttcttgcctgccctgtctcctgggatcagagggtagtacagaagccctgactcatgccttgagtacataccatacagcaaataaatggtagcaaaacattcta

SEQ ID NO: 1629 - DNA, 579 bp, Homo sapiens
  source 1..579: mol_type = unassigned DNA
agtctcatctctctctcaggctctctactcctttcagccttggtcctctgccctcccgtctgggtgtctgagttgtggggaattgaagtgcttcctattgctatcctcctgccaaacagggagctgtcaccatgcctcactcgtacccagccctttctgctgagcagaagaaggagttgtctgacattgccctgcggattgtagccccgggcaaaggcattctggctgcggatgagtctgtaggcagcatggccaagcggctgagccaaattggggtggaaaacacagaggagaaccgccggctgtaccgccaggtcctgttcagtgctgatgaccgtgtgaaaaagtgcattggaggcgtcattttcttccatgagaccctctaccagaaagatgataatggtgttcccttcgtccgaaccatccaggataagggcatcgtcgtgggcatcaaggttgacaagggtgtggtgcctctagctgggactgatggagaaaccaccactcaagggctggatgggctctcagaacgctgtgcccaatacaagaaggatggtgctgactttgccaagtggcgct

SEQ ID NO: 1630 - DNA, 1088 bp, Homo sapiens
  source 1..1088: mol_type = unassigned DNA
cctcatcagggcccagccttcccaagctcgccttctctctgccgggcgcagccggctggtggtggccactgagacaagatgcctagcatcttcgcctatcagagctccgaggtggactggtgtgagagcaacttccagtactcggagctggtggccgagttctacaacacgttctccaatatccccttcttcatcttcgggccactgatgatgctcctgatgcacccgtatgcccagaagcgctcccgctacatttacgttgtctgggtcctcttcatgatcataggcctgttctccatgtatttccacatgacgctcagcttcctgggccagctgctggacgagatcgccatcctgtggctcctgggcagtggctatagcatatggatgccccgctgctatttcccctccttccttggggggaacaggtcccagttcatccgcctggtcttcatcaccactgtggtcagcacccttctgtccttcctgcggcccacggtcaacgcctacgccctcaacagcattgccctgcacattctctacatcgtgtgccaggagtacaggaagaccagcaataaggagcttcggcacctgattgaggtctccgtggttttatgggctgttgctctgaccagctggatcagtgaccgtctgctttgcagcttctggcagaggattcatttcttctatctgcacagcatctggcatgtgctcatcagcatcaccttcccttatggcatggtcaccatggccttggtggatgccaactatgagatgccaggtgaaaccctcaaagtccgctactggcctcgggacagttggcccgtggggctgccctacgtggaaatccggggtgatgacaaggactgctgagacctgccagcctcttgactatccaaccacccaacaacttgcctgtgtcttgagaagatagccccggtcaggacttgcacctgcgggacactcgtggttccttcctctgtttccccttccgtgtcctccttgtcctgcgctgccctgccttgaggcagatgatggactttgtgacatctctgagcagcagcctggtgactgtggggggctgtctc

SEQ ID NO: 1631 - DNA, 2238 bp, Homo sapiens
  source 1..2238: mol_type = unassigned DNA
agctgctccaatgccccggagtggccatgggcgccccgcactggtgggaccagctgcaggctggtagctcggaggtggactggtgcgaggacaactacaccatcgtgcctgctatcgccgagttctacaacacgatcagcaatgtcttatttttcattttaccgcccatctgcatgtgcttgtttcgtcagtatgcaacatgcttcaacagtggcatctacttaatctggactcttttggttgtagtgggaattggatccgtctacttccatgcaacccttagtttcttgggtcagatgcttgatgaacttgcagtcctttgggttctgatgtgtgctttggccatgtggttccccagaaggtatctaccaaagatctttcggaatgaccggggtaggttcaaggtggtggtcagtgtcctgtctgcggttacgacgtgcctggcatttgtcaagcctgccatcaacaacatctctctgatgaccctgggagttccttgcactgcactgctcatcgcagagctaaagaggtgtgacaacatgcgtgtgtttaagctgggcctcttctcgggcctctggtggaccctggccctgttctgctggatcagtgaccgagctttctgcgagctgctgtcatccttcaacttcccctacctgcactgcatgtggcacatcctcatctgccttgctgcctacctgggctgtgtatgctttgcctactttgatgctgcctcagagattcctgagcaaggccctgtcatcaagttctggcccaatgagaaatgggccttcattggtgtcccctatgtgtccctcctgtgtgccaacaagaaatcatcagtcaagatcacgtgatggcaagatggtggctggcttctctgcttatcgcccctcatgcagtgggcttcctttgctaggaagacagccaagggagttcgaatagttggggtgtgggctatcttttcaaaaatctatttgctggggctcttaatttctttagtgttctttgtatgtagggatttaaactttgtcatatggtacaaatattccctgcccccctgcagtttcccatttgtctttcagtatgttaatatttttgtgccatactggttttaaactttcatgttgtcacatctgttaatcttttctttaggatttctggattttgtgtaatttttaaaaaggtcccctcctcctccctaatgtgtctgtggaccacctggattccactgtacaaggggaaaagtgtctattcctttcccaaagatggaaaatggagggcttagggacactagatgcatctttctcagcatcacttccagatgcagtgacttgttgggctgcgtccttaatggccatggcagagcagtcccttgggggatccagccctgtacaatgcatctcttcctggagaaagctggcctgctccagaccccaccattcccaggcgcccttggagtggactctactgatgacagacagaccctctgagagacaagaccctctgactctgtgatggaagatgccagagattttcctttggggtaattgtccttaaacaaaaccaaacagatgaaacacacacaggacttgtggctaaaaaggctagtttttcacttgcatttctcaactaacccaggttttacatgcatctgtgaatccttttactactacctctgtggagagatggagagacttcagataaacgtgaagctaatgagtaaaaccctctctgccaaaacctacactccactttaggcccttcttgaagatgagcacaatttttaaatactgagcacaatttttaaatactgacatcacttcctcttccccctcccaccccagctcagcagcctcaaatctacagagaagaagaattatggcatgaacattcccacagacccaccatctttaagacttgacctctgtaagtttaccaaagggctcctcacaattgtggtgggggttctggttcaaaatttggagcaaacatgaagtttttggaaacgttttctcatttgaagcctccagtatgctgtactattctggaaattaccttcaagagtctcacttcttgtttctgttgtgttttctgtgggcatcatgttcttcacgcttgcagtagaaggtgctttctcggtttcccagagtatccaacggctcacctttctcaagtgctggcagtagctatgcactcacgggctggtttgggtcgctggtgcagcagcgcaaatctgtt

SEQ ID NO: 1632 - DNA, 728 bp, Homo sapiens
  source 1..728: mol_type = unassigned DNA
gcggagcgcgggaggccagttgggaggcgcacatccggcggttacccggtgcttcataaagccgctttcgccgctggctgtcgccgcgttttgcctccgcagcagctctgggctcttctcagctgcgcgagcagctgctccaatgccccggagtggccatgggcgccccgcactggtgggaccagctgcaggctggtagctcggaggtggactggtgcgaggacaactacaccatcgtgcctgctatcgccgagttctacaacacgatcagcaatgtcttatttttcattttaccgcccatctgcatgtgcttgtttcgtcagtatgcaacatgcttcaacagtggcatctacttaatctggactcttttggttgtagtgggaattggatccgtctacttccatgcaacccttagtttcttgggtcagatgcttgatgaacttgcagtcctttgggttctgatgtgtgctttggccatgtggttccccagaaggtatctaccaaagatctttcggaatgaccggggtaggttcaaggtggtggtcagtgtcctgtctgcggttacgacgtgcctggcatttgtcaagcctgccatcaacaacatctctctgatgaccctgggagttccttgcactgcactgctcatcgcagagctaaagaggcatgagaggaaccagcgaaggagacacaggaaaggtggccagcaaggaggtggagacaaggtctga

SEQ ID NO: 1633 - DNA, 2550 bp, Homo sapiens
  source 1..2550: mol_type = unassigned DNA
gatttaaacccaggcagcctgcgctgcagccggttcctggtgtccccacttcgcctccctcctgctgcccccaagacatgcaggggccctgggtgctgctgctgctgggcctgaggctacagctctccctgggcgtcatcccagctgaggaggagaacccggccttctggaaccgccaggcagctgaggccctggatgctgccaagaagctgcagcccatccagaaggtcgccaagaacctcatcctcttcctgggcgatgggttgggggtgcccacggtgacagccaccaggatcctaaaggggcagaagaatggcaaactggggcctgagacgcccctggccatggaccgcttcccatacctggctctgtccaagacatacaatgtggacagacaggtgccagacagcgcagccacagccacggcctacctgtgcggggtcaaggccaacttccagaccatcggcttgagtgcagccgcccgctttaaccagtgcaacacgacacgcggcaatgaggtcatctccgtgatgaaccgggccaagcaagcaggaaagtcagtaggagtggtgaccaccacacgggtgcagcacgcctcgccagccggcacctacgcacacacagtgaaccgcaactggtactcagatgctgacatgcctgcctcagcccgccaggaggggtgccaggacatcgccactcagctcatctccaacatggacattgacgtgatccttggcggaggccgcaagtacatgtttcccatggggaccccagaccctgagtacccagctgatgccagccagaatggaatcaggctggacgggaagaacctggtgcaggaatggctggcaaagcaccagggtgcctggtatgtgtggaaccgcactgagctcatgcaggcgtccctggaccagtctgtgacccatctcatgggcctctttgagcccggagacacgaaatatgagatccaccgagaccccacactggacccctccctgatggagatgacagaggctgccctgcgcctgctgagcaggaacccccgcggcttctacctctttgtggagggcggccgcatcgaccatggtcatcatgagggtgtggcttaccaggcactcactgaggcggtcatgttcgacgacgccattgagagggcgggccagctcaccagcgaggaggacacgctgaccctcgtcaccgctgaccactcccatgtcttctcctttggtggctacaccttgcgagggagctccatcttcgggttggcccccagcaaggctcaggacagcaaagcctacacgtccatcctgtacggcaatggcccgggctacgtgttcaactcaggcgtgcgaccagacgtgaatgagagcgagagcgggagccccgattaccagcagcaggcggcggtgcccctgtcgtccgagacccacggaggcgaagacgtggcggtgtttgcgcgcggcccgcaggcgcacctggtgcatggtgtgcaggagcagagcttcgtagcgcatgtcatggccttcgctgcctgtctggagccctacacggcctgcgacctggcgcctcccgcctgcaccaccgacgccgcgcacccagttgccgcgtcgctgccactgctggccgggaccctgctgctgctgggggcgtccgctgctccctgagtgccccactccggagttatcctgctccccacctccgggcgtcctgccctgttccccgtcctgagccgccacttccagcgaacacacacaggtgtcctgccgttggaccttcacctcctagagataaaccagcctcagctggcgcagcggggcccttcttccctccgcatccccttcagggagcaggagcccagggcgccctgggagctgagcctgggacttccaggacctcccctcaggttgttctctgattcttcctcccaaccccagagactgcagatttgtgccatgcggctgcctgcaccccagacaataaagggaccaaaaccacccaacccccaccctgcctctatcctaaggaagaccaagcaggcctggacccagagacgtcccccatcgtgggacacgacacacccagaccgcgtgccccaccgtcttagcttcaatcctggcagcacctggtagacccaaggacttgggtggatcaggacacctgaagaagagaagcttccggcaaccctgcaacccacccaaggaggctactggatcggggattcccaggggggctttgacacagtcctctgctgtctccccactaggatcattccacacccctgcacctgaccaagggaccaatgaggcagaggcttgccccaagtcacagccactcagatgcttcctgccccccagtgcccattccaggtcaccagatccaaggagcgcttgaggagctctgggtacagggcagcaacccagagcccatgggccctcccgggacatctggatgctgggcatagatttctcaacaaggaagactcccctgcctcctcaaggtctccattctcctaggagacaaagcaataataaaaggtgttagacaatgtaa

SEQ ID NO: 1634 - DNA, 1595 bp, Homo sapiens
  source 1..1595: mol_type = unassigned DNA
aacagcccttgcccaccgcagttcctcatgttgccctgctaacatcggtatgtatacacacacatgcacacacgtgaacatgtttgcacatatgctccccacgcatacacacatgctcagcgcctccgccttccagaggtgagcgtccgccagcccagcttggctgctttcttgccaaaccccggggttcccactcgagcacagcggtcttggcctggccccgaacaggcctctgacgccaaggagccagccagaaaccagcggtggaggcagaattgaccacgggcaccatgaaggaaaagccaagcaggccctgcatgaggcggtggagatggaccgggccatcgggcaggcaggcagcttgacctcctcggaagacactctgaccgtggtcactgcggaccattcccacgtcttcacatttggtggatacaccccccgtggcaactctatctttggtctggcccccatgctgagtgacacagacaagaagcccttcactgccatcctgtatggcaatgggcctggctacaaggtggtgggcggtgaacgagagaatgtctccatggtggactatgctcacaacaactaccaggcgcagtctgctgtgcccctgcgccacgagacccacggcggggaggacgtggccgtcttctccaagggccccatggcgcacctgctgcacggcgtccacgagcagaactacgtcccccacgtgatggcgtatgcagcctgcatcggggccaacctcggccactgtgctcctgccagctcggcaggcagccttgctgcaggccccctgctgctcgcgctggccctctaccccctgagcgtcctgttctgagggcccagggcccgggcacccacaagcccgtgacagatgccaacttcccacacggcagcccccccctcaaggggcagggaggtgggggcctcctcagcctctgcaactgcaagaaaggggacccaagaaaccaaagtctgccgcccacctcgctcccctctggaatcttccccaagggccaaacccacttctggcctccagcctttgctccctccccgctgccctttggccaacagggtagatttctcttgggcaggcagagagtacagactgcagacattctcaaagcctcttatttttctagcgaacgtatttctccagacccagaggccctgaagcctccgtggaacattctggatctgaccctcccagtctcatctcctgaccctcccactcccatctccttacctctggaaccccccaggccctacaatgctcatgtccctgtccccaggcccagccctccttcaggggagttgaggtctttctcctcaggacaaggccttgctcactcactcactccaagaccaccagggtcccaggaagccggtgcctgggtggccatcctacccagcgtggcccaggccgggaagagccacctggcagggctcacactcctgggctctgaacacacacgccagctcctctctgaagcgactctcctgtttggaacggcaaaaaaaaatttttttttctctttttggtggtggttaaaagggaacacaaaacatttaaataaaactttccaaat

SEQ ID NO: 1635 - DNA, 733 bp, Homo sapiens
  source 1..733: mol_type = unassigned DNA
agcactcccacttcatctggaaccgcacggaactcctgacccttgacccccacaatgtggactacctattgggaggcagaattgaccacgggcaccatgaaggaaaagccaagcaggccctgcatgaggcggtggagatggaccgggccatcgggcaggcaggcagcttgacctcctcggaagacactctgaccgtggtcactgcggaccattcccacgtcttcacatttggtggatacaccccccgtggcaactctatctttggtctggcccccatgctgagtgacacagacaagaagcccttcactgccatcctgtatggcaatgggcctggctacaaggtggtgggcggtgaacgagagaatgtctccatggtggactatgctcacaacaactaccaggcgcagtctgctgtgcccctgcgccacgagacccacggcggggaggacgtggccgtcttctccaagggccccatggcgcacctgctgcacggcgtccacgagcagaactacgtcccccacgtgatggcgtatgcagcctgcatcggggccaacctcggccactgtgctcctgccagctcggcaggcagccttgctgcaggccccctgctgctcgcgctggccctctaccccctgagcgtcctgttctgagggcccagggcccgggcacccacaagcccgtgacagatgccaacttcccacacggcagcccccccctcaaggggcagggaggt

SEQ ID NO: 1636 - DNA, 2193 bp, Homo sapiens
  source 1..2193: mol_type = unassigned DNA
agaaactcccggtgtggcagctgagatggcccaggaaagaactatattaccttcaaaaagagaggtacatgcgatgtttgaggtggcatgaagctcagtggtgttatattggaatgagtgagtgaccatcctggagccttcctgaaagaggattggaacatcagttaacatctgaccactgccagcccaccccctcccacccacgtcgattgcatctctgggctccagggataaagcaggtcttggggtgcaccatgatttcaccattcttagtactggccattggcacctgccttactaactccttagtgccagagaaagagaaagaccccaagtactggcgagaccaagcgcaagagacactgaaatatgccctggagcttcagaagctcaacaccaacgtggctaagaatgtcatcatgttcctgggagatgggatgggtgtctccacagtgacggctgcccgcatcctcaagggtcagctccaccacaaccctggggaggagaccaggctggagatggacaagttccccttcgtggccctctccaagacgtacaacaccaatgcccaggtccctgacagtgccggcaccgccaccgcctacctgtgtggggtgaaggccaatgagggcaccgtgggggtaagcgcagccactgagcgttcccggtgcaacaccacccaggggaacgaggtcacctccatcctgcgctgggccaaggacgctgggaaatctgtgggcattgtgaccaccacgagagtgaaccatgccacccccagcgccgcctacgcccactcggctgaccgggactggtactcagacaacgagatgccccctgaggccttgagccagggctgtaaggacatcgcctaccagctcatgcataacatcagggacattgacgtgatcatggggggtggccggaaatacatgtaccccaagaataaaactgatgtggagtatgagagtgacgagaaagccaggggcacgaggctggacggcctggacctcgttgacacctggaagagcttcaaaccgagatacaagcactcccacttcatctggaaccgcacggaactcctgacccttgacccccacaatgtggactacctattgggtctcttcgagccaggggacatgcagtacgagctgaacaggaacaacgtgacggacccgtcactctccgagatggtggtggtggccatccagatcctgcggaagaaccccaaaggcttcttcttgctggtggaaggaggcagaattgaccacgggcaccatgaaggaaaagccaagcaggccctgcatgaggcggtggagatggaccgggccatcgggcaggcaggcagcttgacctcctcggaagacactctgaccgtggtcactgcggaccattcccacgtcttcacatttggtggatacaccccccgtggcaactctatctttggtctggcccccatgctgagtgacacagacaagaagcccttcactgccatcctgtatggcaatgggcctggctacaaggtggtgggcggtgaacgagagaatgtctccatggtggactatgctcacaacaactaccaggcgcagtctgctgtgcccctgcgccacgagacccacggcggggaggacgtggccgtcttctccaagggccccatggcgcacctgctgcacggcgtccacgagcagaactacgtcccccacgtgatggcgtatgcagcctgcatcggggccaacctcggccactgtgctcctgccagctcggcaggcagccttgctgcaggccccctgctgctcgcgctggccctctaccccctgagcgtcctgttctgagggcccagggcccgggcacccacaagcccgtgacagatgccaacttcccacacggcagcccccccctcaaggggcagggaggtgggggcctcctcagcctctgcaactgcaagaaaggggacccaagaaaccaaagtctgccgcccacctcgctcccctctggaatcttccccaagggccaaacccacttctggcctccagcctttgctccctccccgctgccctttggccaacagggtagatttctcttgggcaggcagagagtacagactgcagacattctcaaagcctcttatttttctagcgaacgtatttctccagacccagaggccctgaagcctccgtggaacattctggatctgac

SEQ ID NO: 1637 - DNA, 2589 bp, Homo sapiens
  source 1..2589: mol_type = unassigned DNA
tcactcgggccccgcggccgcctttataaggcggcgggggtggtggcccgggccgcgttgcgctcccgccactccgcgcccgctatcctggctccgtgctcccacgcgcttgtgcctggacggaccctcgccagtgctctgcgcaggattggaacatcagttaacatctgaccactgccagcccaccccctcccacccacgtcgattgcatctctgggctccagggataaagcaggtcttggggtgcaccatgatttcaccattcttagtactggccattggcacctgccttactaactccttagtgccagagaaagagaaagaccccaagtactggcgagaccaagcgcaagagacactgaaatatgccctggagcttcagaagctcaacaccaacgtggctaagaatgtcatcatgttcctgggagatgggatgggtgtctccacagtgacggctgcccgcatcctcaagggtcagctccaccacaaccctggggaggagaccaggctggagatggacaagttccccttcgtggccctctccaagacgtacaacaccaatgcccaggtccctgacagtgccggcaccgccaccgcctacctgtgtggggtgaaggccaatgagggcaccgtgggggtaagcgcagccactgagcgttcccggtgcaacaccacccaggggaacgaggtcacctccatcctgcgctgggccaaggacgctgggaaatctgtgggcattgtgaccaccacgagagtgaaccatgccacccccagcgccgcctacgcccactcggctgaccgggactggtactcagacaacgagatgccccctgaggccttgagccagggctgtaaggacatcgcctaccagctcatgcataacatcagggacattgacgtgatcatggggggtggccggaaatacatgtaccccaagaataaaactgatgtggagtatgagagtgacgagaaagccaggggcacgaggctggacggcctggacctcgttgacacctggaagagcttcaaaccgagatacaagcactcccacttcatctggaaccgcacggaactcctgacccttgacccccacaatgtggactacctattgggtctcttcgagccaggggacatgcagtacgagctgaacaggaacaacgtgacggacccgtcactctccgagatggtggtggtggccatccagatcctgcggaagaaccccaaaggcttcttcttgctggtggaaggaggcagaattgaccacgggcaccatgaaggaaaagccaagcaggccctgcatgaggcggtggagatggaccgggccatcgggcaggcaggcagcttgacctcctcggaagacactctgaccgtggtcactgcggaccattcccacgtcttcacatttggtggatacaccccccgtggcaactctatctttggtctggcccccatgctgagtgacacagacaagaagcccttcactgccatcctgtatggcaatgggcctggctacaaggtggtgggcggtgaacgagagaatgtctccatggtggactatgctcacaacaactaccaggcgcagtctgctgtgcccctgcgccacgagacccacggcggggaggacgtggccgtcttctccaagggccccatggcgcacctgctgcacggcgtccacgagcagaactacgtcccccacgtgatggcgtatgcagcctgcatcggggccaacctcggccactgtgctcctgccagctcggcaggcagccttgctgcaggccccctgctgctcgcgctggccctctaccccctgagcgtcctgttctgagggcccagggcccgggcacccacaagcccgtgacagatgccaacttcccacacggcagcccccccctcaaggggcagggaggtgggggcctcctcagcctctgcaactgcaagaaaggggacccaagaaaccaaagtctgccgcccacctcgctcccctctggaatcttccccaagggccaaacccacttctggcctccagcctttgctccctccccgctgccctttggccaacagggtagatttctcttgggcaggcagagagtacagactgcagacattctcaaagcctcttatttttctagcgaacgtatttctccagacccagaggccctgaagcctccgtggaacattctggatctgaccctcccagtctcatctcctgaccctcccactcccatctccttacctctggaaccccccaggccctacaatgctcatgtccctgtccccaggcccagccctccttcaggggagttgaggtctttctcctcaggacaaggccttgctcactcactcactccaagaccaccagggtcccaggaagccggtgcctgggtggccatcctacccagcgtggcccaggccgggaagagccacctggcagggctcacactcctgggctctgaacacacacgccagctcctctctgaagcgactctcctgtttggaacggcaaaaaaaaatttttttttctctttttggtggtggttaaaagggaacacaaaacatttaaataaaactttccaaatatttccgaggaca

SEQ ID NO: 1638 - DNA, 2336 bp, Homo sapiens
  source 1..2336: mol_type = unassigned DNA
atgatttcaccattcttagtactggccattggcacctgccttactaactccttagtgccagagaaagagaaagaccccaagtactggcgagaccaagcgcaagagacactgaaatatgccctggagcttcagaagctcaacaccaacgtggctaagaatgtcatcatgttcctgggagatgggatgggtgtctccacagtgacggctgcccgcatcctcaagggtcagctccaccacaaccctggggaggagaccaggctggagatggacaagttccccttcgtggccctctccaagacgtacaacaccaatgcccaggtccctgacagtgccggcaccgccaccgcctacctgtgtggggtgaaggccaatgagggcaccgtgggggtaagcgcagccactgagcgttcccggtgcaacaccacccaggggaacgaggtcacctccatcctgcgctgggccaaggacgctgggaaatctgtgggcattgtgaccaccacgagagtgaaccatgccacccccagcgccgcctacgcccactcggctgaccgggactggtactcagacaacgagatgccccctgaggccttgagccagggctgtaaggacatcgcctaccagctcatgcataacatcagggacattgacgtgatcatggggggtggccggaaatacatgtaccccaagaataaaactgatgtggagtatgagagtgacgagaaagccaggggcacgaggctggacggcctggacctcgttgacacctggaagagcttcaaaccgagatacaagcactcccacttcatctggaaccgcacggaactcctgacccttgacccccacaatgtggactacctattgggtctcttcgagccaggggacatgcagtacgagctgaacaggaacaacgtgacggacccgtcactctccgagatggtggtggtggccatccagatcctgcggaagaaccccaaaggcttcttcttgctggtggaaggaggcagaattgaccacgggcaccatgaaggaaaagccaagcaggccctgcatgaggcggtggagatggaccgggccatcgggcaggcaggcagcttgacctcctcggaagacactctgaccgtggtcactgcggaccattcccacgtcttcacatttggtggatacaccccccgtggcaactctatctttggtctggcccccatgctgagtgacacagacaagaagcccttcactgccatcctgtatggcaatgggcctggctacaaggtggtgggcggtgaacgagagaatgtctccatggtggactatgctcacaacaactaccaggcgcagtctgctgtgcccctgcgccacgagacccacggcggggaggacgtggccgtcttctccaagggccccatggcgcacctgctgcacggcgtccacgagcagaactacgtcccccacgtgatggcgtatgcagcctgcatcggggccaacctcggccactgtgctcctgccagctcggcaggcagccttgctgcaggccccctgctgctcgcgctggccctctaccccctgagcgtcctgttctgagggcccagggcccgggcacccacaagcccgtgacagatgccaacttcccacacggcagcccccccctcaaggggcagggaggtgggggcctcctcagcctctgcaactgcaagaaaggggacccaagaaaccaaagtctgccgcccacctcgctcccctctggaatcttccccaagggccaaacccacttctggcctccagcctttgctccctccccgctgccctttggccaacagggtagatttctcttgggcaggcagagagtacagactgcagacattctcaaagcctcttatttttctagcgaacgtatttctccagacccagaggccctgaagcctccgtggaacattctggatctgaccctcccagtctcatctcctgaccctcccactcccatctccttacctctggaaccccccaggccctacaatgctcatgtccctgtccccaggcccagccctccttcaggggagttgaggtctttctcctcaggacaaggccttgctcactcactcactccaagaccaccagggtcccaggaagccggtgcctgggtggccatcctacccagcgtggcccaggccgggaagagccacctggcagggctcacactcctgggctctgaacacacacgccagctcctctctgaagcgactctcctgtttggaacggcaaaaaaaaatttttttttctctttttggtggtggttaaaagggaacacaaaacatttaaataaaactttccaaatatttccgagg

SEQ ID NO: 1639 - DNA, 2312 bp, Homo sapiens
  source 1..2312: mol_type = unassigned DNA
ccgggcctcactcgggccccgcggccgcctttataaggcggcgggggtggtggcccgggccgcgttgcgctcccgccactccgcgcccgctatcctggctccgtgctcccacgcgcttgtgcctggacggaccctcgccagtgctctgcgcagagaaagagaaagaccccaagtactggcgagaccaagcgcaagagacactgaaatatgccctggagcttcagaagctcaacaccaacgtggctaagaatgtcatcatgttcctgggagatgacgtacaacaccaatgcccaggtccctgacagtgccggcaccgccaccgcctacctgtgtggggtgaaggccaatgagggcaccgtgggggtaagcgcagccactgagcgttcccggtgcaacaccacccaggggaacgaggtcacctccatcctgcgctgggccaaggacgctgggaaatctgtgggcattgtgaccaccacgagagtgaaccatgccacccccagcgccgcctacgcccactcggctgaccgggactggtactcagacaacgagatgccccctgaggccttgagccagggctgtaaggacatcgcctaccagctcatgcataacatcagggacattgacgtgatcatggggggtggccggaaatacatgtaccccaagaataaaactgatgtggagtatgagagtgacgagaaagccaggggcacgaggctggacggcctggacctcgttgacacctggaagagcttcaaaccgagatacaagcactcccacttcatctggaaccgcacggaactcctgacccttgacccccacaatgtggactacctattgggtctcttcgagccaggggacatgcagtacgagctgaacaggaacaacgtgacggacccgtcactctccgagatggtggtggtggccatccagatcctgcggaagaaccccaaaggcttcttcttgctggtggaaggaggcagaattgaccacgggcaccatgaaggaaaagccaagcaggccctgcatgaggcggtggagatggaccgggccatcgggcaggcaggcagcttgacctcctcggaagacactctgaccgtggtcactgcggaccattcccacgtcttcacatttggtggatacaccccccgtggcaactctatctttggtctggcccccatgctgagtgacacagacaagaagcccttcactgccatcctgtatggcaatgggcctggctacaaggtggtgggcggtgaacgagagaatgtctccatggtggactatgctcacaacaactaccaggcgcagtctgctgtgcccctgcgccacgagacccacggcggggaggacgtggccgtcttctccaagggccccatggcgcacctgctgcacggcgtccacgagcagaactacgtcccccacgtgatggcgtatgcagcctgcatcggggccaacctcggccactgtgctcctgccagctcggcaggcagccttgctgcaggccccctgctgctcgcgctggccctctaccccctgagcgtcctgttctgagggcccagggcccgggcacccacaagcccgtgacagatgccaacttcccacacggcagcccccccctcaaggggcagggaggtgggggcctcctcagcctctgcaactgcaagaaaggggacccaagaaaccaaagtctgccgcccacctcgctcccctctggaatcttccccaagggccaaacccacttctggcctccagcctttgctccctccccgctgccctttggccaacagggtagatttctcttgggcaggcagagagtacagactgcagacattctcaaagcctcttatttttctagcgaacgtatttctccagacccagaggccctgaagcctccgtggaacattctggatctgaccctcccagtctcatctcctgaccctcccactcccatctccttacctctggaaccccccaggccctacaatgctcatgtccctgtccccaggcccagccctccttcaggggagttgaggtctttctcctcaggacaaggccttgctcactcactcactccaagaccaccagggtcccaggaagccggtgcctgggtggccatcctacccagcgtggcccaggccgggaagagccacctggcagggctcacactcctgggctctgaacacacacgccagctcctctctgaagcgactctcctgtttggaacggcaaaaaaaaatttttttttctctttttggtggtggttaaaagggaacacaaaacatttaaataaaactttccaaatatttccgagg

SEQ ID NO: 1640 - DNA, 2428 bp, Homo sapiens
  source 1..2428: mol_type = unassigned DNA
ccgggcctcactcgggccccgcggccgcctttataaggcggcgggggtggtggcccgggccgcgttgcgctcccgccactccgcgcccgctatcctggctccgtgctcccacgcgcttgtgcctggacggaccctcgccagtgctctgcgcagagaaagagaaagaccccaagtactggcgagaccaagcgcaagagacactgaaatatgccctggagcttcagaagctcaacaccaacgtggctaagaatgtcatcatgttcctgggagatgggatgggtgtctccacagtgacggctgcccgcatcctcaagggtcagctccaccacaaccctggggaggagaccaggctggagatggacaagttccccttcgtggccctctccaagacgtacaacaccaatgcccaggtccctgacagtgccggcaccgccaccgcctacctgtgtggggtgaaggccaatgagggcaccgtgggggtaagcgcagccactgagcgttcccggtgcaacaccacccaggggaacgaggtcacctccatcctgcgctgggccaaggacgctgggaaatctgtgggcattgtgaccaccacgagagtgaaccatgccacccccagcgccgcctacgcccactcggctgaccgggactggtactcagacaacgagatgccccctgaggccttgagccagggctgtaaggacatcgcctaccagctcatgcataacatcagggacattgacgtgatcatggggggtggccggaaatacatgtaccccaagaataaaactgatgtggagtatgagagtgacgagaaagccaggggcacgaggctggacggcctggacctcgttgacacctggaagagcttcaaaccgagatacaagcactcccacttcatctggaaccgcacggaactcctgacccttgacccccacaatgtggactacctattgggtctcttcgagccaggggacatgcagtacgagctgaacaggaacaacgtgacggacccgtcactctccgagatggtggtggtggccatccagatcctgcggaagaaccccaaaggcttcttcttgctggtggaaggaggcagaattgaccacgggcaccatgaaggaaaagccaagcaggccctgcatgaggcggtggagatggaccgggccatcgggcaggcaggcagcttgacctcctcggaagacactctgaccgtggtcactgcggaccattcccacgtcttcacatttggtggatacaccccccgtggcaactctatctttggtctggcccccatgctgagtgacacagacaagaagcccttcactgccatcctgtatggcaatgggcctggctacaaggtggtgggcggtgaacgagagaatgtctccatggtggactatgctcacaacaactaccaggcgcagtctgctgtgcccctgcgccacgagacccacggcggggaggacgtggccgtcttctccaagggccccatggcgcacctgctgcacggcgtccacgagcagaactacgtcccccacgtgatggcgtatgcagcctgcatcggggccaacctcggccactgtgctcctgccagctcggcaggcagccttgctgcaggccccctgctgctcgcgctggccctctaccccctgagcgtcctgttctgagggcccagggcccgggcacccacaagcccgtgacagatgccaacttcccacacggcagcccccccctcaaggggcagggaggtgggggcctcctcagcctctgcaactgcaagaaaggggacccaagaaaccaaagtctgccgcccacctcgctcccctctggaatcttccccaagggccaaacccacttctggcctccagcctttgctccctccccgctgccctttggccaacagggtagatttctcttgggcaggcagagagtacagactgcagacattctcaaagcctcttatttttctagcgaacgtatttctccagacccagaggccctgaagcctccgtggaacattctggatctgaccctcccagtctcatctcctgaccctcccactcccatctccttacctctggaaccccccaggccctacaatgctcatgtccctgtccccaggcccagccctccttcaggggagttgaggtctttctcctcaggacaaggccttgctcactcactcactccaagaccaccagggtcccaggaagccggtgcctgggtggccatcctacccagcgtggcccaggccgggaagagccacctggcagggctcacactcctgggctctgaacacacacgccagctcctctctgaagcgactctcctgtttggaacggcaaaaaaaaatttttttttctctttttggtggtggttaaaagggaacacaaaacatttaaataaaactttccaaatatttccgagg

SEQ ID NO: 1641 - DNA, 2971 bp, Homo sapiens
  source 1..2971: mol_type = unassigned DNA
aataccgcacccttccctgggggacacctggtcccaacctgagctgcctttctcaggaccccagccccagcccggcccagcccagccacaccctgccactcccttcagccagtgtggcttcaggtcaagaggctgggcagggtcaaggtggcaacgaggggagaagccgggacacagttctccctgatttaaacccgggcagcctggagtgcagctcatactccatgcccagaattcctgcctcgccactgtcctgctgccctccagacatgctggggccctgcatgctgctgctgctgctgctgctgggcctgaggctacagctctccctgggcatcatcccagttgaggaggagaacccggacttctggaaccgcgaggcagccgaggccctgggtgccgccaagaagctgcagcctgcacagacagccgccaagaacctcatcatcttcctgggcgatgggatgggggtgtctacggtgacagctgccaggatcctaaaagggcagaagaaggacaaactggggcctgagatacccctggccatggaccgcttcccatatgtggctctgtccaagacatacaatgtagacaaacatgtgccagacagtggagccacagccacggcctacctgtgcggggtcaagggcaacttccagaccattggcttgagtgcagccgcccgctttaaccagtgcaacacgacacgcggcaacgaggtcatctccgtgatgaatcgggccaagaaagcagggaagtcagtgggagtggtaaccaccacacgagtgcagcacgcctcgccagccggcacctacgcccacacggtgaaccgcaactggtactcggacgccgacgtgcctgcctccgcccgccaggaggggtgccaggacatcgctacgcagctcatctccaacatggacattgacgtgatcctaggtggaggccgaaagtacatgtttcgcatgggaaccccagaccctgagtacccagatgactacagccaaggtgggaccaggctggacgggaagaatctggtgcaggaatggctggcgaagcgccagggtgcccggtatgtgtggaaccgcactgagctcatgcaggcttccctggacccgtctgtgacccatctcatgggtctctttgagcctggagacatgaaatacgagatccaccgagactccacactggacccctccctgatggagatgacagaggctgccctgcgcctgctgagcaggaacccccgcggcttcttcctcttcgtggagggtggtcgcatcgaccatggtcatcatgaaagcagggcttaccgggcactgactgagacgatcatgttcgacgacgccattgagagggcgggccagctcaccagcgaggaggacacgctgagcctcgtcactgccgaccactcccacgtcttctccttcggaggctaccccctgcgagggagctccatcttcgggctggcccctggcaaggcccgggacaggaaggcctacacggtcctcctatacggaaacggtccaggctatgtgctcaaggacggcgcccggccggatgttaccgagagcgagagcgggagccccgagtatcggcagcagtcagcagtgcccctggacgaagagacccacgcaggcgaggacgtggcggtgttcgcgcgcggcccgcaggcgcacctggttcacggcgtgcaggagcagaccttcatagcgcacgtcatggccttcgccgcctgcctggagccctacaccgcctgcgacctggcgccccccgccggcaccaccgacgccgcgcacccggggcggtccgtggtccccgcgttgcttcctctgctggccgggaccctgctgctgctggagacggccactgctccctgagtgtcccgtccctggggctcctgcttccccatcccggagttctcctgctccccacctcctgtcgtcctgcctggcctccagcccgagtcgtcatccccggagtccctatacagaggtcctgccatggaaccttcccctccccgtgcgctctggggactgagcccatgacaccaaacctgccccttggctgctctcggactccctaccccaaccccagggactgcaggttgtgccctgtggctgcctgcaccccaggaaaggagggggctcaggccatccagccaccacctacagcccagtgggtaccaggcaggctcccttcctggggaaaagaagcacccagaccccgcgccccgctgatctttgcttcagtccttgaatcacctgtgggacttgaggactcgggatcttcaggacgcctggagaagggtggtttcctgccaccctgctggccaaggaggctcctggggtggggatcaccagggggattttgacacagccttcggctgccccccactaagctaattccacacccctgtacccccccagggggccctctgcctcatggcaaaggcttgccccaaatctcaacttctcagacgttccatacccccacatgccaatttcagcacccaactgagatccgaggagctcctgggaagccctgggtgcaggacactggtcgagagccaaaggtccctccccagacatctggacactgggcatagatttctcaagaaggaagactcccctgcctccccagggcctctgctctcctgggagacaaagcaataataaaaggaagtgtttgtaatcccagcactttgggaggccgaggtgggcggatcacgaggtcaggagatggagaccatcctggctaacacggtgaaaccccttatctatgcgcctgtagtcccagctacccaggaggctgaagcaggataatcgcttgaacccgggcggcggagattgcagtgagccgaggtcatgccactgcactgcagcctgggcgacagagcgagattctgcctcaaaaataaacaaataaattttaaaaataaataaataataaaaggaagtgttagacaatgtaa

SEQ ID NO: 1642 - DNA, 2493 bp, Homo sapiens
  source 1..2493: mol_type = unassigned DNA
catactccatacctgggatttccgcctcgccgctctccgactgcttccagacatgcaggggccctgggtgctgctcctgctgggcctgaggctacagctctccctgggcatcatcccagttgaggaggagaacccggacttctggaaccgccaggcagccgaggccctgggtgccgccaagaagctgcagcctgcacagacagccgccaagaacctcatcatcttcctgggtgacgggatgggggtgtctacggtgacagctgccaggatcctaaaagggcagaagaaggacaaactggggcctgagaccttcctggccatggaccgcttcccgtacgtggctctgtccaagacatacagtgtagacaagcatgtgccagacagtggagccacagccacggcctacctgtgcggggtcaagggcaacttccagaccattggcttgagtgcagccgcccgctttaaccagtgcaacacgacacgcggcaacgaggtcatctccgtgatgaatcgggccaagaaagcaggaaagtcagtgggagtggtaaccaccacacgggtgcagcatgcctcgccagccggcgcctacgcccacacggtgaaccgcaactggtactcggatgccgacgtgcctgcctcggcccgccaggaggggtgccaggacatcgccacgcagctcatctccaacatggacattgatgtgatcctaggtggaggccgaaagtacatgtttcccatggggaccccagaccctgagtacccagatgactacagccaaggtgggaccaggctggacgggaagaatctggtgcaggaatggctggcgaagcaccagggtgcccggtacgtgtggaaccgcactgagctcctgcaggcttccctggacccgtctgtgacccatctcatgggtctctttgagcctggagacatgaaatacgagatccaccgagactccacactggacccctccctgatggagatgacagaggctgccctgctcctgctgagcaggaacccccgcggcttcttcctcttcgtggagggtggtcgcatcgaccatggtcatcatgaaagcagggcttaccgggcactgactgagacgatcatgttcgacgacgccattgagagggcgggccagctcaccagcgaggaggacacgctgagcctcgtcactgccgaccactcccacgtcttctccttcggaggctaccccctgcgagggagctccatcttcgggctggcccctggcaaggcccgggacaggaaggcctacacggtcctcctatacggaaacggtccaggctatgtgctcaaggacggcgcccggccggatgttacggagagcgagagcgggagccccgagtatcggcagcagtcagcagtgcccctggacggagagacccacgcaggcgaggacgtggcggtgttcgcgcgcggcccgcaggcgcacctggttcacggcgtgcaggagcagaccttcatagcgcacgtcatggccttcgccgcctgcctggagccctacaccgcctgcgacctggcgccccgcgccggcaccaccgacgccgcgcacccggggccgtccgtggtccccgcgttgcttcctctgctggcagggaccttgctgctgctggggacggccactgctccctgagtgtcccgtccctggggctcctgcttccccatcccggagttcccctgctccccacctccagtcgtcctgccggacctccacctggagctgtcacccccggagtcgccacacagacgtcctgccatggaaccttcccctcccggtgcaccctggggaccgagcccttgacaccacgccctttgctttatcttgctcttgaaattttggccccaactccagggactggggatttgtgcctggcagctgcctgcatttcaggaaaagaggaggctcagaccatccagcccccgcccatatcctgaggtggatcaggcaggctctctccccggggacatgaggcacccatacctaggaccccctgcgccttttttagcttcagtcatggcagcacctgagggacacaaggacttgggtgcatcaggacgccttggagaagcgtggcttcctgccaccctgcaacccaccctcccagccaaggaggctgctgtggtggggatccccaggggggctttgacacagtcctctgctgtccctccactgggctaattctacacccctgtgcccctcctaggggcccatgagtcagagaggcttgccccaagtcacagccactcagatgttcgacgccccctaaggtccattccagcacccacctgagttccgaggagcacctgggaagctctgggtgcaggatagcagtccagagtccatggccccgcctaggccatctgggtgctgggcatggatttctcagcaaggaagactcattaccttccctccctgggcctccattcttctgggaaacacaaagcaataataaaaggaagtgttagacaatgtaa

SEQ ID NO: 1643 - DNA, 574 bp, Homo sapiens
  source 1..574: mol_type = unassigned DNA
aggatggacagattcctggtgaaaggggctcaagggggccttttgaggaagcaggaggagcaagagccaactggagaagagccagctgtgttgggaggagacaaagaaagcacaaggaagaggcccaggagagaggccccagggaatggaggccactcagcaggccctagctggcggcacattcgggctgagggcctggactgcagttacacagtcctgtttggcaaagctgaggcagatgagattttccaagagttggagaaagaagtagaatattttacaggtataaagatggctgtgaccacatcggggagcaccgagatgatgaaagagaactggcccctgggagccccattgcctctgtctccttcggtgcctgcagagactttgtcttccggcataaggattcccgtgggaaaagcccctccaggagggtggcggtggtcaggctgccgctggcccacgggagcttactaatgatgaaccacccgaccaacacgcactggtaccacagtcttcccgtgagaaagaaggttctggctccacgggtgaatctgacttttcgtaaaatttt

SEQ ID NO: 1644 - DNA, 2594 bp, Homo sapiens
  source 1..2594: mol_type = unassigned DNA
gggtataggccgcgagatggggaagatggcagcggccgtgggctctgtggcgactctggcgactgagcccggggaggacgcctttcggaaacttttccgcttctaccgtcagagccggcccgggaccgcagacctggaaggggtcatcgacttctcggcggcccacgcagcccgtggcaagggtcctggtgcccaaaaggtgatcaaatctcagctaaatgtgtcttctgtcagtgagcagaatgcatatagagcaggtcttcagcccgtcagcaagtggcaagcctatggactcaaaggctatcctgggtttatttttatcccaaaccccttcctcccaggttaccagtggcactgggtgaaacagtgccttaagttatattcccagaaacctaatgtatgtaacctggacaaacacatgtctaaagaagagacccaagatctgtgggaacagagcaaagagttcctgaggtataaagaagcgactaaacggagaccccgaagtttactggagaaactgcgttgggtgaccgtaggctaccattataactgggacagtaagaaatactcagcagatcattacacacctttcccttctgacctgggtttcctctcagagcaagtagccgctgcctgtggatttgaggatttccgagctgaagcagggatcctgaattactaccgcctggactccacactgggaatccacgtagacagatctgagctagatcactccaaacccttgctgtcattcagctttggacagtccgccatctttctcctgggtggtcttcaaagggatgaggcccccacggccatgtttatgcacagtggtgacatcatgataatgtcgggtttcagccgcctcttgaaccacgcagtccctcgtgtccttccaaatccagaaggggaaggcctgcctcactgcctagaggcacctctccctgctgtcctcccgagagattcaatggtagagccttgttctatggaggactggcaggtgtgtgccagctacttgaagaccgctcgtgttaacatgactgtccgacaggtcctggccacagaccagaatttccctctagaacccatcgaggatgaaaaaagagacatcagtacagaaggtttctgccatctggatgaccagaatagcgaagtaaaacgggccaggataaaccctgacagctgagacttggagatcccatcctttttactcaggcacctgcttaccgtaaatgatcatgttattgtgtattgccgtggacttcagcacccagacaagccaaaaacagagacagggaagaactcattgttgatcacactgttgccttggaacccacgcagaagtaaactcagccactttgctcagagaagtgtttgacatggtctgttcctagttacatgttggctgtaatgtatgttgagaagtcagtccaaggaggtatgttcttccacaacagccttctcagcctctgctatttcctttgaggaaggtagaagtgagtttccatgtttgcagagtatttaaatacctcagattttattaatgagaaatacagtacccctccctccactccatctggtaatttatggtaaaattgtggttctgtgaaccagctattagtctcatcttcttaactccctcaggcatcatcaaattctttgatcttctcttccacctctctggctctcatggaagaatcctttacacatgaaaacaatggaactggaaaatcttgtcttttagaaaagaaattaatcacaactatctctcttgcctaaaagataaatataggtaaacccaaggaaaggggaatttagtttctctacatgtcatttcggtctccaaactccctgttggctttttaatgcaattttaattgttggaataaaaaagtcccaagggtgttttgttactgttttctccatgaataaactcacttgattttaaattaaagatctatatctgtctttggggtttagtctatctgggattaaggtttttttttctgtttttctttgctgtattgttcatgctattgaagccctctagctgtttctgccctacaccattctgctgtgccctaagtattctttgtggctgtctcacagaagagagaacatttcttaatattccagtcactgctgttattgtctgagggtaggcagcttggaaaaatgtaggcaacaccaagttttaatctttatacccccaacaatttgactgactatatcatggtccaggttactttacatttctctggacctcggtttcctcatcataaaatgaagatactgtagactaccatcttcctaaagggatattggtatttgaaagagaattaagtgctcctttctacaaacatgatgtgccaaaattgttttattataagggctctttgaaacatcctaacttccttgtgtggaggactggctggaagcccatttggtacctactgtttgcaatgcatgttattaagtttacatgtctcctctgtcctgctctgccccttttttaaattactggcattgaatattgagttcatatggtaatagcagggtttttaaatgaataaaaattatggatttatctctta

SEQ ID NO: 1645 - DNA, 1028 bp, Homo sapiens
  source 1..1028: mol_type = unassigned DNA
gtctttcccaccacgaggccaccagggtgactgcgggattccgatctgcgccggagctgcgatgctagagcactcttgccacccccaccccacggacgtgttgcagtgatatcagaattttgcgtgcggtttacccgtgtttaacctctttgcgtctcgcttctgaatcgtatccacttgagcatcactagactgatctattttaacactggtggggggcagcgaggatggacagattcctggtgaaaggggctcaagggggccttttgaggaagcaggaggagcaagagccaactggagaagagccagctgtgttgggaggagacaaagaaagcacaaggaagaggcccaggagagaggccccagggaatggaggccactcagcaggccctagctggcggcacattcgggctgagggcctggactgcagttacacagtcctgtttggcaaagctgaggcagatgagattttccaagagttggagaaagaagtagaatattttacaggagcactggccagagtccaggtattcgggaagtggcacagtgtgcccaggaagcaggcaacgtatggcgacgctgggctgacctacacattttcaggcctcacgctgtctccaaagccctggatcccagttctagagcgcatccgggatcacgtctctggggtgactggacagaccttcaactttgtgctcatcaacaggtataaagatggctgtgaccacatcggggagcaccgagatgatgaaagagaactggcccctgggagccccattgcctctgtctccttcggtgcctgcagagactttgtcttccggcataaggattcccgtgggaaaagcccctccaggagggtggcggtggtcaggctgccgctggcccacgggagcttactaatgatgaaccacccgaccaacacgcactggtaccacagtcttcccgtgagaaagaaggttctggctccacgggtgaatctgacttttcgtaaaattttgcttactaaaaaataaaaacatttttaacag

SEQ ID NO: 1646 - DNA, 1197 bp, Homo sapiens
  source 1..1197: mol_type = unassigned DNA
cgattcgctggggcgcgtctttcccaccacgaggccaccagggtgactgcgggattccgatctgcgccggagctgcgatgctagagcactcttgccacccccaccccacggacgtgttgcagtgatatcagaattttgcgtgcggtttacccgtgtttaacctctttgcgtctcgcttctgaatcgtatccacttgagcatcactagactgatctattttaacactggtggggggcagcgaggacatggttttaaactttaaaatgaaaatgtgaaactaggaatgttgctgtgagaccccttggacaaacagatttttgcactggggatagaacttgagcaatttctgtcttggcctcgccactgacgtcccttctttcctgtggggacaggatggacagattcctggtgaaaggggctcaagggggccttttgaggaagcaggaggagcaagagccaactggagaagagccagctgtgttgggaggagacaaagaaagcacaaggaagaggcccaggagagaggccccagggaatggaggccactcagcaggccctagctggcggcacattcgggctgagggcctggactgcagttacacagtcctgtttggcaaagctgaggcagatgagattttccaagagttggagaaagaagtagaatattttacaggagcactggccagagtccaggtattcgggaagtggcacagtgtgcccaggaagcaggcaacgtatggcgacgctgggctgacctacacattttcaggcctcacgctgtctccaaagccctggatcccagttctagagcgcatccgggatcacgtctctggggtgactggacagaccttcaactttgtgctcatcaacaggtataaagatggctgtgaccacatcggggagcaccgagatgatgaaagagaactggcccctgggagccccattgcctctgtctccttcggtgcctgcagagactttgtcttccggcataaggattcccgtgggaaaagcccctccaggagggtggcggtggtcaggctgccgctggcccacgggagcttactaatgatgaaccacccgaccaacacgcactggtaccacagtcttcccgtgagaaagaaggttctggctccacgggtgaatctgacttttcgtaaaattttgcttactaaaaaataaaaacatttttaacagttt

SEQ ID NO: 1647 - DNA, 939 bp, Homo sapiens
  source 1..939: mol_type = unassigned DNA
ttttaaactttaaaatgaaaatgtgaaactaggaatgttgctgtgagaccccttggacaaacagatttttgcactggggatagaacttgagcaatttctgtcttggcctcgccactgacgtcccttctttcctgtggggacaggatggacagattcctggtgaaaggggctcaagggggccttttgaggaagcaggaggagcaagagccaactggagaagagccagctgtgttgggaggagacaaagaaagcacaaggaagaggcccaggagagaggccccagggaatggaggccactcagcaggccctagctggcggcacattcgggctgagggcctggactgcagttacacagtcctgtttggcaaagctgaggcagatgagattttccaagagttggagaaagaagtagaatattttacaggagcactggccagagtccaggtattcgggaagtggcacagtgtgcccaggaagcaggcaacgtatggcgacgctgggctgacctacacattttcaggcctcacgctgtctccaaagccctggatcccagttctagagcgcatccgggatcacgtctctggggtgactggacagaccttcaactttgtgctcatcaacaggtataaagatggctgtgaccacatcggggagcaccgagatgatgaaagagaactggcccctgggagccccattgcctctgtctccttcggtgcctgcagagactttgtcttccggcataaggattcccgtgggaaaagcccctccaggagggtggcggtggtcaggctgccgctggcccacgggagcttactaatgatgaaccacccgaccaacacgcactggtaccacagtcttcccgtgagaaagaaggttctggctccacgggtgaatctgacttttcgtaaaattttgcttactaaaaaataaaaacatttt

SEQ ID NO: 1648 - DNA, 572 bp, Homo sapiens
  source 1..572: mol_type = unassigned DNA
tttcccaccacgaggccaccagggtgactgcgggattccgatctgcgccggagctgcgatgctagagcactcttgccacccccaccccacggacgtgttgcagtgatatcagaattttgcgatggacagattcctggtgaaaggggctcaagggggccttttgaggaagcaggaggagcaagagccaactggagaagagccagctgtgttgggaggagacaaagaaagcacaaggaagaggcccaggagagaggccccagggaatggaggccactcagcaggccctagctggcggcacattcgggctgagggcctggactgcagttacacagtcctgtttggcaaagctgaggcagatgagattttccaagagttggagaaagaagtagaatattttacaggagcactggccagagtccaggtattcgggaagtggcacagtgtgcccaggaagcaggcaacgtatggcgacgctgggctgacctacacattttcaggcctcacgctgtctccaaagccctggatcccagttctagagcgcatccgggatcacgtctctggggtgactggac

SEQ ID NO: 1649 - DNA, 1049 bp, Homo sapiens
  source 1..1049: mol_type = unassigned DNA
gtctttcccaccacgaggccaccagggtgactgcgggattccgatctgcgccggagctgcgatgctagagcactcttgccacccccaccccacggacgtgttgcagtgatatcagaattttgcgtgcggtttacccgtgtttaacctctttgcgtctcgcttctgaatcgtatccacttgagcatcactagactgatctattttaacactggtggggggcagcgaggtcagttatgggtccttcctccttaaaggggtggacagttgactttgggcaaacctcttcgcctctgtgggcaacagtttccccttctgcaaaatgagggtttggattgtagtttctaagtttagctgtggcgtgcgaattcccaggaggtagttctttaaaaattcaggtgctcaggcgtggagtgcagacctctgggtttttgcaagctagccagctgattctgatgcacaggtggacgtgggagaccctggatcagattgtccctagggtcccttccggctttaacatcttctgtttcctttctaggacatggttttaaactttaaaatgaaaatgtgaaactaggaatgttgctgtgagaccccttggacaaacagatttttgcactggggatagaacttgagcaatttctgtcttggcctcgccactgacgtcccttctttcctgtggggacaggatggacagattcctggtgaaaggggctcaagggggccttttgaggaagcaggaggagcaagagccaactggagaagagccagctgtgttgggaggagacaaagaaagcacaaggaagaggcccaggagagaggccccagggaatggaggccactcagcaggccctagctggcggcacattcgggctgagggcctggactgcagttacacagtcctgtttggcaaagctgaggcagatgagattttccaagagttggagaaagaagtagaatattttacaggagcactggccagagtccaggtattcgggaagtggcacagtgtgcccaggaagcaggcaacgtatggcgacgctgggctgacc

SEQ ID NO: 1650 - DNA, 845 bp, Homo sapiens
  source 1..845: mol_type = unassigned DNA
cgaggccaccagggtgactgcgggattccgatctgcgccggagctgcgatgctagagcactcttgccacccccaccccacggacgtgttgcagtgatatcagaattttgcgtgcggtttacccgtgtttaacctctttgcgtctcgcttctgaatcgtatccacttgagcatcactagactgatctattttaacactggtggggggcagcgaggacatggttttaaactttaaaatgaaaatgtgaaactaggaatgttgctgtgagaccccttggacaaacagatttttgcactggggatagaacttgagcaatttctgtcttggcctcgccactgacgtcccttctttcctgtggggacaggatggacagattcctggtgaaaggggctcaagggggccttttgaggaagcaggaggagcaagagccaactggagaagagccagctgtgttgggaggagacaaagaaagcacaaggaagaggcccaggagagaggccccagggaatggaggccactcagcaggccctagctggcggcacattcgggctgagggcctggactgcagttacacagtcctgtttggcaaagctgaggcagatgagattttccaagagttggagaaagaagtagaatattttacaggagcactggccagagtccaggtattcgggaagtggcacagtgtgcccaggaagcaggcaacgtatggcgacgctgggctgacctacacattttcaggcctcacgctgtctccaaagccctggatcccagttctagagcgcatccgggatcacgtctctggggtgactggacagaccttcaactttgtgctcatcaacaggt

SEQ ID NO: 1651 - DNA, 1474 bp, Homo sapiens
  source 1..1474: mol_type = unassigned DNA
ggttccgatcacagactgcggagtgggtcaggggctgcgagggctgccccaagtcctaccgggtttgcacgggcgcgcccggctccgcccgcaagtgcgccttcctgacttactgctgggtgcgcggggctgggggtgcgagtaccacccctgaagtctcttcctgggcgacctccggggcctcattctaggcctccttaaagagaaggatctaaattaggaaaaggaagtgcccttatccacgaccaagctcttccacctgcggagctcgcttagtctgcacctcaaccgtgcggaaagtgactgccctgtttactgaggaaaaactggggctcagaaagataccatggagtagtttgaaacaggaacaaaatcttctgaaagctcggagcagaagcctttttggtcaacatggaggaaaaaagacggcgagcccgagttcagggagcctgggctgcccctgttaaaagccaggccattgctcagccagctaccactgctaagagccatctccaccagaagcctggccagacctggaagaacaaagagcatcatctctctgacagagagtttgtgttcaaagaacctcagcaggtagtacgtagagctcctgagccacgagtgattgacagagagggtgtgtatgaaatcagcctgtcacccacaggtgtatctagggtctgtttgtatcctggctttgttgacgtgaaagaagctgactggatattggaacagctttgtcaagatgttccctggaaacagaggactggcatcagagaggatataacttatcagcaaccaagacttacagcatggtatggagaacttccttacacttattcaagaatcactatggaaccaaatcctcactggcaccctgtgctgcgcacactaaagaaccgcattgaagagaacactggccacaccttcaactccttactctgcaatctttatcgcaatgagaaggacagcgtggactggcacagtgatgatgaaccctcactagggaggtgccccattattgcttcactaagttttggtgccacacgcacatttgagatgagaaagaagccaccaccagaagagaatggagactacacatatgtggaaagagtgaagatacccttggatcatgggaccttgttaatcatggaaggagcgacacaagctgactggcagcatcgagtgcccaaagaataccactctagagaaccgagagtgaacctgacctttcggacagtctatccagaccctcgaggggcaccctggtgacgtcagagctttgagagagaagcttcactgaaacggagcaaaccttccactgagaagccacttcaagaggctggtgctgctagatctcatgatgtggctgttgggaagatggtggggtttgtttgccagcttggagtcctattaaatgaaagccagcaactcatgttggtaataggtctactgtgggaacagttatccctaa

SEQ ID NO: 1652 - DNA, 918 bp, Homo sapiens
  source 1..918: mol_type = unassigned DNA
gatcacagactgcggagtgggtcaggggctgcgagggctgccccaagtcctaccgggtttgcacgggcgcgcccggctccgcccgcaagtgcgccttcctgacttactgctgggtgcgcggggctgggggtgcgagtaccacccctgaagtctcttcctgggcgacctccggggcctcattctaggcctccttaaagagaaggatctaaattaggaaaaggaagtgcccttatccacgaccaagctcttccacctgcggagctcgcttagtctgcacctcaaccgtgcggaaagtgactgccctgtttactgaggaaaaactggggctcagaaagataccatggagtagtttgaaacaggaacaaaatcttctgaaagctcggagcagaagcctttttggtcaacatggaggaaaaaagacggcgagcccgagttcagggagcctgggctgcccctgttaaaagccaggccattgctcagccagctaccactgctaagagccatctccaccagaagcctggccagacctggaagaacaaagagcatcatctctctgacagagagtttgtgttcaaagaacctcagcaggtagtacgtagagctcctgagccacgagtgattgaagagggtgtgtatgaaatcagcctgtcacccacaggtgtatctagggtctgtttgtatcctggctttgttgacgtgaaagaagctgactggatattggaacagctttgtcaagatgttccctggaaacagaggactggcatcagagaggattccatattgcaactaacctttaagaagtcagcacctgttagtggaaccgcgactgctccgcagagctgctggtatgagcgcccgtcgccaccccacatcccaggcccagccattctgacaagaactagactttgggctccttga

SEQ ID NO: 1653 - DNA, 842 bp, Homo sapiens
  source 1..842: mol_type = unassigned DNA
tgcggagtgggtcaggggctgcgagggctgccccaagtcctaccgggtttgcacgggcgcgcccggctccgcccgcaagtgcgccttcctgacttactgctgggtgcgcggggctgggggtgcgagtaccacccctgaagtctcttcctgggcgacctccggggcctcattctaggcctccttaaagagaaggatctaaattaggaaaaggaagtgcccttatccacgaccaagctcttccacctgcggagctcgcttagtctgcacctcaaccgtgcggaaagtgactgccctgtttactgaggaaaaactggggctcagaaaggtgaagtcatttgccatgggccatgcagctgggaagtgacagatctggattcaaagcgagttctggctggcgccagagtccttgtattttacagcactggttctcaagctttatgtgcattaagaattcctgggttgagggtggcgttagttaacaaattctgggactctacaaattgagtagatctgggatggggctctggaatctattttcaacaattgttccctggcaaataacatatggctccccagtgaatggagcaagaagataccatggagtagtttgaaacaggaacaaaatcttctgaaagctcggagcagaagcctttttggtcaacatggaggaaaaaagacggcgagcccgagttcagggagcctgggctgcccctgttaaaagccaggccattgctcagccagctaccactgctaagagccatctccaccagaagcctggccagacctggaagaacaaagagcatcatctctctgacagagagtttgtgttcaaagaacctcag

SEQ ID NO: 1654 - DNA, 2105 bp, Homo sapiens
  source 1..2105: mol_type = unassigned DNA
cccacggccgcgcctgcgcactggccacgcggacggcgcgatggcggcggctgccgccgagacccccgaagtccttcgggaatgcggttgcaagggcatccggacctgtctgatctgcgagcggcagcgcggcagtgacccgccctgggagctgcccccagcgaaaacataccgtttcatttactgctccgacaccggctgggccgtgggcacagaggagtctgactttgagggctgggccttccccttcccaggagtgatgctgatcgaggactttgtgacccgggaggaagaagccgagttggtgcggctcatggaccgtgacccctggaagctctcccagtctggacggaggaagcaggactatggccccaaagtcaactttcggaaacagaagctaaagaccgagggcttctgcggcctccccagcttcagccgggaggtggtgcggaggatgggcctctacccggggctggagggcttccggcccgtcgagcagtgcaacctggactactgccccgagcggggctctgccattgacccccacctggacgacgcctggctgtggggggagcggctggtcagcctcaacctcctgtcccccaccgtgctgtccatgtgtcgggaggcgcccgggagcctgctcctctgctcggccccgtcggctgccccggaggccttggtggacagcgtgatagcacccagccggtcggtgctatgccaggaggtggaggtggccatccccttacccgcccgctccctgctggtcctcaccggggcggcacggcaccagtggaagcatgccatccaccgcagacacatcgaggcccgccgcgtctgcgtcactttccgggagctgtcggctgagtttggccctggagggaggcagcaagagctgggccaggaactgctgcggatcgccctctccttccagggaagacccgtgtgaaccgcctccttggctccagacttgactgatcccgggattgaaatgaggagcacagaacagggcctcctgcaactcacggggtttcaagagaagatggctgacccctgatgctgtgagcagtgtgagccctgcccaggagcaggttttgatgggaacgtacctccaggcagcccccttccacctggaccgtggccacacttttttggttatttagtttgtcacagtcttggggacatgggatcatttgagcttaaaaaatactgggggccgggcacagtggctcacacctgtaatcctaacactttgggaggctgaggtgggcggatcacttgatgccaggagttcgagaccagcctggccaacacggtgaaaacccgtctctacaaaaactacaaaaattagccgggtgtggtgactcacagccgtaatcccagctactcgggaggctaaggtgggagaattgcttgaacctgggaggcggaggttgcagtgagccaagatcacgccactgcactccagcctcggtgacagagcaagactgttttgaaaaaaaaaaaaaatgggaacattttaaatgattttcacctttattatgcatctattttcatggggtttcccgatatctcactgtccagtcccttcatttggggaatgtgttggattagggaacagggttgaagatttgaagtttagactaaagagctgggaacagcttcagagtcaggctcagcctgactcatgcttgacacccccacgcccagggagggttgggggatgtgaggagggcagggaaatctgagagcctccttccagccccataacgctgttaacaagtaggaaaaattaaagctcccggccaggcgcggtgactcacacctgtaatccgagtactttgcggggctcaggtgggaggattgcttgaggccagcctgggcaacatagtgagacccccatctctacaaaaaatacaaacattagctgggcgtctgggcatggtggcacacacctgtagtcccagctactcgaaaggctgaggcgggaggatggctttaccaccatgtcaaggctgcagtgagctcatgatcataccactgcacttaacttggcaacagagcaagaccctgtccctaaaataaataaaaggaaaacaaaaaaa

SEQ ID NO: 1655 - DNA, 2068 bp, Homo sapiens
  source 1..2068: mol_type = unassigned DNA
cggacgatgccgtgacgcggcacggcgacactgttggcaatatgagcgcacccctgtagagggagcccttcggtcctggaggcggcgcggcgtgaagacaggttgctatttgagagcgttcccttgaagcccctcagagagtgggggaggggcggcggacggcaagcggttcctgtctgcgcttgcgccggcgcctctgccgacccggcctgcacgcacgcgcatgcccgtagcgcgcggagccgcggtggccggcagcactgcgcgtgcgcggtgaggagcccgctaaggagcggcgctggcggacgtcgggctggctgcccgtgacgtcgtgcggagagctttaaagtgcgggccgggccgggcgtccgagggtctggtcgggagtcgggccgcgtctccgcagcagccctccgcggcatgaggcgctgccggcgcccctgccccgcgggacgtggagaaggtggaggaggaagaagccccgttgtcgccaccgttgcatgacccgccgctcctgaggccctaccccacgcccggaccctcgacgccccccgccgggtcccccactcacgcatgggggttcggcgctaaggacccccctccctccgggggccccggggcgcgtccccttagagccatgcccggctgccccgcccgccccggaggaccctagagcagcgtcgtgggggccatggcggccgccagcggctacacggacctgcgtgagaagctcaagtccatgacgtcccgggacaactataaggcgggcagccgggaggccgccgccgctgccgcagccgccgtagccgccgcagccgcagccgccgctgccgccgaaccttaccctgtgtccggggccaagcgcaagtatcaggaggactcggaccccgagcgcagcgactatgaggagcagcagctgcagaaggaggaggaggcgcgcaaggtgaagagcggcatccgccagatgcgcctcttcagccaggacgagtgcgccaagatcgaggcccgcattgacgaggtggtgtcccgcgctgagaagggcctgtacaacgagcacacggtggaccgggccccactgcgcaacaagtacttcttcggcgaaggctacacttacggcgcccagctgcagaagcgcgggcccggccaggagcgcctctacccgccgggcgacgtggacgagatccccgagtgggtgcaccagctggtgatccaaaagctggtggagcaccgcgtcatccccgagggcttcgtcaacagcgccgtcatcaacgactaccagcccggcggctgcatcgtgtctcacgtggaccccatccacatcttcgagcgccccatcgtgtccgtgtccttctttagcgactctgcgctgtgcttcggctgcaagttccagttcaagcctattcgggtgtcggaaccagtgctttccctgccggtgcgcaggggaagcgtgactgtgctcagtggatatgctgctgatgaaatcactcactgcatacggcctcaggacatcaaggagcgccgagcagtcatcatcctcaggaagacaagattagatgcaccccggttggaaacaaagtccctgagcagctccgtgttaccacccagctatgcttcagatcgcctgtcaggaaacaacagggaccctgctctgaaacccaagcggtcccaccgcaaggcagaccctgatgctgcccacaggccacggatcctggagatggacaaggaagagaaccggcgctcggtgctgctgcccacacaccggcggaggggtagcttcagctctgagaactactggcgcaagtcatacgagtcctcagaggactgctctgaggcagcaggcagccctgggaactctggctcatccttacgtagttgcccctccttttgttttgagggttttgtttttgttcattggggggtttttgttttttgttttttgttttttttgattctatatatttttccttggttttgttgcctgttagggctgaagaatagaattggccaggacctaggttctcatattcttggtattcctcctggatggaaaggctgttggcatcaatag

SEQ ID NO: 1656 - DNA, 3012 bp, Homo sapiens
  source 1..3012: mol_type = unassigned DNA
gaggcgctgccggcgcccctgccccgcgggacgtggagaaggtggaggaggaagaagccccgttgtcgccaccgttgcatgacccgccgctcctgaggccctaccccacgcccggaccctcgacgccccccgccgggtcccccactcacgcatgggggttcggcgctaaggacccccctccctccgggggccccggggcgcgtccccttagagccatgcccggctgccccgcccgccccggaggaccctagagcagcgtcgtgggggccatggcggccgccagcggctacacggacctgcgtgagaagctcaagtccatgacgtcccgggacaactataaggcgggcagccgggaggccgccgccgctgccgcagccgccgtagccgccgcagccgcagccgccgctgccgccgaaccttaccctgtgtccggggccaagcgcaagtatcaggaggactcggaccccgagcgcagcgactatgaggagcagcagctgcagaaggaggaggaggcgcgcaaggtgaagagcggcatccgccagatgcgcctcttcagccaggacgagtgcgccaagatcgaggcccgcattgacgaggtggtgtcccgcgctgagaagggcctgtacaacgagcacacggtggaccgggccccactgcgcaacaagtacttcttcggcgaaggctacacttacggcgcccagctgcagaagcgcgggcccggccaggagcgcctctacccgccgggcgacgtggacgagatccccgagtgggtgcaccagctggtgatccaaaagctggtggagcaccgcgtcatccccgagggcttcgtcaacagcgccgtcatcaacgactaccagcccggcggctgcatcgtgtctcacgtggaccccatccacatcttcgagcgccccatcgtgtccgtgtccttctttagcgactctgcgctgtgcttcggctgcaagttccagttcaagcctattcgggtgtcggaaccagtgctttccctgccggtgcgcaggggaagcgtgactgtgctcagtggatatgctgctgatgaaatcactcactgcatacggcctcaggacatcaaggagcgccgagcagtcatcatcctcaggaagacaagattagatgcaccccggttggaaacaaagtccctgagcagctccgtgttaccacccagctatgcttcagatcgcctgtcaggaaacaacagggaccctgctctgaaacccaagcggtcccaccgcaaggcagaccctgatgctgcccacaggccacggatcctggagatggacaaggaagagaaccggcgctcggtgctgctgcccacacaccggcggaggggtagcttcagctctgagaactactggcgcaagtcatacgagtcctcagaggactgctctgaggcagcaggcagccctgcccgaaaggtgaagatgcggcggcactgagtctacccgccgccctcctgggaactctggctcatccttacgtagttgcccctccttttgttttgagggttttgtttttgttcattggggggtttttgttttttgttttttgttttttttgattctatatatttttccttggttttgttgcctgttagggctgaagaatagaattggccaggacctaggttctcatattcttggtattcctcctggatggaaaggctgttggcatcaataggggacagaggctgatgctggagtggccagtagaggtggtggagcagagcagccatcttttaagtggggctgtatcaggctgggtttatttaaaagcaacaaaatgttttggttaagaaaattattttgctttcagtgtaaatcttcgcagtgttctaaacaaagttcagtcttctgctcgcccctttccctcactgatgtctgcacttggttgaggtctcctggagcctcacaggctctgctgttctccacttctcacctgccatccacgccctgcaagctcatgcaaacaccctttcttcctcctgcggcagagttgttcaggttgcctgggcaggggcttaaacagtgccagcccctgccatcccaaagctattgttaagccccccaggcgtcctccacccacgcccactagcctgccatgtccacagttccttgggctgctgaggggctagtgcagtggtcctgacctctcttatcaagagcacacttctttgctggttgctccttttgagcatatgcgtgtgattatttggaacagttagacttgccacgttgggtcagttttagaaattgtttctagctagagggactggtgtccttccaagtctagcatttggggtatggaaaattgttgtggtgtgtggtagggtttttgttttcttttttgagttttttttccccctttagtctcctggctttttcctttcccttcccttctccactggccagcttgggcctcatcctcatgtcatccttctaggaaggcgcctgccccatcttgtctgccggcagcatgcatccaaggccagagctcaggcctgcagactgggctggtgcctcctccgcttcagggtatgggagttggtgaaggggctttcaaaaaataataaggaaaaaaaggtaaagtctttggtagcttctatccactcagatcctggaaggcagcaaggttttgtggatctagattcattaggaatgtcttcttgtcagccaggccaggacccgggcttgccaagagcagaggccctcccagcaaccaggataccaccactttgggggctttgtgtacagaggtccgggtctgagacctcataggctgcagaaatctggggcagccaccatcaagaagcccctctcaggggccagaactcctttgccagcgtggatttctcaagtcgggactgcataattaaagcagttgcagttttattttttttacagcttttttcccaaaaatgatttgtagttgtgtgtgcagcacttcgccctgatatgtgtgctctacaataaaaaccaaatctaatatattttgaaa

SEQ ID NO: 1657 - DNA, 1278 bp, Homo sapiens
  source 1..1278: mol_type = unassigned DNA
ctggctgcccgtgacgtcgtgcggagagctttaaagtgcgggccgggccgggcgtccgagggtctggtcgggagtcgggccgcgtctccgcagcagccctccgcggcatgaggcgctgccggcgcccctgccccgcgggacgtggagaaggtggaggaggaagaagccccgctgccgcagccgccgtagccgccgcagccgcagccgccgctgccgccgaaccttaccctgtgtccggggccaagcgcaagtatcaggaggactcggaccccgagcgcagcgactatgaggagcagcagctgcagaaggaggaggaggcgcgcaaggtgaagagcggcatccgccagatgcgcctcttcagccaggacgagtgcgccaagatcgaggcccgcattgacgaggtggtgtcccgcgctgagaagggcctgtacaacgagcacacggtggaccgggccccactgcgcaacaagtacttcttcggcgaaggctacacttacggcgcccagctgcagaagcgcgggcccggccaggagcgcctctacccgccgggcgacgtggacgagatccccgagtgggtgcaccagctggtgatccaaaagctggtggagcaccgcgtcatccccgagggcttcgtcaacagcgccgtcatcaacgactaccagcccggcggctgcatcgtgtctcacgtggaccccatccacatcttcgagcgccccatcgtgtccgtgtccttctttagcgactctgcgctgtgcttcggctgcaagttccagttcaagcctattcgggtgtcggaaccagtgctttccctgccggtgcgcaggggaagcgtgactgtgctcagtggatatgctgctgatgaaatcactcactgcatacggcctcaggacatcaaggagcgccgagcagtcatcatcctcaggaagacaagattagatgcaccccggttggaaacaaagtccctgagcagctccgtgttaccacccagctatgcttcagatcgcctgtcaggaaacaacagggaccctgctctgaaacccaagcggtcccaccgcaaggcagaccctgatgctgcccacaggccacggatcctggagatggacaaggaagagaaccggcgctcggtgctgctgcccacacaccggcggaggggtagcttcagctctgagaactactggcgcaagtcatacgagtcctcagaggactgctctgaggcagcaggcagccctgcccgaaaggtgaagatgcggcggcactgagtctacccgccgccctcct

SEQ ID NO: 1658 - DNA, 903 bp, Homo sapiens
  source 1..903: mol_type = unassigned DNA
ggggctctctgtgtggcttgtaagatgctgaagactcagattttagagaccaagtgcgtttcagaagagggctgaggattgggtgcaaggagttggtgttgatggaggagcaggacgccagagtcccagccctggaaccgttcagagtggagcaggcaccacctgtaatctactatgtccctgacttcatctccaaagaagaggaggagtatttgcttcgacaggtttttaatgccccaaagccaaagtggacccagctctctgggagaaagttacagaactggggtgggcttcctcatccccgagggatggttcctgagcggctgcccccatggctccagcgctacgtggacaaagtgtcaaacctcagcctctttggaggcctcccagctaaccatgtcctcgtgaaccagtatctgcctggggagggcatcatgccccacgaggacggaccactgtactacccgactgtcagcaccatcagcctgggctcccacaccgtgctggacttctacgagccgcggcggccagaggacgatgaccctacagaacagcctcggcctccgccccggcccaccacctcgctactgctggaaccgcgcagcctgctggtgctccgcggccccgcctacacgcgtcttctccacggcatcgccgccgcccgcgtagacgcgctggacgccgcctcctcgccgcccaatgcggcagcctgcccgtcggcgcggccgggagcctgcctggtgcgcggcacccgggtctcgctgaccatccgccgcgtgccccgcgtgctgcgcgccggcctcctgctgggcaagtgaccgccagggccgggacccctcggattcccaggttcctgcccctttggggctgctgtgactccgcgacctaggaaccgtgggcaaa

SEQ ID NO: 1659 - DNA, 973 bp, Homo sapiens
  source 1..973: mol_type = unassigned DNA
gcggaaatggctgggagggggatggggatgttgaatttggaaattggaggggacgctggtggacggattgggtgcaaggagttggtgttgatggaggagcaggacgccagagtcccagccctggaaccgttcagagtggagcaggcaccacctgtaatctactatgtccctgacttcatctccaaagaagaggaggagtatttgcttcgacaggtttttaatgccccaaagccaaagtggacccagctctctgggagaaagttacagaactggggtgggcttcctcatccccgagggatggttcctgagcggctgcccccatggctccagcgctacgtggacaaagtgtcaaacctcagcctctttggaggcctcccagctaaccatgtcctcgtgaaccagtatctgcctggggagggcatcatgccccacgaggacggaccactgtactacccgactgtcagcaccatcagcctgggctcccacaccgtgctggacttctacgagccgcggcggccagaggacgatgaccctacagaacagcctcggcctccgccccggcccaccacctcgctactgctggaaccgcgcagcctgctggtgctccgcggccccgcctacacgcgtcttctccacggcatcgccgccgcccgcgtagacgcgctggacgccgcctcctcgccgcccaatgcggcagcctgcccgtcggcgcggccgggagcctgcctggtgcgcggcacccgggtctcgctgaccatccgccgcgtgccccgcgtgctgcgcgccggcctcctgctgggcaagtgaccgccagggccgggacccctcggattcccaggttcctgcccctttggggctgctgtgactccgcgacctaggaaccgtgggcaaagggggctcccctgggttatttattttcccaataattttgtgtgagctacagaagaccccataccaaataaacaaaaaaatc

SEQ ID NO: 1660 - DNA, 903 bp, Homo sapiens
  source 1..903: mol_type = unassigned DNA
tggggcggaaatggctgggagggggatggggatgttgaatttggaaattggaggggacgctggtggacggggctctctgtgtggcttgtaagatgctgaagactcagattttagagaccaagtgcgtttcagaagagggctgaggattgggtgcaaggagttggtgttgatggaggagcaggacgccagagtcccagccctggaaccgttcagagtggagcaggcaccacctgtaatctactatgtccctgacttcatctccaaagaagaggaggagtatttgcttcgacaggtttttaatgccccaaagccaaagtggacccagctctctgggagaaagttacagaactggggtgggcttcctcatccccgagggatggttcctgagcggctgcccccatggctccagcgctacgtggacaaagtgtcaaacctcagcctctttggaggcctcccagctaaccatgtcctcgtgaaccagtatctgcctggggagggcatcatgccccacgaggacggaccactgtactacccgactgtcagcaccatcagcctgggctcccacaccgtgctggacttctacgagccgcggcggccagaggacgatgaccctacagaacagcctcggcctccgccccggcccaccacctcgctactgctggaaccgcgcagcctgctggtgctccgcggccccgcctacacgcgtcttctccacggcatcgccgccgcccgcgtagacgcgctggacgccgcctcctcgccgcccaatgcggcagcctgcccgtcggcgcggccgggagcctgcctggtgcgcggcacccgggtctcgctgaccatccgccgcgtgccccgcgtgctgcgcgccggcctcctgctgggcaagtgaccgccagggccgggacc

SEQ ID NO: 1661 - DNA, 1331 bp, Homo sapiens
  source 1..1331: mol_type = unassigned DNA
gactccataaccgtggccttggccccagtccccctgacttccggacttcagaccagatactgcccatatccccttatgaagtcttggccaggcaacccctagggtgtacgttttctaatgattaaagaggcggtgctaagctgcagacggacttgcgactcagccactggtgtaagtcaggcgggaggtggcgcccaataagctcaagagaggaggcgggttctggaaaaaggccaatagcctgtgaaggcgagtctagcagcaaccaatagctatgagcgagaggcgggactctgagggaagtcaatcgctgccgcaggtaccgccaatggcttttggcgggggcgttccccaaccctgccctctctcatgaccccgctccgggattatggccgggactgggctgctggcgctgcggacgctgccagggcccagctgggtgcgaggctcgggcccttccgtgctgagccgcctgcaggacgcggccgtggtgcggcctggcttcctgagcacggcagaggaggagacgctgagccgagaactggagcccgagctgcgccgccgccgctacgaatacgatcactgggacgcggccatccacggcttccgagagacagagaagtcgcgctggtcagaagccagccgggccatcctgcagcgcgtgcaggcggccgcctttggccccggccagaccctgctctcctccgtgcacgtgctggacctggaagcccgcggctacatcaagccccacgtggacagcatcaagttctgcggggccaccatcgccggcctgtctctcctgtctcccagcgttatgcggctggtgcacacccaggagccgggggagtggctggaactcttgctggagccgggctccctctacatccttaggggctcagcccgttatgacttctcccatgagatccttcgggatgaagagtccttctttggggaacgccggattccccggggccggcgcatctccgtgatctgccgctccctccctgagggcatggggccaggggagtctggacagccgcccccagcctgctgacccccagctttctacagacaccagatttgtgaataaagttggggaatggacagcctaactgggacattgcagtggctgcttgctggggccgggatttgcaggggaacccaggatggcactggcccatagggagctccaggtgtggctggctggacacatggtcaaagtcacaaggccgggagagtggtgtcctttattgcactcactgctggtcgccccagcccactcccctcctcgttgtctctgcatccaggtctccaataaataagtcagccga

SEQ ID NO: 1662 - DNA, 2491 bp, Homo sapiens
  source 1..2491: mol_type = unassigned DNA
gccttgccagctagggctgagaacctagggaaaggggatggatcccagaggcgcccttggtgcagtctgagtcttcctgtgctcttatttgagcaatccctgcgactcctggacctctgtgtttgctcatgtgaaatattaaaaattctgtagtgcagtcatcccttgttctccatgacatactgcaaagttgctgttccacagatgaagatcttgaaatggaatggctctaaaatagctcctttgaagggcctcagatattctttgttttgttaagccattttgatctgctgcttctgaaaatcaacacctagatcaggccagcatttctaattaacaagctggattattattattattttttttacctctcatctctctgctatgctgccagccagcctgcctgcctcactggccttacatcctatttgctatggacagcaaccatcaaagtaattacaaactcagtaaaactgagaagaagttcttaaggaaacagattaaagccaagcatactttgctgagacatgaaggcattgagacagtatcctatgccactcagagcctggttgttgccaatggtggtttgggtaatggtgtgagtcggaaccagctgctcccggttttagagaaatgtggactggtggatgctctcttaatgccacctaacaagccgtactcatttgcaagatacagaactacagaagaatctaagagagcctatgttaccctcaatggaaaagaagtagtggatgatttaggacaaaagatcactctgtatttgaattttgtggaaaaagtgcagtggaaggagttgaggcctcaagccttaccaccaggactcatggtagtagaagaaataatttcttctgaggaggagaaaatgcttttggaaagtgttgattggacagaagatacagacaatcaaaactctcaaaaatccttaaaacacagaagagtaaagcattttggttatgagttccactatgagaacaacaatgtagataaagataagccattatctgggggtcttcctgacatttgtgaaagctttttggagaaatggttgaggaaaggttacattaaacataaacctgatcaaatgaccataaatcagtatgaacctgggcaaggaattcccgctcatattgatacacattccgcttttgaggatgagatcgtttctctcagtttggggtcagagattgtcatggattttaagcacccagatggcattgcagtgccagttatgttgcctcgtcggagtttgctggtgatgacaggagaatctagatacctttggacccatggaatcacgtgcagaaaatttgatactgttcaagcatctgagagtcttaaaagtggaattatcaccagtgatgttggagacttaactttaagcaagaggggactacgaacatcatttacatttaggaaagtgaggcaaacaccttgtaactgtagttacccgttggtctgtgatagccagaggaaagagactcccccctcatttccagagagtgataaagaagcctcacggctggagcaagagtacgtccatcaggtttatgaagagattgctgggcacttcagcagcacaagacataccccttggccgcacattgtggagtttttgaaggctttgccaagtggttcaatagtggctgatattggatgtggtaatggaaagtatcttggcatcaataaggagttatatatgattggttgtgatcgtagccaaaaccttgtggacatttgtagagagaggcaatttcaggcttttgtctgtgatgcattggcagtaccagtccgcagtgggtcttgtgatgcctgcatctccattgctgttattcatcattttgcaacagcagagcgtagagtggcagctctccaagaaattgttcgactcctgagaccaggtgggaaggcactcatttatgtctgggcaatggaacaagaatataataagcagaagtccaagtatcttagaggaaacagaaatagccaaggaaagaaagaggagatgaacagtgatacctcagtgcagaggtcacttgtggagcaaatgcgtgacatgggcagtcgagactcggcatcttctgtcccccgcattaatgactctcaggaaggaggatgtaattcaaggcaagtttctaattccaagctgcctgttcatgttaacaggacttctttttattctcaagatgtactggttccctggcaccttaagggaaatcctgataaaggcaaacctgttgagccatttggtcccataggatcccaggacccaagtcctgtgtttcatcgttactaccatgtgttccgtgagggagaactggaaggtgcctgcaggactgtgagtgatgtcagaattctgcaaagctactacgatcaaggaaactggtgtgtgattcttcaaaaggcctgattatttacctgaacacatcatatataaagaagaaatgctcacttaaaaaaaaagagagaataa

SEQ ID NO: 1663 - DNA, 2114 bp, Homo sapiens
  source 1..2114: mol_type = unassigned DNA
gtagtgcagttttctccaacatggccgcgcccaggggagatggcgtgcaagtatccgctgcggtgttctggtgctagagtggagaggctggcaaagaagaaggcacacgcatgtttgctatggacagcaaccatcaaagtaattacaaactcagtaaaactgagaagaagttcttaaggaaacagattaaagccaagcatactttgctgagacatgaaggcattgagacagtatcctatgccactcagagcctggttgttgccaatggtggtttgggtaatggtgtgagtcggaaccagctgctcccggttttagagaaatgtggactggtggatgctctcttaatgccacctaacaagccgtactcatttgcaagatacagaactacagaagaatctaagagagcctatgttaccctcaatggaaaagaagtagtggatgatttaggacaaaagatcactctgtatttgaattttgtggaaaaagtgcagtggaaggagttgaggcctcaagccttaccaccaggactcatggtagtagaagaaataatttcttctgaggaggagaaaatgcttttggaaagtgttgattggacagaagatacagacaatcaaaactctcaaaaatccttaaaacacagaagagtaaagcattttggttatgagttccactatgagaacaacaatgtagataaagataagccattatctgggggtcttcctgacatttgtgaaagctttttggagaaatggttgaggaaaggttacattaaacataaacctgatcaaatgaccataaatcagtatgaacctgggcaaggaattcccgctcatattgatacacattccgcttttgaggatgagatcgtttctctcagtttggggtcagagattgtcatggattttaagcacccagatggcattgcagtgccagttatgttgcctcgtcggagtttgctggtgatgacaggagaatctagatacctttggacccatggaatcacgtgcagaaaatttgatactgttcaagcatctgagagtcttaaaagtggaattatcaccagtgatgttggagacttaactttaagcaagaggggactacgaacatcatttacatttaggaaagtgaggcaaacaccttgtaactgtagttacccgttggtctgtgatagccagaggaaagagactcccccctcatttccagagagtgataaagaagcctcacggctggagcaagagtacgtccatcaggtttatgaagagattgctgggcacttcagcagcacaagacataccccttggccgcacattgtggagtttttgaaggctttgccaagtggttcaatagtggctgatattggatgtggtaatggaaagtatcttggcatcaataaggagttatatatgattggttgtgatcgtagccaaaaccttgtggacatttgtagagagaggcaatttcaggcttttgtctgtgatgcattggcagtaccagtccgcagtgggtcttgtgatgcctgcatctccattgctgttattcatcattttgcaacagcagagcgtagagtggcagctctccaagaaattgttcgactcctgagaccaggtgggaaggcactcatttatgtctgggcaatggaacaagaatataataagcagaagtccaagtatcttagaggaaacagaaatagccaaggaaagaaagaggagatgaacagtgatacctcagtgcagaggtcacttgtggagcaaatgcgtgacatgggcagtcgagactcggcatcttctgtcccccgcattaatgactctcaggaaggaggatgtaattcaaggcaagtttctaattccaagctgcctgttcatgttaacaggacttctttttattctcaagatgtactggttccctggcaccttaagggaaatcctgataaaggcaaacctgttgagccatttggtcccataggatcccaggacccaagtcctgtgtttcatcgttactaccatgtgttccgtgagggagaactggaaggtgcctgcaggactgtgagtgatgtcagaattctgcaaagctactacgatcaaggaaactggtgtgtgattcttcaaaaggcctga

SEQ ID NO: 1664 - DNA, 4079 bp, Homo sapiens
  source 1..4079: mol_type = unassigned DNA
aaatgtagtgcagttttctccaacatggccgcgcccaggggagatggcgtgcaagtatccgctgcggtgttctggtgctagagtggagaggctggcaaagaagaaggcacacgcatggtgagaatccggcctgagccgaagcggagtttgctatggacagcaaccatcaaagtaattacaaactcagtaaaactgagaagaagttcttaaggaaacagattaaagccaagcatactttgctgagacatgaaggcattgagacagtatcctatgccactcagagcctggttgttgccaatggtggtttgggtaatggtgtgagtcggaaccagctgctcccggttttagagaaatgtggactggtggatgctctcttaatgccacctaacaagccgtactcatttgcaagatacagaactacagaagaatctaagagagcctatgttaccctcaatggaaaagaagtagtggatgatttaggacaaaagatcactctgtatttgaattttgtggaaaaagtgcagtggaaggagttgaggcctcaagccttaccaccaggactcatggtagtagaagaaataatttcttctgaggaggagaaaatgcttttggaaagtgttgattggacagaagatacagacaatcaaaactctcaaaaatccttaaaacacagaagagtaaagcattttggttatgagttccactatgagaacaacaatgtagataaagataagccattatctgggggtcttcctgacatttgtgaaagctttttggagaaatggttgaggaaaggttacattaaacataaacctgatcaaatgaccataaatcagtatgaacctgggcaaggaattcccgctcatattgatacacattccgcttttgaggatgagatcgtttctctcagtttggggtcagagattgtcatggattttaagcacccagatggcattgcagtgccagttatgttgcctcgtcggagtttgctggtgatgacaggagaatctagatacctttggacccatggaatcacgtgcagaaaatttgatactgttcaagcatctgagagtcttaaaagtggaattatcaccagtgatgttggagacttaactttaagcaagaggggactacgaacatcatttacatttaggaaagtgaggcaaacaccttgtaactgtagttacccgttggtctgtgatagccagaggaaagagactcccccctcatttccagagagtgataaagaagcctcacggctggagcaagagtacgtccatcaggtttatgaagagattgctgggcacttcagcagcacaagacataccccttggccgcacattgtggagtttttgaaggctttgccaagtggttcaatagtggctgatattggatgtggtaatggaaagtatcttggcatcaataaggagttatatatgattggttgtgatcgtagccaaaaccttgtggacatttgtagagagaggcaatttcaggcttttgtctgtgatgcattggcagtaccagtccgcagtgggtcttgtgatgcctgcatctccattgctgttattcatcattttgcaacagcagagcgtagagtggcagctctccaagaaattgttcgactcctgagaccaggtgggaaggcactcatttatgtctgggcaatggaacaagaatataataagcagaagtccaagtatcttagaggaaacagaaatagccaaggaaagaaagaggagatgaacagtgatacctcagtgcagaggtcacttgtggagcaaatgcgtgacatgggcagtcgagactcggcatcttctgtcccccgcattaatgactctcaggaaggaggatgtaattcaaggcaagtttctaattccaagctgcctgttcatgttaacaggacttctttttattctcaagatgtactggttccctggcaccttaagggaaatcctgataaaggcaaacctgttgagccatttggtcccataggatcccaggacccaagtcctgtgtttcatcgttactaccatgtgttccgtgagggagaactggaaggtgcctgcaggactgtgagtgatgtcagaattctgcaaagctactacgatcaaggaaactggtgtgtgattcttcaaaaggcctgattatttacctgaacacatcatatataaagaagaaatgctcacttaaaaaaaaagagagaataaattaattacccttttaattaaagagaaaacttgtgggaaagtaccaaaggaaagctgagaaaaatttggaagtagggattcattaggagacattcaaatgtctcctgttggctgacatcacagatgtggtgttggctcctcctacttccctaggagaggtggtttctaaaagtgattgaagcagtttgtgcagtgtttgtaattcttgggtaagagcccaggattttgaagataatagttttttagtaaagtgctactaaatgtagtaaatcatgtaggattttagggatgtaattatatgttaatacagaaaatagtcctggtcaatagaaaattgtctgaagttttacctatgatttttagctctgtaaaatcatagacaataaccattctatttccatgcctgactagcccagggctggacgtatagcgggtgtccaataacgtttagtcaatcagataatacccagaacttagtaggagtttcattcaaaaactattttttgaacccaaccatgtaccagttactattttaagtactgataatgaagcagtgaataagaaagagcaaagctcttgcccttatggtgcttacattctagacggggagacagacagcaggcaaatcaataaatagatactatgtgccagatagtgataaatgccatgaaaaacataaaatgagagacgattcaccttggagcaaaagattacttttaagtgactgaaataactactaatcctgactaatttattatcaagagttaattggtattccaaattcattgagcagggtgctaaaaacaacccaaatgtgctcctttaactcctttgtttaaatgacaaaagttagaatgtggtcactcagacctaactgtgcccttagagccaaagctgtggtgtcattattggttatttctagttgattcatagtttgtcccaatccaggttcaatcgggttatttttaagatctgtacaatattgcataatagtaacccagttaacttaccacttaggttagatttcctggaggaacaaaggtagaaattcaaccataggtcaaattatcacatagaaggaaaaggctttttttcaaagaaaaaattttttgaacactttactcccagtatgcattacttttgtagtagtaatgcttaagactgttttaaagaaaaattgctttctgtttaattaatgtttactgttattaatgctagtgatacttaatcttgaagcatcaagttttcagaaacctatagtgatcaataatgggtctcagatgagaggatgattatttttttcatggaatttcagtccaacatcctggtgtactggtccctctgggatgaatttataaggctcatgatataggaaaaggaatatagggctaaaaatagttttatttctgatataaattctggtacttgacaccaaagtttgaagtcaagtcatgccaataaattttaacatccaaatgaaatagatgattttctatgaagatgaaaaataccaaaattgactcaagaagggagagaaaatggaagatgttgaaaaatagcataggaattcagaactgggctctagaatcagatttcctgagagttgaattctagatctgccatttattagctgtgggattttgggcaaatttcttgactttctgtgcttcagttttcttagctgtaaaattggaagagttgttatgaaaattcactgaaagtatatttgtatacatcataggatagtgtaagaatatagtatggctttgagaaatgttcattattattactcccagaggagttttaggtattaagtgatgccaaatataatttgttaattgtataataaaaatctatattcttactgac

SEQ ID NO: 1665 - DNA, 2296 bp, Homo sapiens
  source 1..2296: mol_type = unassigned DNA
agttttctccaacatggccgcgcccaggggagatggcgtgcaagtatccgctgcggtgttctggtgctagagtggagaggctggcaaagaagaaggcacacgcatggtgagaatccggcctgagccgaagcggagtttgctatggacagcaaccatcaaagtaattacaaactcagtaaaactgagaagaagttcttaaggaaacagattaaagccaagcatactttgctgagacatgaaggcattgagacagtatcctatgccactcagagcctggttgttgccaatggtggtttgggtaatggtgtgagtcggaaccagctgctcccggttttagagaaatgtggactggtggatgctctcttaatgccacctaacaagccgtactcatttgcaagatacagaactacagaagaatctaagagagcctatgttaccctcaatggaaaagaagtagtggatgatttaggacaaaagatcactctgtatttgaattttgtggaaaaagtgcagtggaaggagttgaggcctcaagccttaccaccaggactcatggtagtagaagaaataatttcttctgaggaggagaaaatgcttttggaaagtgttgattggacagaagatacagacaatcaaaactctcaaaaatccttaaaacacagaagagtaaagcattttggttatgagttccactatgagaacaacaatgtagataaagataagccattatctgggggtcttcctgacatttgtgaaagctttttggagaaatggttgaggaaagctgagaaaaatttggaagtagggattcattaggagacattcaaatgtctcctgttggctgacatcacagatgtggtgttggctcctcctacttccctaggagaggtggtttctaaaagtgattgaagcagtttgtgcagtgtttgtaattcttgggtaagagcccaggattttgaagataatagttttttagtaaagtgctactaaatgtagtaaatcatgtaggattttagggatgtaattatatgttaatacagaaaatagtcctggtcaatagaaaattgtctgaagttttacctatgatttttagctctgtaaaatcatagacaataaccattctatttccatgcctgactagcccagggctggacgtatagcgggtgtccaataacgtttagtcaatcagataatacccagaacttagtaggagtttcattcaaaaactattttttgaacccaaccatgtaccagttactattttaagtactgataatgaagcagtgaataagaaagagcaaagctcttgcccttatggtgcttacattctagacggggagacagacagcaggcaaatcaataaatagatactatgtgccagatagtgataaatgccatgaaaaacataaaatgagagacgattcaccttggagcaaaagattacttttaagtgactgaaataactactaatcctgactaatttattatcaagagttaattggtattccaaattcattgagcagggtgctaaaaacaacccaaatgtgctcctttaactcctttgtttaaatgacaaaagttagaatgtggtcactcagacctaactgtgcccttagagccaaagctgtggtgtcattattggttatttctagttgattcatagtttgtcccaatccaggttcaatcgggttatttttaagatctgtacaatattgcataatagtaacccagttaacttaccacttaggttagatttcctggaggaacaaaggtagaaattcaaccataggtcaaattatcacatagaaggaaaaggctttttttcaaagaaaaaattttttgaacactttactcccagtatgcattacttttgtagtagtaatgcttaagactgttttaaagaaaaattgctttctgtttaattaatgtttactgttattaatgctagtgatacttaatcttgaagcatcaagttttcagaaacctatagtgatcaataatgggtctcagatgagaggatgattatttttttcatggaatttcagtccaacatcctggtgtactggtccctctgggatgaatttataaggctcatgatataggaaaaggaatatagggctaaaaatagttttatttctgatataaattctggtacttgacaccaaagtttgaagtcaagtcatgccaataaattttaacatccaaatgaaatagatgattttctatgaagatgaaaaataccaaaattgactcaagaagggagagaaaatggaagatgttgaaaaatagcatagga

SEQ ID NO: 1666 - DNA, 2475 bp, Homo sapiens
  source 1..2475: mol_type = unassigned DNA
ctctctacacagaatcggctgttgagtgtgctctcagtggagctttggttttagctgttctctgacaaagagcttgttctgagctgcacatctcgtcctctttgttcagcctcaggcttcaagcattgaatcctaaatattctccagctgggaatcagacaagggcagaaatgaagaacccagaagcccagcaggatgtttcagtttcccagggatttcgcatgttgttttacacgatgaaacccagtgaaacttcattccaaacattagaagaggtgcctgattatgtaaaaaaggcaactccatttttcatttctttgatgctgcttgaacttgttgtcagctggattctcaaaggaaagccaccaggtcgcctggatgatgctttaacgtcaatctcagctggtgttctgtctcgacttccaagtctatttttcaggagcattgaactgaccagttatatttatatctgggagaactacaggctgttcaatttgccttgggattctccatggacttggtattcagccttcttaggagttgactttggctactactggttccatcgtatggctcatgaagttaatattatgtgggccggacaccaaacacatcatagttctgaagactataacttatccacagcactgagacagtctgtcctccagatatatacttcctggattttctactctcccctggccctcttcatacccccttcagtatatgctgttcatcttcaattcaatcttctttaccaattttggatccatacagaggtcatcaataaccttggtcctttggaactgattcttaatactcctagccatcatagggttcatcatggcagaaatcgttattgcatagacaaaaattatgctggtgttcttattatttgggataaaatttttgggacatttgaagcagaaaatgaaaaagttgtatatggcttaacacatcccattaatacatttgaaccaatcaaagtgcagttccatcacttattttccatatggactacattctgggccacacctggattcttcaataagttttctgtcatatttaagggaccgggatggggtccaggtaaaccaagacttggtctcagtgaagaaattccagaggtcaccggcaaagaagttcccttctcatcatcttcatctcagctattaaagatatatacagttgtacagtttgctctgatgttggcattttatgaagagacctttgcagatacagctgcactgtcgcaagttactctccttctgagggtttgcttcattatcctgaccttgacttccattggatttcttctggatcaaagacccaaggcagctattatggaaactctccgttgcttgatgttcttaatgctgtaccgatttggtcacctgaagcctcttgtcccttcattgtcatctgcttttgagattgttttttccatttgcattgctttctggggagttagaagcatgaaacaactcacctctcacccttggaaataacctgaatttgtacataattctcttcttttaatgagttgtccacacgcatattatgactgcatattaaaatgtaattattttatgtaatgcttatatgaactatttcttcaatgaaaagtaaaattacttatttactattgtttgcctttcacatttgttattttctattaaaaattaaagtcagttttggttacttcccccctttactacaattaaaaaaagatttcaaatataatgatgttatattaactgatagccttatatgacaagtataaaaagaagggatgaaacttaaaaacagtaaaaacaagaaggaatattgcctttacatcaatttgaaaacaatgtttcctttgatgtttgctaaaattatgcatagatacatgtttgtagtcataaaaatgtattacattggttgtcttcctaaggccacagttacctttgcaatccatataacctaagaagctgcattccagaaaaagacatcactgaggccaggcgcggtggctcacccctgtaatcccagcactttgtggggctgaggtgggcggatcatgaggtccagagatagagaccatcctggccaacatggtgaagtcctgtctctactaaaaatataaaaatttagctggacatggtggtgtgcgcctgtagtcccagctactctggaggctgaggcaggagaatcgcttgaacctgggaggcagaagttggagtgagtggagattgcaccactgcactccagcctgggcgacagagcgagactccgtctcaaagaaaaaagacatcactgaaagaaaaatgaacagaatttgtcagaattagttttttcaacaggttactttgtcatacatttctctaatatgcttggtcaatttgttttggcagactgggcagcatgcagcaattctgcattatttaaagttatcagaacaatgttaattctctaaataaaattacccaaggt

SEQ ID NO: 1667 - DNA, 7764 bp, Homo sapiens
  source 1..7764: mol_type = unassigned DNA
gtgaagctccagacgcatggcacccgccgccaagtcgccgcggtggctgccgggatgcgccgcagcgaatggtcgcgccgggcgccgctctgagtgacctttcacccgcgcccagcggttccgggcggcagcacaaggcggtagccatggcggaggcggcggctgcagcgggtgggactggcttgggcgcgggcgcgagctacgggtctgcagcggaccgggaccgggacccggacccggaccgcgccgggcggaggctgcgggttctctctggccatctgctgggccggccccgggaggctctgagtaccaatgagtgcaaagcgcggagagccgcgtcggcggccacggcagcgcccacggccactcccgccgcgcaggagtcgggcaccatcccaaagaagcggcaagaagttatgaaatggaatggatggggatataatgattctaaattcatcttcaataagaagggccaaattgaattgactgggaaaaggtaccctcttagtggcatgggtttaccaacatttaaagaatggatccaaaatacccttggagtaaatgtggagcataaaactacctctaaagcatccttaaatcctagtgatacacctccttctgttgtaaatgaagattttcttcatgaccttaaagaaactaatatttcatattcacaagaggcagatgatcgagtatttagagctcatggtcattgtcttcatgagatatttttgctcagggaaggaatgtttgagcgaattcctgatatagttttatggccaacatgccatgatgatgtagttaagattgtgaatctagcttgcaaatataatctttgtatcataccaattggtggaggaacaagtgtttcatatggcctgatgtgtcctgcagatgagacaagaacaattatttctttggacacttcacaaatgaatcgaattctctgggttgatgagaacaatttgacagctcatgtagaggctggcataacaggacaagagttggaaagacagcttaaagaaagtggttattgtacaggtcatgaaccagattccctggagttcagtactgtaggaggatgggtatctactcgcgcatcaggcatgaagaagaatatctatggcaatatcgaggacctggtggttcatataaaaatggtaacacctagaggtataatagaaaaaagctgtcaaggacctcgtatgtcaacaggccctgatatccatcacttcatcatgggatctgaaggaactcttggtgtaataacagaagctacaataaaaatcagaccagtccctgaataccaaaagtatggctcagtagctttccctaattttgaacaaggagtagcctgtttaagagaaattgcaaaacagagatgtgctccggcatctattcgcctcatggacaacaagcagtttcagtttggtcatgctcttaaacctcaggtttcctctatttttacatcatttttggacggattaaaaaagttttatattacaaagtttaaaggatttgacccaaatcagctaagtgtagccacattactgtttgagggggatcgtgagaaggttcttcaacatgaaaaacaagtgtatgatattgctgcaaaatttggtgggttggcagctggagaagataatggacagagaggttatttgctgacctatgttattgcatacattcgagacttggctttggaatactatgtattaggagaatcttttgagacttctgctccttgggacagggtggtagatctctgtagaaatgtaaaagaaagaataacaagggaatgcaaagagaagggtgttcagtttgctcctttttctacatgcagggtgacgcagacttacgatgcaggtgcttgtatctacttctattttgcctttaactacaggggaattagtgacccactgaccgtatttgaacaaactgaggcagctgctagagaagaaatccttgctaatggagggagcctgtcacatcaccatggagtgggcaagttacggaagcaatggctaaaggaaagtatctctgatgtcggctttgggatgctgaagtctgtcaaggaatatgtggaccccaataacatctttggaaacagaaaccttttataaatccattagtaccattacaaaaaaatgtcaattttttttttaagttttcaactgtggttatactagtaatcaaatatatcatggactatattttggatacatttgtttctttggtttaaaataagtttgttttcattctgtagtttgttttgtttctacatctatggattgacagatagtattcctaaatctctctcattgtaggtacatcattttacattcagcggttgtcatttcaaattttagtcaggcagcacaaagctgtcaattattccagaggaagctgctgccagctgttttgtattgttgcttcctcttggggaacaaagacagatttggtatcattgattgctcagctagcctctttttaaaagaacgtttctgggaatcagatgtctagggaaggattccactgaggagtgatacacgtgtacattgtttaagagcatagtctagtgtgagtaggccattaaggggaaggatattcatgaaagaatttaggcaacctgttatttagaaagccttcacgtctgtaaggtgcttggcctacttttttttttaaattagtatacatgcataaaaccttgtatcatcaatatacaaattattctgttaggggacatgtttttgttctccatgtttctgtttctattgtggtatgagttgtatttgtatcactgagataacctattgttatattctaattcattgataatatgttttgtaagaaaagctgacatccttcattgcaagtgaagaacaggtttaccatgaaatgaatgcctttattcaacttagagtcctaatgtttctgatttcacattcttgttgctgaaatgcagaagaaacagctacagcaagagcagaaggaaaactcttagacttaatgtctccaattgcaagaattgtttcactaaagaaacagtcatcattcaactactgaatttgaaagcctcagcagtttcaatgacaaaaatcatttttgattttttaaaattaatcccaatggcatgataaattttcatataaaaagtaaagtttcaatttagtttttaataatggtttaatgccttttttgaataactggtttaacctaattttttttaaatgtaatgtattaatgcatataccataatcaaaagtttgaaatatcctgtttcttaaataatgagaacattaatcacatttagcaagcatttgtacattcaaacctggatattaaagtgaaatgattactttgaatcactgtctgccaaggttcatgattcacattttgagatggattcttttcttaatgcaatacctaacttttgataattttttaaaactaatatttgatcagataatgtaagtcaaaatgcagacgatcctttaaaaggatgcattgtctgtgtatgtagcaacagctccaaagtatttttgggcagtttgataccttttatatctgaagtagccttaaccagaaaaatggtaatttaaaattgacaaaatgatatttttaagacttcaaaatgataaataatttttaactattaaaattggcctcaaactaataaatctgtaattaaattagaattaaatatcagtttaacaacaaaatgaaatatttattttttagaagctgcctctcttcattggtcatttatttttaattataaaatttccaacagatctttgctttaagcccttgatatttgacctagttggacacttgatgaggaagttgcctctagaattataaaaatctcagctttataaaatgcatctgttcacgaaggtaatttctttaattggtgatcaaaatataaaattaaggtactaatgtctcactggaagtatatatatatatatatatatatgtatgcatgtgtgtgtgtgtatatatatatatatatatatgtatatgtttctgagtaatttttaaaaaataaaacaggttaataagaagatccattcctttgcatgtgattgttataacattctttcccagggagttcaatttcagcaacctcagaaatccatacttgatattaggaaactgtaaatgtaacacctgaaattattatgttcactattctacatgaaccttatggaaattcatgatttatgtctttgtttttctttttccaagtatatgcaggactccccaaccttgattttataatggtgactgcattttgtaggtggaatcatttctaccgaaatcattttgaaacacaagaatattgatcagtactgtttcactctgatttagtaaatcagaaagcctccccctacccccagcccccactttcacataccttctgggaggtgcctcagtatagacttggtatctgtgaaggactgagttcatgaatatgcacagaagcacttaaaccatgcctcttatttctataatatctgaaaatggcttcataaaagttaagtcaggagaacactgtttacatgacacttcttaactcatttttaatgtttatttttaatttcaaaaacttgttgcctatttggttttcagtactgcataacactgactttcttaaattagtcatagttgcaataatttacttaaatttggtaatgtcacatttgggttggggtttcagtgggaatagtaacttgccgctagtgagaaatggcattgaatactaaagactcaatatgaacaggctttatagacccttagagaaactgttgccttaatgtttggtgcaatttctagtagtgcataagtgaatttagtcttatgataagtaactttgagctgtttttagcttagtaagaattgtggaaaccacatgtttattgtgcccatcattttacacaaagaaaagaggattatattatttcttctaaggaagtaggagttttcttcctaaaagtgcttacatattgtagtactattacttaaaagttatttatgaagttgggagccttctagtttgcctgtgttgatgtattttgaaaacaaaattgcaataaaggatgagcttccatcggtgtgtatggtataccagatacagatggttgcaaggaaaccttttcccccactagaatagtctattagtaactgctaagtcctagcttgcatttttgaaaatgcctttctgcatgttagcacccagactttcctttgtcatattcctttatagctacaacttaactgtagcttatcagagaagctctgtagtcctacactgaagtgtgttcccttggctgttcatatggggctgggtttggttgaacttccattctgtataaatgctagaacacagttactacagattgattcacaaactgcatgtgctggtgcttgaggcagccaaaatggaatgctgtggaaagcatatctatatcttaaaaaacactcagacaggagttaaggacagctttaataatttttttgtttaccacttaatctttatcaactttgattttagttagggcttagctcatggttgaagaaaagtggaaaataacaagtgcccatttaggtttgaagaatccagaatgttttacctttgactttatgagttatagaagcttggctttgctctaggcttcatgttcccaaatgagccatctgtcagtatattcacttaattcttactaatttcagtttcctgtaaaggaaacaacttacatattgatgcttaaatccagaaagtgtaaaaggttttcttaaactgttaaaatatagtgtctgatataaaggatgtaagttactcagctttctgctccctaagccaaacagtgtttgtcttcagtgtgaaatttaactgtaaaaactacttgtaatgtcaagagattatagatcatattattaataaaatggacctgggtctaatattttttttcttcaaagggagtgtgaagctgtttattcttttatttgcatatgagtttttcttttagttttagtttttcatgttcatatttccactgatttgaaaacacaaaatttatttttataattttgttgcttgtagcataatcaagtgcaaaatcaagtgcaacctacttgtgactaaatctctttggatttatagctgaggatattgttagctaggttttgtcaatccctaatcattttttaaaatcaatgctgtattcccaggaggctttgagactcctatgaacctgaagcactcccttttgaaccttggaagatcctcaaagagtgagcactcttgtgctcttctaatcataattaattccttaacaaatcagagtaaggaccactgacatatagaaccctcaagccaaagaaccatcacagaatttagtaactttagttctgtgaacatgaaaagatttcttttttggtttccaaaggagattatttatttttccacaaggaaaaacatcttgcagagactctgaattccaaatctgagtgagaaagaaaaggaaaaaaatctgtttcatggtggatttctaagcaacatatatacatgtttttaagacaaccttttgttggcagtgtttttcctgaacaccatatgcaccctaggaaacatgtttttcctttaatcttgttcacatatcagaaaaggacatgaaatgctcatactggcatacaagtttctataagtagttattttttgagctacttatactatatccccaaaagctcacagtgccttgttgggattttttttttccatgaactagccattattttaaatgagtgggagagggtaagtctttagacagaggtcattcagcagttcaagactattcctcttcaagaacatgtcaggaattaagcagttatatgtggaaacactggtaattctttccacagtgttgttttggataatctgttctagtatatttaactaattgtatggtggacctgtactctgatacacatcgaatcagtcaatgggatttgtatgtgcttttccttcctacattttcattcctactgccccaacctagtagccctaagttgtggcttggtgggtttggcattgagcctcaagacactcactacattctttctggatgtttgctcacaggctccctgaggagcagaacctgtggagctggggagtgcgggtggtttctattcctaatattgtgtgtcagtcctttttcgtgtgatggtgccttcagaataacgaatatttctgttctggacaatgattaaatcttatgagaaatatatgtaggttatattaattcttgtccatttttgctaagcctgtgaaatactttggctctgatacaacttaacttgaataatatcttatcctgagtcttcctccaaggcagtacatattcctgccaggactgtagtaatcctttgggaactacatgtgagtaagcacttgtatgtaagccattatactgctgtaactaatgcatacaaacaattcttctctttacatttatagtctaaaaggggatatgcagtgggaaggaaaattcctgagagattccagcatagctttgtcaattccgactgagccatactgttttccacaagggctcaacacatagtcagtattccgtgctttcagtgtgtgttcagattctcctcttactggttttcttagactgtattgttctataagcaaatgcccatgtgtgatttttaagatgtgctggggaaaaataaatcaataccacaaccacc

SEQ ID NO: 1668 - DNA, 1249 bp, Homo sapiens
  source 1..1249: mol_type = unassigned DNA
aaagaagcggtgagtagcggtatgtggaaggagttagcgtcgagggaccaggccgggcctgtgctgcaggagggcacaggcgaggcaagaagttatgaaatggaatggatggggatataatgattctaaattcatcttcaataagaagggccaaattgaattgactgggaaaaggtaccctcttagtggcatgggtttaccaacatttaaagaatggatccaaaatacccttggagtaaatgtggacataaaactacctctaaagcatccttaaatcctagtgatacacctccttctgttgtaaatgaagattttcttcatgaccttaaagaaactaatatttcatattcacaagaggcagatgatcgagtatttagagctcatggtcattgtcttcatgagatatttttgctcagggaaggaatgtttgagcgaattcctgatatagttttatggccaacatgccatgatgatgtagttaagattgtgaatctagcttgcaaatataatctttgtatcataccaattggtggaggaacaagtgtttcatatggcctgatgtgtcctgcagatgagacaagaacaattatttctttggacacttcacaaatgaatcgaattctctgggttgatgagaacaatttgacagctcatgtagaggctggcataacaggacaagagttggaaagacagcttaaagaaagtggttattgtacaggtcatgaaccagattccctggagttcagtactgtaggaggatgggtatctactcgcgcatcaggcatgaagaagaatatctatggcaatatcgaggacctggtggttcatataaaaatggtaacacctagaggtataatagaaaaaagctgtcaaggacctcgtatgtcaacaggccctgatatccatcacttcatcatgggatctgaaggaactcttggtgtaataacagaagctacaataaaaatcagaccagtccctgaataccaaaagtatggctcagtagctttccctaattttgaacaaggagtagcctgtttaagagaaattgcaaaacagagatgtgctccggcatctattcgcctcatggacaacaagcagtttcagtttggtcatgctcttaaacctcaggtttcctctatttttacatcatttttggacggattaaaaaagttttatattacaaagtttaaaggatttgacccaaatcagctaagtgtagccacattactgtttgagggggatcgtgaga

SEQ ID NO: 1669 - DNA, 1446 bp, Homo sapiens
  source 1..1446: mol_type = unassigned DNA
tatacattctctctgagctggcactcaagcaccgtgggaccttggctggcttctggggagcaagagatccatttatgaatacttgatttctgactgctgggaagcacggctgatgctccgaaggagggaagactgacccggtttctggacttcacccagctgatggacatggcatctgaatccgtaggaggaaaaattttatttgcaacagatgacttttttgctcctgcagaaaacctcataaagagtgacagcccgtgcttcaaagagcatgaatatacggagtttgggaaatggatggatggctgggagaccaggaggaaaaggattccaggtcacgactggtgtgtcctcaggctggggatccaaggagtcatccggggcttcgacgtggacgtttcttacttcacgggagattacgctcctcgagtgtccattcaagcagcaaacttggaagaagataaactaccagaaatcccagaaagaggaaccaggacaggagctgcagccactcctgaggagtttgaagccattgctgagctaaaatccgacgactggagttacttggttcccatgactgagcttaagccaggaaaccctgcttccggccacaactattttcttgtcaattcccagcagagatggactcatatcagactcaacattttcccagatggtggaattgcacgacttagagtattcggtactggacaaaaagactggactgcaactgaccccaaagaacctgcagacctagtggccatcgcttttgggggtgtctgtgtaggatttagtaatgctaagtttgggcacccaaacaatataataggagttggcggggcaaagtctatggcggatggttgggaaactgcaagaaggctggaccggccaccaatattagaaaatgatgagaatggcattctcttggttccgggttgtgaatgggcagttttccgattggcacatcctggagtaataactcgaattgaaattgacacaaaatattttgaaggcaatgctcctgacagctgtaaagtggatgggtgcatcctgacaactcaggaagaagaagccgtgatcaggcaaaagtggattctcccggcccacaagtggaaaccactgcttccagtgaccaagttgtctcccaaccaaagtcatctgttcgatagcctgaccctagagctccaagatgtcatcactcacgccaggctcaccatcgtccccgacgggggagtgagccgccttcggctccggggcttccccagctccatctgcctcctgaggccccgggagaagcccatgttgaagttctcggtgagcttcaaagcaaacccttaacacacacaaagccccggtgtcggacacacagcagtaatttcccagtcatagtcttcttttcaaatgttttgaacacctggtgatttaataaagtggtcgtctcacaaa

SEQ ID NO: 1670 - DNA, 607 bp, Homo sapiens
  source 1..607: mol_type = unassigned DNA
gggaggaaggcttctgagaagactggtgggagagaaggagagcctgcagacagaggcctccagcttggaggaaaagctttcggactgctgaaggcccagcaggaagagaggctggatgagatcaacaagcaattcctagacgatcccaaatatagcagtgatgaggatctgccctccaaactggaaggcttcaaagagaaatacatggagtttgaccttaatggaaatggcgatattgatatcatgtccctgaaacgaatgctggagaaacttggagtccccaagactcacctagagctaaagaaattaattggagaggtgtccagtggctccggggagacgttcagctaccctgactttctcaggatgatgctgggcaagagatctgccatcctaaaaatgatcctgatgtatgaggaaaaagcgagagaaaaggaaaagccaacaggccccccagccaagaaagctatctctgagttgccctgatttgaagggaaaagggatgatgggattgaaggggcttctaatgacccagatatggaaacagaagacaaaattgtaagccagagtcaacaaattaaataaattaccccctcctccagatcaa

SEQ ID NO: 1671 - DNA, 524 bp, Homo sapiens
  source 1..524: mol_type = unassigned DNA
ctccttccacgttgtctcctccacctagcagttggttggcaaccccttcctcagtcccctgctgaaaaccctccagtcagcgcttatcccttctgctctctcccctcacccagagaaatacatggagtttgaccttaatggaaatggcgatattgatatcatgtccctgaaacgaatgctggagaaacttggagtccccaagactcacctagagctaaagaaattaattggagaggtgtccagtggctccggggagacgttcagctaccctgactttctcaggatgatgctgggcaagagatctgccatcctaaaaatgatcctgatgtatgaggaaaaagcgagagaaaaggaaaagccaacaggccccccagccaagaaagctatctctgagttgccctgatttgaagggaaaagggatgatgggattgaaggggcttctaatgacccagatatggaaacagaagacaaaattgtaagccagagtcaacaaattaaataaattaccccctcctccagatcaa

SEQ ID NO: 1672 - DNA, 711 bp, Homo sapiens
  source 1..711: mol_type = unassigned DNA
ctgggaggcagaggaggaaggaatgaggggaaaggggaagtttgggaggaaggcttctgagaagactggtgggagagaaggagagcctgcagacagaggcctccagcttggtctgtctccccacctctaccagcatctgctgagctatgagccaaaccagggatttacagggaggaaaagctttcggactgctgaaggcccagcaggaagagaggctggatgagatcaacaagcaattcctagacgatcccaaatatagcagtgatgaggatctgccctccaaactggaaggcttcaaagagaaatacatggagtttgaccttaatggaaatggcgatattgatatcatgtccctgaaacgaatgctggagaaacttggagtccccaagactcacctagagctaaagaaattaattggagaggtgtccagtggctccggggagacgttcagctaccctgactttctcaggatgatgctgggcaagagatctgccatcctaaaaatgatcctgatgtatgaggaaaaagcgagagaaaaggaaaagccaacaggccccccagccaagaaagctatctctgagttgccctgatttgaagggaaaagggatgatgggattgaaggggcttctaatgacccagatatggaaacagaagacaaaattgtaagccagagtcaacaaattaaataaattaccccctcctccagatcaa

SEQ ID NO: 1673 - DNA, 524 bp, Homo sapiens; identical to SEQ ID NO: 1671
  source 1..524: mol_type = unassigned DNA

SEQ ID NO: 1674 - DNA, 711 bp, Homo sapiens; identical to SEQ ID NO: 1672
  source 1..711: mol_type = unassigned DNA

SEQ ID NO: 1675 - DNA, 607 bp, Homo sapiens; identical to SEQ ID NO: 1670
  source 1..607: mol_type = unassigned DNA

SEQ ID NO: 1676 - DNA, 711 bp, Homo sapiens; identical to SEQ ID NO: 1672
  source 1..711: mol_type = unassigned DNA

SEQ ID NO: 1677 - DNA, 711 bp, Homo sapiens; identical to SEQ ID NO: 1672
  source 1..711: mol_type = unassigned DNA

SEQ ID NO: 1678 - DNA, 524 bp, Homo sapiens
  source 1..524: mol_type = unassigned DNA
ctccttccacgttgtctcctccacctagcagttggttggcaaccccttcctcagtccccggctgaaaaccctcgagtcagcgcttatcccttctgctctctcccctcacccagagaaatacatggagtttgaccttaatggaaatggcgatattgatatcatgtccctgaaacgaatgctggagaaacttggagtccccaagactcacctagagctaaagaaattaattggagaggtgtccagtggctccggggagacgttcagctaccctgactttctcaggatgatgctgggcaagagatctgccatcctaaaaatgatcctgatgtatgaggaaaaagcgagagaaaaggaaaagccaacaggccccccagccaagaaagctatctctgagttgccctgatttgaagggaaaagggatgatgggattgaaggggcttctaatgacccagatatggaaacagaagacaaaattgtaagccagagtcaacaaattaaataaattaccccctcctccagatcaa

SEQ ID NO: 1679 - DNA, 524 bp, Homo sapiens
  source 1..524: mol_type = unassigned DNA
ctccttccacgttgtctcctccacctagcagttggttggcaaccccttcctcagtccccggctgaaaaccctccagtcagcgcttatcccttctgctctctcccctcacccagagaaatacatggagtttgaccttaatggaaatggcgatattgatatcatgtccctgaaacgaatgctggagaaacttggagtccccaagactcacctagagctaaagaaattaattggagaggtgtccagtggctccggggagacgttcagctaccctgactttctcaggatgatgctgggcaagagatctgccatcctaaaaatgatcctgatgtatgaggaaaaagcgagagaaaaggaaaagccaacaggccccccagccaagaaagctatctctgagttgccctgatttgaagggaaaagggatgatgggattgaaggggcttctaatgacccagatatggaaacagaagacaaaattgtaagccagagtcaacaaattaaataaattaccccctcctccagatcaa

SEQ ID NO: 1680 - DNA, 607 bp, Homo sapiens; identical to SEQ ID NO: 1670
  source 1..607: mol_type = unassigned DNA

SEQ ID NO: 1681 - DNA, 524 bp, Homo sapiens; identical to SEQ ID NO: 1671
  source 1..524: mol_type = unassigned DNA

SEQ ID NO: 1682 - DNA, 524 bp, Homo sapiens; identical to SEQ ID NO: 1671
  source 1..524: mol_type = unassigned DNA

SEQ ID NO: 1683 - DNA, 711 bp, Homo sapiens; identical to SEQ ID NO: 1672
  source 1..711: mol_type = unassigned DNA

SEQ ID NO: 1684 - DNA, 607 bp, Homo sapiens; identical to SEQ ID NO: 1670
  source 1..607: mol_type = unassigned DNA

SEQ ID NO: 1685 - DNA, 711 bp, Homo sapiens; identical to SEQ ID NO: 1672
  source 1..711: mol_type = unassigned DNA

SEQ ID NO: 1686 - DNA, 607 bp, Homo sapiens; identical to SEQ ID NO: 1670
  source 1..607: mol_type = unassigned DNA

SEQ ID NO: 1687 - DNA, 607 bp, Homo sapiens; identical to SEQ ID NO: 1670
  source 1..607: mol_type = unassigned DNA

SEQ ID NO: 1688 - DNA, 657 bp, Homo sapiens
  source 1..657: mol_type = unassigned DNA
ggaaggcttctgagaagactggtgggagagaaggagagcctgcagacagaggcctccagcttggtctgtctccccacctctaccagcatctgctgagctatgagccaaaccagggatttacagggaggaaaagctttcggactgctgaaggcccagcaggaagagaggctggatgagatcaacaagcaattcctagacgatcccaaatatagcagtgatgaggatctgccctccaaactggaaggcttcaaagagaaatacatggagtttgaccttaatggaaatggcgatattgatatcatgtccctgaaacgaatgctggagaaacttggagtccccaagactcacctagagctaaagaaattaattggagaggtgtccagtggctccggggagacgttcagctaccctgactttctcaggatgatgctgggcaagagatctgccatcctaaaaatgatcctgatgtatgaggaaaaagcgagagaaaaggaaaagccaacaggccccccagccaagaaagctatctctgagttgccctgatttgaagggaaaagggatgatgggattgaaggggcttctaatgacccagatatggaaacagaagacaaaattgtaagccagagtcaacaaattaaataaattaccccctcctcc

SEQ ID NO: 1689 - DNA, 2020 bp, Homo sapiens
  source 1..2020: mol_type = unassigned DNA
agatggatttgcagccgctgcaagtgtgtggaagggccgtgttcgtgttggcaaagaaggtcggctgctgagccagggcgtgtctcccggaggcctgtgggctgccaggatccccacctctctgcaatgggctgcccaggctgaccagccggttcctgctggaagctcctggtctgatctggggataccatgtccaagccccccgacctcctgctgcggctgctccggggcgccccaaggcagcgggtctgcaccctgttcatcatcggcttcaagttcacgtttttcgtctccatcatgatctactggcacgttgtgggagagcccaaggagaaagggcagctctataacctgccagcagagatcccctgccccaccttgacaccccccaccccaccctcccacggccccactccaggcaacatcttcttcctggagacttcagaccggaccaaccccaacttcctgttcatgtgctcggtggagtcggccgccagaactcaccccgaatcccacgtgctggtcctgatgaaagggcttccgggtggcaacgcctctctgccccggcacctgggcatctcacttctgagctgcttcccgaatgtccagatgctcccgctggacctgcgggagctgttccgggacacacccctggccgactggtacgcggccgtgcaggggcgctgggagccctacctgctgcccgtgctctccgacgcctccaggatcgcactcatgtggaagttcggcggcatctacctggacacggacttcattgttctcaagaacctgcggaacctgaccaacgtgctgggcacccagtcccgctacgtcctcaacggcgcgttcctggccttcgagcgccggcacgagttcatggcgctgtgcatgcgggacttcgtggaccactacaacggctggatctggggtcaccagggcccgcagctgctcacgcgggtcttcaagaagtggtgttccatccgcagcctggccgagagccgcgcctgccgcggcgtcaccaccctgccccctgaggccttctaccccatcccctggcaggactggaagaagtactttgaggacatcaaccccgaggagctgccgcggctgctcagtgccacctatgctgtccacgtgtggaacaagaagagccagggcacgcggttcgaggccacgtccagggcactgctggcccagctgcatgcccgctactgccccacgacgcacgaggccatgaaaatgtacttgtgaggggcccgccaggtcacctccccaacctgctcctgatggggcactgggccgcccttcccggggaggcaagattgagggcccgggagagggaggcccgagctgccaccgggcttaggcaggctgttgaggagctgtgggagcaggcccagtgggaggctgtggacaccccgaggacagtgtcctgtctcgaggcagggctgacacatggtgccatagccagcggagggcgctcagtgagtgccccgggccttctagacaacaggcaggaaggatgaacctcagggcacccccaggtggtgcggaaagccaggcagttgggacagaggtgcccacgagggcagaggccggtgctaaggggatggggaagaagggacaagattcccagagaggagaggaggctgttggtaggaaagtggcagggctgggggagacccagccccaagggtccggggcggaggatgctttgttcttttctggttttggttcctctttcgcggggggtgggggaggtcaacagggactgagtggggcagaggcccagaagtgccagcctggggagccgtttgggggcagccccttctgcccaccccatccttcttcctctccagagatgccaggggggcgtgtatgctctgccccttccctcagacaggggctgggtggggaggctctttaggctcaggagaagcattttaaagaaacccccaccctgccgcccgcattataaacacaggagaataatcaatagaataaaagtgaccgactgtca

SEQ ID NO: 1690 - DNA, 1935 bp, Homo sapiens
  source 1..1935: mol_type = unassigned DNA
agatggatttgcagccgctgcaagtgtgtggaagggccgtgttcgtgttggcaaagaagaccagccggttcctgctggaagctcctggtctgatctggggataccatgtccaagccccccgacctcctgctgcggctgctccggggcgccccaaggcagcgggtctgcaccctgttcatcatcggcttcaagttcacgtttttcgtctccatcatgatctactggcacgttgtgggagagcccaaggagaaagggcagctctataacctgccagcagagatcccctgccccaccttgacaccccccaccccaccctcccacggccccactccaggcaacatcttcttcctggagacttcagaccggaccaaccccaacttcctgttcatgtgctcggtggagtcggccgccagaactcaccccgaatcccacgtgctggtcctgatgaaagggcttccgggtggcaacgcctctctgccccggcacctgggcatctcacttctgagctgcttcccgaatgtccagatgctcccgctggacctgcgggagctgttccgggacacacccctggccgactggtacgcggccgtgcaggggcgctgggagccctacctgctgcccgtgctctccgacgcctccaggatcgcactcatgtggaagttcggcggcatctacctggacacggacttcattgttctcaagaacctgcggaacctgaccaacgtgctgggcacccagtcccgctacgtcctcaacggcgcgttcctggccttcgagcgccggcacgagttcatggcgctgtgcatgcgggacttcgtggaccactacaacggctggatctggggtcaccagggcccgcagctgctcacgcgggtcttcaagaagtggtgttccatccgcagcctggccgagagccgcgcctgccgcggcgtcaccaccctgccccctgaggccttctaccccatcccctggcaggactggaagaagtactttgaggacatcaaccccgaggagctgccgcggctgctcagtgccacctatgctgtccacgtgtggaacaagaagagccagggcacgcggttcgaggccacgtccagggcactgctggcccagctgcatgcccgctactgccccacgacgcacgaggccatgaaaatgtacttgtgaggggcccgccaggtcacctccccaacctgctcctgatggggcactgggccgcccttcccggggaggcaagattgagggcccgggagagggaggcccgagctgccaccgggcttaggcaggctgttgaggagctgtgggagcaggcccagtgggaggctgtggacaccccgaggacagtgtcctgtctcgaggcagggctgacacatggtgccatagccagcggagggcgctcagtgagtgccccgggccttctagacaacaggcaggaaggatgaacctcagggcacccccaggtggtgcggaaagccaggcagttgggacagaggtgcccacgagggcagaggccggtgctaaggggatggggaagaagggacaagattcccagagaggagaggaggctgttggtaggaaagtggcagggctgggggagacccagccccaagggtccggggcggaggatgctttgttcttttctggttttggttcctctttcgcggggggtgggggaggtcaacagggactgagtggggcagaggcccagaagtgccagcctggggagccgtttgggggcagccccttctgcccaccccatccttcttcctctccagagatgccaggggggcgtgtatgctctgccccttccctcagacaggggctgggtggggaggctctttaggctcaggagaagcattttaaagaaacccccaccctgccgcccgcattataaacacaggagaataatcaatagaataaaagtgaccgactgtc

SEQ ID NO: 1691 - DNA, 2321 bp, Homo sapiens
  source 1..2321: mol_type = unassigned DNA
tgcacttctgtgcctcaatttcctcatctgtagggtgggggtggtgattgccaccccatagggtggttataaggggccacacatgttcctatgtgtgagatgctgagaaagtcacctggcatggacaggatggacagccagtatttatcgaactatgaatgaatgaatgttaccctttagtgggttccagcgtcctatcctgtcggtgggaagactgaggctcagagagctccgtaacttgccccaggtcacacagccggttcaggcagagttggggtctcatgcctcccaggtgttcccacagtcttttccccaggagcagggtccaagcctgctgctcctccaaccacctgcgaggcacctgggcatgttcctggccaccaggaaagagaggtctaatggcagtagtaccagtcagcgtcatgtgcctggagcgagtgccctaccagccggttcctgctggaagctcctggtctgatctggggataccatgtccaagccccccgacctcctgctgcggctgctccggggcgccccaaggcagcgggtctgcaccctgttcatcatcggcttcaagttcacgtttttcgtctccatcatgatctactggcacgttgtgggagagcccaaggagaaagggcagctctataacctgccagcagagatcccctgccccaccttgacaccccccaccccaccctcccacggccccactccaggcaacatcttcttcctggagacttcagaccggaccaaccccaacttcctgttcatgtgctcggtggagtcggccgccagaactcaccccgaatcccacgtgctggtcctgatgaaagggcttccgggtggcaacgcctctctgccccggcacctgggcatctcacttctgagctgcttcccgaatgtccagatgctcccgctggacctgcgggagctgttccgggacacacccctggccgactggtacgcggccgtgcaggggcgctgggagccctacctgctgcccgtgctctccgacgcctccaggatcgcactcatgtggaagttcggcggcatctacctggacacggacttcattgttctcaagaacctgcggaacctgaccaacgtgctgggcacccagtcccgctacgtcctcaacggcgcgttcctggccttcgagcgccggcacgagttcatggcgctgtgcatgcgggacttcgtggaccactacaacggctggatctggggtcaccagggcccgcagctgctcacgcgggtcttcaagaagtggtgttccatccgcagcctggccgagagccgcgcctgccgcggcgtcaccaccctgccccctgaggccttctaccccatcccctggcaggactggaagaagtactttgaggacatcaaccccgaggagctgccgcggctgctcagtgccacctatgctgtccacgtgtggaacaagaagagccagggcacgcggttcgaggccacgtccagggcactgctggcccagctgcatgcccgctactgccccacgacgcacgaggccatgaaaatgtacttgtgaggggcccgccaggtcacctccccaacctgctcctgatggggcactgggccgcccttcccggggaggcaagattgagggcccgggagagggaggcccgagctgccaccgggcttaggcaggctgttgaggagctgtgggagcaggcccagtgggaggctgtggacaccccgaggacagtgtcctgtctcgaggcagggctgacacatggtgccatagccagcggagggcgctcagtgagtgccccgggccttctagacaacaggcaggaaggatgaacctcagggcacccccaggtggtgcggaaagccaggcagttgggacagaggtgcccacgagggcagaggccggtgctaaggggatggggaagaagggacaagattcccagagaggagaggaggctgttggtaggaaagtggcagggctgggggagacccagccccaagggtccggggcggaggatgctttgttcttttctggttttggttcctctttcgcggggggtgggggaggtcaacagggactgagtggggcagaggcccagaagtgccagcctggggagccgtttgggggcagccccttctgcccaccccatccttcttcctctccagagatgccaggggggcgtgtatgctctgccccttccctcagacaggggctgggtggggaggctctttaggctcaggagaagcattttaaagaaacccccaccctgccgcccgcattataaacacaggagaataatcaatagaataaaagtgaccgactgtca

SEQ ID NO: 1692 - DNA, 1311 bp, Homo sapiens
  source 1..1311: mol_type = unassigned DNA
atgtccaagccccccgacctcctgctgcggctgctccggggcgccccaaggcagcgggtctgcaccctgttcatcatcggcttcaagttcacgtttttcgtctccatcatgatctactggcacgttgtgggagagcccaaggagaaagggcagctctataacctgccagcagagatcccctgccccaccttgacaccccccaccccaccctcccacggccccactccaggcaacatcttcttcctggagacttcagaccggaccaaccccaacttcctgttcatgtgctcggtggagtcggccgccagaactcaccccgaatcccacgtgctggtcctgatgaaagggcttccgggtggcaacgcctctctgccccggcacctgggcatctcacttctgagctgcttcccgaatgtccagatgctcccgctggacctgcgggagctgttccgggacacacccctggccgactggtacgcggccgtgcaggggcgctgggagccctacctgctgcccgtgctctccgacgcctccaggatcgcactcatgtggaagttcggcggcatctacctggacacggacttcattgttctcaagaacctgcggaacctgaccaacgtgctgggcacccagtcccgctacgtcctcaacggcgcgttcctggccttcgagcgccggcacgagttcatggcgctgtgcatgcgggacttcgtggaccactacaacggctggatctggggtcaccagggcccgcagctgctcacgcgggtcttcaagaagtggtgttccatccgcagcctggccgagagccgcgcctgccgcggcgtcaccaccctgccccctgaggccttctaccccatcccctggcaggactggaagaagtactttgaggacatcaaccccgaggagctgccgcggctgctcagtgccacctatgctgtccacgtgtggaacaagaagagccagggcactgctggcccagctgcatgcccgctactgccccacgacgcacgaggccatgaaaatgtacttgtgaggggcccgccaggtcacctccccaacctgctcctgatggggcactgggccgcccttcccggggaggcaagattgagggcccgggagagggaggcccgagctgccaccgggcttaggcaggctgttgaggagctgtgggagcaggcccagtgggaggctgtggacaccccgaggacagtgtcctgtctcgaggcagggctgacacatggtgccatagccagcggagggcgctcagtgagtgccccgggccttctagacaacaggcaggaaggatga

SEQ ID NO: 1693 - DNA, 524 bp, Homo sapiens
  source 1..524: mol_type = unassigned DNA
tgacacttgactccttgcctacatctatagcttggcacagagagattcacgcaccctcaagagtgtgggtgagacatatacagcctgttagacctgaaggcagatggctcttcttaaggccaataaggatctcatttccgcaggattgaaggagttcagcgttctgctgaatcagcaggtcttcaatgatcctctcgtctctgaagaagacatggtgactgtggtggaggactggatgaacttctacatcaactattacaggcagcaggtgacaggggagccccaagagcgagacaaggctctgcaggagcttcggcaagagctgaacactctggccaaccctttcctggccaagtacagggacttcctgaagtctcatgagctcccgagtcacccaccgccctcctcctagctcagggacccagcccctcctctctgagaaactctgaccttcatgtccttaggctgtgctcctgccactctaccctgacacctcaataaagaccagtgctggttttgttgga

SEQ ID NO: 1694 - DNA, 1766 bp, Homo sapiens
  source 1..1766: mol_type = unassigned DNA
gggcctcattgctgcagacgctcaccccagacactcactgcaccggagtgagcgcgaccatcatgtccatgctcgtggtctttctcttgctgtggggtgtcacctggggcccagtgacagaagcagccatattttatgagacgcagcccagcctgtgggcagagtccgaatcactgctgaaacccttggccaatgtgacgctgacgtgccaggcccacctggagactccagacttccagctgttcaagaatggggtggcccaggagcctgtgcaccttgactcacctgccatcaagcaccagttcctgctgacgggtgacacccagggccgctaccgctgccgctcgggcttgtccacaggatggacccagctgagcaagctcctggagctgacagggccaaagtccttgcctgctccctggctctcgatggcgccagtgtcctggatcacccccggcctgaaaacaacagcagtgtgccgaggtgtgctgcggggtgtgacttttctgctgaggcgggagggcgaccatgagtttctggaggtgcctgaggcccaggaggatgtggaggccacctttccagtccatcagcctggcaactacagctgcagctaccggaccgatggggaaggcgccctctctgagcccagcgctactgtgaccattgaggagctcgctgcaccaccaccgcctgtgctgatgcaccatggagagtcctcccaggtcctgcaccctggcaacaaggtgaccctcacctgcgtggctcccctgagtggagtggacttccagctacggcgcggggagaaagagctgctggtacccaggagcagcaccagcccagatcgcatcttctttcacctgaacgcggtggccctgggggatggaggtcactacacctgccgctaccggctgcatgacaaccaaaacggctggtccggggacagcgcgccggtcgagctgattctgagcgatgagacgctgcccgcgccggagttctccccggagccggagtccggcagggccttgcggctgcggtgcctggcgcccctggagggcgcgcgcttcgccctggtgcgcgaggacaggggcgggcgccgcgtgcaccgtttccagagccccgctgggaccgaggcgctcttcgagctgcacaacatttccgtggctgactccgccaactacagctgcgtctacgtggacctgaagccgcctttcgggggctccgcgcccagcgagcgcttggagctgcacgtggacggaccccctcccaggcctcagctccgggcgacgtggagtggggcggtcctggcgggccgagatgccgtcctgcgctgcgagggacccatccccgacgtcaccttcgagctgctgcgcgagggcgagacgaaggccgtgaagacggtccgcacccccggggccgcggcgaacctcgagctgatcttcgtggggccccagcacgccggcaactacaggtgccgctaccgctcctgggtgccccacaccttcgaatcggagctcagcgaccctgtggagctcctggtggcagaaagctgatgcagccgcgggcccagggtgctgttggtgtcctcagaagtgccggggattctggactggctccctcccctcctgttgcagcacaaggccggggtctctggggggctggagaagcctccctcattcctcccaggaattaataaatgtgaagagaggctctgtttaaaatgtctttggactcccagggctgagtgggctgggatctcgtgtcctcaa

SEQ ID NO: 1695 - DNA, 1434 bp, Homo sapiens
  source 1..1434: mol_type = unassigned DNA
attgtgcttggccaatgcctcttctgaagcagccatcccggcctcttggtactgctgaccccagccaggctacagggatcgattggagctgtccttggggctgtaattggccccagctgagcagggcaaacactgaggtcaactacaagccacaggccccttccccagcctcagttcacagctgccctgttgcagggaggcggtggcccttctgttgctagaccgagcctgtgggatataccaaggcagaggagcccatagccatgaggagcctcggggccctgctcttgctgctgagcgcctgcctggcggtgagcgctggccctgtgccaacgccgcccgacaacatccaagtgcaggaaaacttcaatatctctcggatctatgggaagtggtacaacctggccatcggttccacctgcccctggctgaagaagatcatggacaggatgacagtgagcacgctggtgctgggagagggcgctacagaggcggagatcagcatgaccagcactcgttggcggaaaggtgtctgtgaggagacgtctggagcttatgagaaaacagatactgatgggaagtttctctatcacaaatccaaatggaacataaccatggagtcctatgtggtccacaccaactatgatgagtatgccattttcctgaccaagaaattcagccgccatcatggacccaccattactgccaagctctacgggcgggcgccgcagctgagggaaactctcctgcaggacttcagagtggttgcccagggtgtgggcatccctgaggactccatcttcaccatggctgaccgaggtgaatgtgtccctggggagcaggaaccagagcccatcttaatcccgagagtccggagggctgtgctaccccaagaagaggaaggatcagggggtgggcaactggtaactgaagtcaccaagaaagaagattcctgccagctgggctactcggccggtccctgcatgggaatgaccagcaggtatttctataatggtacatccatggcctgtgagactttccagtacggcggctgcatgggcaacggtaacaacttcgtcacagaaaaggagtgtctgcagacctgccgaactgtggcggcctgcaatctccccatagtccggggcccctgccgagccttcatccagctctgggcatttgatgctgtcaaggggaagtgcgtcctcttcccctacgggggctgccagggcaacgggaacaagttctactcagagaaggagtgcagagagtactgcggtgtccctggtgatggtgatgaggagctgctgcgcttctccaactgacaactggccggtctgcaagtcagaggatggccagtgtctgtcccggggtcctgtggcaggcagcgccaagcaacctgggtccaaataaaaactaaattgtaaactcctgaaa

SEQ ID NO: 1696 - DNA, 1356 bp, Homo sapiens
  source 1..1356: mol_type = unassigned DNA
atgtggggcttatgggaagaggtgaagcaggacagagattagggttgggagacattcagaggcttgggcacaaggagagacctggactggggcaggacactctcctatctatgggaagtggtacaacctggccatcggttccacctgcccctggctgaagaagatcatggacaggatgacagtgagcacgctggtgctgggagagggcgctacagaggcggagatcagcatgaccagcactcgttggcggaaaggtgtctgtgaggagacgtctggagcttatgagaaaacagatactgatgggaagtttctctatcacaaatccaaatggaacataaccatggagtcctatgtggtccacaccaactatgatgagtatgccattttcctgaccaagaaattcagccgccatcatggacccaccattactgccaagctctacgggcgggcgccgcagctgagggaaactctcctgcaggacttcagagtggttgcccagggtgtgggcatccctgaggactccatcttcaccatggctgaccgaggtgaatgtgtccctggggagcaggaaccagagcccatcttaatcccgagagtccggagggctgtgctaccccaagaagaggaaggatcagggggtgggcaactggtaactgaagtcaccaagaaagaagattcctgccagctgggctactcggccggtccctgcatgggaatgaccagcaggtatttctataatggtacatccatggcctgtgagactttccagtacggcggctgcatgggcaacggtaacaacttcgtcacagaaaaggagtgtctgcagacctgccgaactgtgggtgagtgcgggtccccacccctgtgcgctctgcaccctcaagaccctgtccctccagtaaaccacctgcgaattgaaaaggtagctaacagagggcattccagtggtagaactccaggcggtttcctgaaatcttaggaattccacctttggatgtggaggacctcgggcaaatcattttcttcctgtgggccccagtttccccatctgtcaacgagggatgaggtgttctagatgagcagggccctctggctcagcagtctcatgtatgtctgatcagcagtcacaagggtttctcaagttccatgcctctctccactccacagcggcctgcaatctccccatagtccggggcccctgccgagccttcatccagctctgggcatttgatgctgtcaaggggaagtgcgtcctcttcccctacgggggctgccagggcaacgggaacaagttctactcagagaaggagtgcagagagtactgcggtgtccctggtgatggtaggcagccctgca

SEQ ID NO: 1697 - DNA, 1307 bp, Homo sapiens
  source 1..1307: mol_type = unassigned DNA
atcatttttttttctctattaggggaggagcccgtcctggcactcccattggcctgtagattcacctcccctgggcagggccccaggacccaggataatatctgtgcctcctgcccagaaccctccaagcagacacaatggtaagaatggtgcctgtcctgctgtctctgctgctgcttctgggtcctgctgtcccccaggagaaccaagatggtcgttactctctgacctatatctacactgggctgtccaagcatgttgaagacgtccccgcgtttcaggcccttggctcactcaatgacctccagttctttagatacaacagtaaagacaggaagtctcagcccatgggactctggagacaggtggaaggaatggaggattggaagcaggacagccaacttcagaaggccagggaggacatctttatggagaccctgaaagacatcgtggagtattacaacgacagtaacgggtctcacgtattgcagggaaggtttggttgtgagatcgagaataacagaagcagcggagcattctggaaatattactatgatggaaaggactacattgaattcaacaaagaaatcccagcctgggtccccttcgacccagcagcccagataaccaagcagaagtgggaggcagaaccagtctacgtgcagcgggccaaggcttacctggaggaggagtgccctgcgactctgcggaaatacctgaaatacagcaaaaatatcctggaccggcaagatcctccctctgtggtggtcaccagccaccaggccccaggagaaaagaagaaactgaagtgcctggcctacgacttctacccagggaaaattgatgtgcactggactcgggccggcgaggtgcaggagcctgagttacggggagatgttcttcacaatggaaatggcacttaccagtcctgggtggtggtggcagtgcccccgcaggacacagccccctactcctgccacgtgcagcacagcagcctggcccagcccctcgtggtgccctgggaggccagctaggaagcaagggttggaggcaatgtgggatctcagacccagtagctgcccttcctgcctgatgtgggagctgaaccacagaaatcacagtcaatggatccacaaggcctgaggagcagtgtggggggacagacaggaggtggatttggagaccgaagactgggatgcctgtcttgagtagacttggacccaaaaaatcatctcaccttgagcccacccccaccccattgtctaatctgtagaagctaataaataatcatccctccttgcctagca

SEQ ID NO: 1698 - DNA, 1711 bp, Homo sapiens
  source 1..1711: mol_type = unassigned DNA
tgtttgcttttccagggctgatgtttgcagggtgtttttttttttcttttgaaccaaagcagaaatcatcctgtatccttatgcaattcttccggcaggctccaacagataaataaagcccaccaccctccatgggtctacctttcccagcagagcacctgggttggtcccgaagcctccaaccacctgcacgcctgccagggcctctctggggcagccatgaagtccctcgtcctgctcctttgtcttgctcagctctggggctgccactcagccccacatggcccagggctgatttatagacaaccgaactgcgatgatccagaaactgaggaagcagctctggtggctatagactacatcaatcaaaaccttccttggggatacaaacacaccttgaaccagattgatgaagtaaaggtgtggcctcagcagccctccggagagctgtttgagattgaaatagacaccctggaaaccacctgccatgtgctggaccccacccctgtggcaagatgcagcgtgaggcagctgaaggagcatgctgtcgaaggagactgtgatttccagctgttgaaactagatggcaagttttccgtggtatacgcaaaatgtgattccagtccagactcagccgaggacgtgcgcaaggtgtgccaagactgccccctgctggccccgctgaacgacaccagggtggtgcacgccgcgaaagctgccctggccgccttcaacgctcagaacaacggctccaattttcagctggaggaaatttcccgggctcagcttgtgcccctcccaccttctacctatgtggagtttacagtgtctggcactgactgtgttgctaaagaggccacagaggcagccaagtgtaacctgctggcagaaaagcaatatggcttttgtaaggcaacactcagtgagaagcttggtggggcagaggttgcagtgacctgcatggtgttccaaacacagcccgtgagctcacagccccaaccagaaggtgccaatgaagcagtccccacacccgtggtggacccagatgcacctccgtcccctccacttggcgcacctggactccctccagctggctcacccccagactcccatgtgttactggcagctcctccaggacaccagttgcaccgggcgcactacgacctgcgccacaccttcatgggtgtggtctcattggggtcaccctcaggagaagtgtcgcacccccggaaaacacgcacagtggtgcagcctagtgttggtgctgctgctgggccagtggttcctccatgtccggggaggatcagacacttcaaggtctaggctagacatggcagagatgaggaggtttggcacagaaaacatagccaccattttgtccaagcctgggcatgggtggggggccttgtctgctggccacgcaagtgtcacatgcgatctacattaatatcaagtcttgactccctacttcccgtcattcctcacaggacagaagcagagtgggtggtggttatgtttgacagaaggcattaggttgacaacttgtcatgattttgacggtaagccaccatgattgtgttctctgcctctggttgaccttacaaaaaccattggaactgtgactttgaaaggtgctcttgctaagcttatatgtgcctgttaatgaaagtgcctgaaagaccttccttaataaagaaggttctaagctgaa

SEQ ID NO: 1699 - DNA, 1583 bp, Homo sapiens
  source 1..1583: mol_type = unassigned DNA
tgtttgcttttccagggctgatgtttgcagggtgttttttttttcttttgaaccaaagcagaaatcatcctgtatccttatgcaattcttccggcaggctccaacagataaataaagcccaccaccctccatgggtctacctttcccagcagagcacctgggttggtcccgaagcctccaaccacctgcacgcctgccagggcctctctggggcagccatgaagtccctcgtcctgctcctttgtcttgctcagctctggggctgccactcagccccacatggcccagggctgatttatagacaaccgaactgcgatgatccagaaactgaggaagcagctctggtggctatagactacatcaatcaaaaccttccttggggatacaaacacaccttgaaccagattgatgaagtaaaggtgtggcctcagcagccctccggagagctgtttgagattgaaatagacaccctggaaaccacctgccatgtgctggaccccacccctgtggcaagatgcagcgtgaggcagctgaaggagcatgctgtcgaaggagactgtgatttccagctgttgaaactagatggcaagttttccgtggtatacgcaaaatgtgattccagtccagactcagccgaggacgtgcgcaaggtgtgccaagactgccccctgctggccccgctgaacgacaccagggtggtgcacgccgcgaaagctgccctggccgccttcaacgctcagaacaacggctccaattttcagctggaggaaatttcccgggctcagcttgtgcccctcccaccttctacctatgtggagtttacagtgtctggcactgactgtgttgctaaagaggccacagaggcagccaagtgtaacctgctggcagaaaagcaatatggcttttgtaaggcaacactcagtgagaagcttggtggggcagaggttgcagtgacctgcatggtgttccaaacacagcccgtgagctcacagccccaaccagaaggtgccaatgaagcagtccccacacccgtggtggacccagatgcacctccgtcccctccacttggcgcacctggactccctccagctggctcacccccagactcccatgtgttactggcagctcctccaggacaccagttgcaccgggcgcactacgacctgcgccacaccttcatgggtgtggtctcattggggtcaccctcaggagaagtgtcgcacccccggaaaacacgcacagtggtgcagcctagtgttggtgctgctgctgggccagtggttcctccatgtccggggaggatcagacacttcaaggtctaggctagacatggcagagatgaggaggtttggcacagaaaacatagccaccattttgtccaagcctgggcatgggtggggggccttgtctgctggccacgcaagtgtcacatgcgatctacattaatatcaagtcttgactccctacttcccgtcattcctcacaggacagaagcagagtgggtggtggttatgtttgacagaaggcattaggttgacaacttgtcatgattttgacggtaagccaccatgattgtgttctct

SEQ ID NO: 1700 - DNA, 4844 bp, Homo sapiens
  source 1..4844: mol_type = unassigned DNA
gaaaagcttattagctgctgtacggtaaaagtgagctcttacgggaatgggaatgtagttttagccctccagggattctatttagcccgccaggaattaaccttgactataaataggccatcaatgacctttccagagaatgttcagagacctcaactttgtttagagatcttgtgtgggtggaacttcctgtttgcacacagagcagcataaagcccagttgctttgggaagtgtttgggaccagatggattgtagggagtagggtacaatacagtctgttctcctccagctccttctttctgcaacatggggaagaacaaactccttcatccaagtctggttcttctcctcttggtcctcctgcccacagacgcctcagtctctggaaaaccgcagtatatggttctggtcccctccctgctccacactgagaccactgagaagggctgtgtccttctgagctacctgaatgagacagtgactgtaagtgcttccttggagtctgtcaggggaaacaggagcctcttcactgacctggaggcggagaatgacgtactccactgtgtcgccttcgctgtcccaaagtcttcatccaatgaggaggtaatgttcctcactgtccaagtgaaaggaccaacccaagaatttaagaagcggaccacagtgatggttaagaacgaggacagtctggtctttgtccagacagacaaatcaatctacaaaccagggcagacagtgaaatttcgtgttgtctccatggatgaaaactttcaccccctgaatgagttgattccactagtatacattcaggatcccaaaggaaatcgcatcgcacaatggcagagtttccagttagagggtggcctcaagcaattttcttttcccctctcatcagagcccttccagggctcctacaaggtggtggtacagaagaaatcaggtggaaggacagagcaccctttcaccgtggaggaatttgttcttcccaagtttgaagtacaagtaacagtgccaaagataatcaccatcttggaagaagagatgaatgtatcagtgtgtggcctatacacatatgggaagcctgtccctggacatgtgactgtgagcatttgcagaaagtatagtgacgcttccgactgccacggtgaagattcacaggctttctgtgagaaattcagtggacagctaaacagccatggctgcttctatcagcaagtaaaaaccaaggtcttccagctgaagaggaaggagtatgaaatgaaacttcacactgaggcccagatccaagaagaaggaacagtggtggaattgactggaaggcagtccagtgaaatcacaagaaccataaccaaactctcatttgtgaaagtggactcacactttcgacagggaattcccttctttgggcaggtgcgcctagtagatgggaaaggcgtccctataccaaataaagtcatattcatcagaggaaatgaagcaaactattactccaatgctaccacggatgagcatggccttgtacagttctctatcaacaccaccaatgttatgggtacctctcttactgttagggtcaattacaaggatcgtagtccctgttacggctaccagtgggtgtcagaagaacacgaagaggcacatcacactgcttatcttgtgttctccccaagcaagagctttgtccaccttgagcccatgtctcatgaactaccctgtggccatactcagacagtccaggcacattatattctgaatggaggcaccctgctggggctgaagaagctctccttctattatctgataatggcaaagggaggcattgtccgaactgggactcatggactgcttgtgaagcaggaagacatgaagggccatttttccatctcaatccctgtgaagtcagacattgctcctgtcgctcggttgctcatctatgctgttttacctaccggggacgtgattggggattctgcaaaatatgatgttgaaaattgtctggccaacaaggtggatttgagcttcagcccatcacaaagtctcccagcctcacacgcccacctgcgagtcacagcggctcctcagtccgtctgcgccctccgtgctgtggaccaaagcgtgctgctcatgaagcctgatgctgagctctcggcgtcctcggtttacaacctgctaccagaaaaggacctcactggcttccctgggcctttgaatgaccaggacaatgaagactgcatcaatcgtcataatgtctatattaatggaatcacatatactccagtatcaagtacaaatgaaaaggatatgtacagcttcctagaggacatgggcttaaaggcattcaccaactcaaagattcgtaaacccaaaatgtgtccacagcttcaacagtatgaaatgcatggacctgaaggtctacgtgtaggtttttatgagtcagatgtaatgggaagaggccatgcacgcctggtgcatgttgaagagcctcacacggagaccgtacgaaagtacttccctgagacatggatctgggatttggtggtggtaaactcagcaggtgtggctgaggtaggagtaacagtccctgacaccatcaccgagtggaaggcaggggccttctgcctgtctgaagatgctggacttggtatctcttccactgcctctctccgagccttccagcccttctttgtggagctcacaatgccttactctgtgattcgtggagaggccttcacactcaaggccacggtcctaaactaccttcccaaatgcatccgggtcagtgtgcagctggaagcctctcccgccttcctagctgtcccagtggagaaggaacaagcgcctcactgcatctgtgcaaacgggcggcaaactgtgtcctgggcagtaaccccaaagtcattaggaaatgtgaatttcactgtgagcgcagaggcactagagtctcaagagctgtgtgggactgaggtgccttcagttcctgaacacggaaggaaagacacagtcatcaagcctctgttggttgaacctgaaggactagagaaggaaacaacattcaactccctactttgtccatcaggtggtgaggtttctgaagaattatccctgaaactgccaccaaatgtggtagaagaatctgcccgagcttctgtctcagttttgggagacatattaggctctgccatgcaaaacacacaaaatcttctccagatgccctatggctgtggagagcagaatatggtcctctttgctcctaacatctatgtactggattatctaaatgaaacacagcagcttactccagagatcaagtccaaggccattggctatctcaacactggttaccagagacagttgaactacaaacactatgatggctcctacagcacctttggggagcgatatggcaggaaccagggcaacacctggctcacagcctttgttctgaagacttttgcccaagctcgagcctacatcttcatcgatgaagcacacattacccaagccctcatatggctctcccagaggcagaaggacaatggctgtttcaggagctctgggtcactgctcaacaatgccataaagggaggagtagaagatgaagtgaccctctccgcctatatcaccatcgcccttctggagattcctctcacagtcactcaccctgttgtccgcaatgccctgttttgcctggagtcagcctggaagacagcacaagaaggggaccatggcagccatgtatataccaaagcactgctggcctatgcttttgccctggcaggtaaccaggacaagaggaaggaagtactcaagtcacttaatgaggaagctgtgaagaaagacaactctgtccattgggagcgccctcagaaacccaaggcaccagtggggcatttttacgaaccccaggctccctctgctgaggtggagatgacatcctatgtgctcctcgcttatctcacggcccagccagccccaacctcggaggacctgacctctgcaaccaacatcgtgaagtggatcacgaagcagcagaatgcccagggcggtttctcctccacccaggacacagtggtggctctccatgctctgtccaaatatggagcagccacatttaccaggactgggaaggctgcacaggtgactatccagtcttcagggacattttccagcaaattccaagtggacaacaacaaccgcctgttactgcagcaggtctcattgccagagctgcctggggaatacagcatgaaagtgacaggagaaggatgtgtctacctccagacatccttgaaatacaatattctcccagaaaaggaagagttcccctttgctttaggagtgcagactctgcctcaaacttgtgatgaacccaaagcccacaccagcttccaaatctccctaagtgtcagttacacagggagccgctctgcctccaacatggcgatcgttgatgtgaagatggtctctggcttcattcccctgaagccaacagtgaaaatgcttgaaagatctaaccatgtgagccggacagaagtcagcagcaaccatgtcttgatttaccttgataaggtgtcaaatcagacactgagcttgttcttcacggttctgcaagatgtcccagtaagagatctgaaaccagccatagtgaaagtctatgattactacgagacggatgagtttgcaattgctgagtacaatgctccttgcagcaaagatcttggaaatgcttgaagaccacaaggctgaaaagtgctttgctggagtcctgttctcagagctccacagaagacacgtgtttttgtatctttaaagacttgatgaataaacactttttctggtcaa

SEQ ID NO: 1701 - DNA, 623 bp, Homo sapiens
  source 1..623: mol_type = unassigned DNA
atacaagagatgtgagaagcaccataaaaggcgttgtgaggagttgtgggggagtgagggagagaagaggttgaaaagcttattagctgctgtacggtaaaactccttctttctgcaacatggggaagaacaaactccttcatccaagtctggttcttctcctcttggtcctcctgcccacagacgcctcagtctctggaaaaccgcagtatatggttctggtcccctccctgctccacactgagaccactgagaagggctgtgtccttctgagctacctgaatgagacagtgactgtaagtgcttccttggagtctgtcaggggaaacaggagcctcttcactgacctggaggcggagaatgacgtactccactgtgtcgccttcgctgtcccaaagtcttcatccaatgaggaggtaatgttcctcactgtccaagtgaaaggaccaacccaagaatttaagaagcggaccacagtgatggttaagaacgaggacagtctggtctttgtccagacagacaaatcaatctacaaaccagggcagacagtgaaatttcgtgttgtctccatggatgaaaactttcaccccctgaatgagttgattccactagtatacattcag

SEQ ID NO: 1702 - DNA, 4563 bp, Homo sapiens
  source 1..4563: mol_type = unassigned DNA
agggtacaatacgtctgttctcctccagctccttctttctgcaacatggggaagaacaaactccttcatccaagtctggttcttctcctcttggtcctcctgcccacagacgcctcagtctctggaaaaccgcagtatatggttctggtcccctccctgctccacactgagaccactgagaagggctgtgtccttctgagctacctgaatgagacagtgactgtaagtgcttccttggagtctgtcaggggaaacaggagcctcttcactgacctggaggcggagaatgacgtactccactgtgtcgccttcgctgtcccaaagtcttcatccaatgaggaggtaatgttcctcactgtccaagtgaaaggaccaacccaagaatttaagaagcggaccacagtgatggttaagaacgaggacagtctggtctttgtccagacagacaaatcaatctacaaaccagggcagacagtgaaatttcgtgttgtctccatggatgaaaactttcaccccctgaatgagttgattccactagtatacattcaggatcccaaaggaaatcgcatcgcacaatggcagagtttccagttagagggtggcctcaagcaattttcttttcccctctcatcagagcccttccagggctcctacaaggtggtggtacagaagaaatcaggtggaaggacagagcaccctttcaccgtggaggaatttgttcttcccaagtttgaagtacaagtaacagtgccaaagataatcaccatcttggaagaagagatgaatgtatcagtgtgtggcctatacacatatgggaagcctgtccctggacatgtgactgtgagcatttgcagaaagtatagtgacgcttccgactgccacggtgaagattcacaggctttctgtgagaaattcagtggacagctaaacagccatggctgcttctatcagcaagtaaaaaccaaggtcttccagctgaagaggaaggagtatgaaatgaaacttcacactgaggcccagatccaagaagaaggaacagtggtggaattgactggaaggcagtccagtgaaatcacaagaaccataaccaaactctcatttgtgaaagtggactcacactttcgacagggaattcccttctttgggcaggtgcgcctagtagatgggaaaggcgtccctataccaaataaagtcatattcatcagaggaaatgaagcaaactattactccaatgctaccacggatgagcatggccttgtacagttctctatcaacaccaccaatgttatgggtacctctcttactgttagggtcaattacaaggatcgtagtccctgttacggctaccagtgggtgtcagaagaacacgaagaggcacatcacactgcttatcttgtgttctccccaagcaagagctttgtccaccttgagcccatgtctcatgaactaccctgtggccatactcagacagtccaggcacattatattctgaatggaggcaccctgctggggctgaagaagctctccttctattatctgataatggcaaagggaggcattgtccgaactgggactcatggactgcttgtgaagcaggaagacatgaagggccatttttccatctcaatccctgtgaagtcagacattgctcctgtcgctcggttgctcatctatgctgttttacctaccggggacgtgattggggattctgcaaaatatgatgttgaaaattgtctggccaacaaggtggatttgagcttcagcccatcacaaagtctcccagcctcacacgcccacctgcgagtcacagcggctcctcagtccgtctgcgccctccgtgctgtggaccaaagcgtgctgctcatgaagcctgatgctgagctctcggcgtcctcggtttacaacctgctaccagaaaaggacctcactggcttccctgggcctttgaatgaccaggacaatgaagactgcatcaatcgtcataatgtctatattaatggaatcacatatactccagtatcaagtacaaatgaaaaggatatgtacagcttcctagaggacatgggcttaaaggcattcaccaactcaaagattcgtaaacccaaaatgtgtccacagcttcaacagtatgaaatgcatggacctgaaggtctacgtgtaggtttttatgagtcagatgtaatgggaagaggccatgcacgcctggtgcatgttgaagagcctcacacggagaccgtacgaaagtacttccctgagacatggatctgggatttggtggtggtaaactcagcaggtgtggctgaggtaggagtaacagtccctgacaccatcaccgagtggaaggcaggggccttctgcctgtctgaagatgctggacttggtatctcttccactgcctctctccgagccttccagcccttctttgtggagctcacaatgccttactctgtgattcgtggagaggccttcacactcaaggccacggtcctaaactaccttcccaaatgcatccgggtcagtgtgcagctggaagcctctcccgccttcctagctgtcccagtggagaaggaacaagcgcctcactgcatctgtgcaaacgggcggcaaactgtgtcctgggcagtaaccccaaagtcattaggaaatgtgaatttcactgtgagcgcagaggcactagagtctcaagagctgtgtgggactgaggtgccttcagttcctgaacacggaaggaaagacacagtcatcaagcctctgttggttgaacctgaaggactagagaaggaaacaacattcaactccctactttgtccatcaggtggtgaggtttctgaagaattatccctgaaactgccaccaaatgtggtagaagaatctgcccgagcttctgtctcagttttgggagacatattaggctctgccatgcaaaacacacaaaatcttctccagatgccctatggctgtggagagcagaatatggtcctctttgctcctaacatctatgtactggattatctaaatgaaacacagcagcttactccagagatcaagtccaaggccattggctatctcaacactggttaccagagacagttgaactacaaacactatgatggctcctacagcacctttggggagcgatatggcaggaaccagggcaacacctggctcacagcctttgttctgaagacttttgcccaagctcgagcctacatcttcatcgatgaagcacacattacccaagccctcatatggctctcccagaggcagaaggacaatggctgtttcaggagctctgggtcactgctcaacaatgccataaagggaggagtagaagatgaagtgaccctctccgcctatatcaccatcgcccttctggagattcctctcacagtcactcaccctgttgtccgcaatgccctgttttgcctggagtcagcctggaagacagcacaagaaggggaccatggcagccatgtatataccaaagcactgctggcctatgcttttgccctggcaggtaaccaggacaagaggaaggaagtactcaagtcacttaatgaggaagctgtgaagaaagacaactctgtccattgggagcgccctcagaaacccaaggcaccagtggggcatttttacgaaccccaggctccctctgctgaggtggagatgacatcctatgtgctcctcgcttatctcacggcccagccagccccaacctcggaggacctgacctctgcaaccaacatcgtgaagtggatcacgaagcagcagaatgcccagggcggtttctcctccacccaggacacagtggtggctctccatgctctgtccaaatatggagcagccacatttaccaggactgggaaggctgcacaggtgactatccagtcttcagggacattttccagcaaattccaagtggacaacaacaaccgcctgttactgcagcaggtctcattgccagagctgcctggggaatacagcatgaaagtgacaggagaaggatgtgtctacctccagacatccttgaaatacaatattctcccagaaaaggaagagttcccctttgctttaggagtgcagactctgcctcaaacttgtgatgaacccaaagcccacaccagcttccaaatctccctaagtgtcagttacacagggagccgctctgcctccaacatggcgatcgttgatgtgaagatggtctctggcttcattcccctgaagccaacagtgaaaatgcttgaaagatctaaccatgtgagccggacagaagtcagcagcaaccatgtcttgatttaccttgataaggtgtcaaatcagacactgagcttgttcttcacggttctgcaagatgtcccagtaagagatctgaaaccagccatagtgaaagtctatgattactacgagacggatgagtttgcaattgctgagtacaatgctccttgcagcaaagatcttggaaatgcttgaagaccacaaggctgaaaagtgctttgctggagtcctgttctcagagctccacagaagacacgtgtttttgtatctttaaagacttgatgaata

SEQ ID NO: 1703 - DNA, 5274 bp, Homo sapiens
  source 1..5274: mol_type = unassigned DNA
gtccaccacctaacctggtggttacagaaggaggaacacagtcctcctgtgttccaggtgccaggaggtgactgactatagcatcagtcatcactgcacaccctacctggaattagtatataaagctacgcggagcgatctctgcccctgaccctggaaaaatctgtctcacccacaaagatgtgggctcagctccttctaggaatgttggccctatcaccagccattgcagaagaacttccaaactacctggtgacattaccagcccggctaaatttcccctccgttcagaaggtttgtttggacctgagccctgggtacagtgatgttaaattcacggttactctggagaccaaggacaagacccagaagttgctagaatactctggactgaagaagaggcacttacattgtatctcctttcttgtaccacctcctgctggtggcacagaagaagtggccacaatccgggtgtcgggagttggaaataacatcagctttgaggagaagaaaaaggttctaattcagaggcaggggaacggcacctttgtacagactgacaaacctctctacaccccagggcagcaagtgtatttccgcattgtcaccatggatagcaacttcgttccagtgaatgacaagtactccatggtggaactacaggatccaaatagcaacaggattgcacagtggctggaagtggtacctgagcaaggcattgtagacctgtccttccaactggcaccagaggcaatgctgggcacctacactgtggcagtggctgagggcaagacctttggtactttcagtgtggaggaatatgtgctgccgaagtttaaggtggaagtggtggaacccaaggagttatcaacggtgcaggaatctttcttagtaaaaatttgttgtaggtacacctatggaaagcccatgctaggggcagtgcaggtatctgtgtgtcagaaggcaaatacttactggtatcgagaggtggaacgggaacagcttcctgacaaatgcaggaacctctctggacagactgacaaaacaggatgtttctcagcacctgtggacatggccacctttgacctcattggatatgcgtacagccatcaaatcaatattgtggctactgttgtggaggaagggacaggtgtggaggccaatgccactcagaatatctacatttctccacaaatgggatcaatgacctttgaagacaccagcaatttttaccatccaaatttccccttcagtgggaagataagagttaggggccatgatgactccttcctcaagaaccatctagtgtttctggtgatttatggcacaaatggaaccttcaaccagaccctggttactgataacaatggcctagctccctttaccttggagacatccggttggaatgggacagacgtttctctggagggaaagtttcaaatggaagacttagtatataatccggaacaagtgccacgttactaccaaaatgcctacctgcacctgcgacccttctacagcacaacccgcagcttccttggcatccaccggctaaacggccccttgaaatgtggccagccccaggaagtgctggtggattattacatcgacccggccgatgcaagccctgaccaagagatcagcttctcctactatttaatagggaaaggaagtttggtgatggaggggcagaaacacctgaactctaagaagaaaggactgaaagcctccttctctctctcactgaccttcacttcgagactggcccctgatccttccctggtgatctatgccatttttcccagtggaggtgttgtagctgacaaaattcagttctcagtcgagatgtgctttgacaatcaggtttcccttggcttctccccctcccagcagcttccaggagcagaagtggagctgcagctgcaggcagctcccggatccctgtgtgcgctccgggcggtggatgagagtgtcttactgcttaggccagacagagagctgagcaaccgctctgtctatgggatgtttccattctggtatggtcactacccctatcaagtggctgagtatgatcagtgtccagtgtctggcccatgggactttcctcagcccctcattgacccaatgccccaagggcattcgagccagcgttccattatctggaggccctcgttctctgaaggcacggaccttttcagctttttccgggacgtgggcctgaaaatactgtccaatgccaaaatcaagaagccagtagattgcagtcacagatctccagaatacagcactgctatgggtgcaggcggtggtcatccagaggcttttgagtcatcaactcctttacatcaagcagaggattctcaggtccgccagtacttcccagagacctggctctgggatctgtttcctattggtaactcggggaaggaggcggtccacgtcacagttcctgacgccatcaccgagtggaaggcgatgagtttctgcacttcccagtcaagaggcttcgggctttcacccactgttggactaactgctttcaagccgttctttgttgacctgactctcccttactcagtagtccgtggggaatcctttcgtcttactgccaccatcttcaattacctaaaggattgcatcagggttcagactgacctggctaaatcgcatgagtaccagctagaatcatgggcagattctcagacctccagttgtctctgtgctgatgacgcaaaaacccaccactggaacatcacagctgtcaaattgggtcacattaactttactattagtacaaagattctggacagcaatgaaccatgtgggggccagaaggggtttgttccccaaaagggccgaagtgacacgctcatcaagccagttctcgtcaaacctgagggagtcctggtggagaagacacacagctcattgctgtgcccaaaaggaaaggtggcatctgaatctgtctccctggagctcccagtggacattgttcctgactcgaccaaggcttatgttacggttctgggagacattatgggcacagccctgcagaacctggatggtctggtgcagatgcccagtggctgtggcgagcagaacatggtcttgtttgctcccatcatctatgtcttgcagtacctggagaaggcagggctgctgacggaggagatcaggtctcgggcagtgggtttcctggaaatagggtaccagaaggagctgatgtacaaacacagcaatggctcatacagtgcctttggggagcgagatggaaatggaaacacatggctgacagcgtttgtcacaaaatgctttggccaagctcagaaattcatcttcattgatcccaagaacatccaggatgctctcaagtggatggcaggaaaccagctccccagtggctgctatgccaacgtgggaaatctccttcacacagctatgaagggtggtgttgatgatgaggtctccttgactgcgtatgtcacagctgcattgctggagatgggaaaggatgtagatgacccaatggtgagtcagggtctacggtgtctcaagaattcggccacctccacgaccaacctctacacacaggccctgttggcttacattttctccctggctggggaaatggacatcagaaacattctccttaaacagttagatcaacaggctatcatctcaggagaatccatttactggagccagaaacctactccatcatcgaacgccagcccttggtctgagcctgcggctgtagatgtggaactcacagcatatgcattgttggcccagcttaccaagcccagcctgactcaaaaggagatagcgaaggccactagcatagtggcttggttggccaagcaacacaatgcatatgggggcttctcttctactcaggatactgtagttgctctccaagctcttgccaaatatgccactaccgcctacatgccatctgaggagatcaacctggttgtaaaatccactgagaatttccagcgcacattcaacatacagtcagttaacagattggtatttcagcaggataccctgcccaatgtccctggaatgtacacgttggaggcctcaggccagggctgtgtctatgtgcagacggtgttgagatacaatattctccctcccacaaatatgaagacctttagtcttagtgtggaaataggaaaagctagatgtgagcaaccgacttcacctcgatccttgactctcactattcacaccagttatgtggggagccgtagctcttccaatatggctattgtggaagtgaagatgctatctgggttcagtcccatggagggcaccaatcagttacttctccagcaacccctggtgaagaaggttgaatttggaactgacacacttaacatttacttggatgagctcattaagaacactcagacttacaccttcaccatcagccaaagtgtgctggtcaccaacttgaaaccagcaaccatcaaggtctatgactactacctaccagatgaacaggcaacaattcagtattctgatccctgtgaatgaggataggagctggaaactcaattagtcctctgtgacatttactggagggtggaacattcttctgtcgcttgaagcagaactcattcaatcaaataatttaatttctctgactagtatatgggtaacaaatgaatatgtctgaacctcagctataatactttctactacctttgcaaggagatgggataggaacaatcactcagaggaggcgttgcatgggcagggtcatagggggaagaaaggtggtttagctgttttatttagccattcagggggctctccagagaggagacggtggtagagggtgaactagagaagataagaatgtcttcctaggccggatgcggtggctcacgcctgtaatcccagcactttgggattgcgaggtgggcggatcacttgaggtcaggagttcaagaccagcctggccaacatggtaaaacccgtctctactaacaatacaaagattagcctggtgtggtggcacgggcctgtaatcgcagccccttggaaggccaaggcaggagaatcgcctcaacactggaggtggaggttgcagtgagctgagattgtgccactgcactccagcctgggcaatgaggcaagaccctgtctcaaaaaataataaataataataataataatgtttttctagagtttcagtctaagggaaaatgtgatttagggctttggaaattggctaaaaaaataaaaatggaaaagaaaatc

SEQ ID NO: 1704 - DNA, 5190 bp, Homo sapiens
  source 1..5190: mol_type = unassigned DNA
atcagtcatcactgcacaccctacctggaattagtatataaagctacgcggagcgatctctgcccctgaccctggaaaaatctgtctcacccacaaagatgtgggctcagctccttctaggaatgttggccctatcaccagccattgcagaagaacttccaaactacctggtgacattaccagcccggctaaatttcccctccgttcagaaggtttgtttggacctgagccctgggtacagtgatgttaaattcacggttactctggagaccaaggacaagacccagaagttgctagaatactctggactgaagaagaggcacttacattgtatctcctttcttgtaccacctcctgctggtggcacagaagaagtggccacaatccgggtgtcgggagttggaaataacatcagctttgaggagaagaaaaaggttctaattcagaggcaggggaacggcacctttgtacagactgacaaacctctctacaccccagggcagcaagtgtatttccgcattgtcaccatggatagcaacttcgttccagtgaatgacaaggtgagttgggaggagggacaggatccaaatagcaacaggattgcacagtggctggaagtggtacctgagcaaggcattgtagacctgtccttccaactggcaccagaggcaatgctgggcacctacactgtggcagtggctgagggcaagacctttggtactttcagtgtggaggaatatgtgctgccgaagtttaaggtggaagtggtggaacccaaggagttatcaacggtgcaggaatctttcttagtaaaaatttgttgtaggtacacctatggaaagcccatgctaggggcagtgcaggtatctgtgtgtcagaaggcaaatacttactggtatcgagaggtggaacgggaacagcttcctgacaaatgcaggaacctctctggacagactgacaaaacaggatgtttctcagcacctgtggacatggccacctttgacctcattggatatgcgtacagccatcaaatcaatattgtggctactgttgtggaggaagggacaggtgtggaggccaatgccactcagaatatctacatttctccacaaatgggatcaatgacctttgaagacaccagcaatttttaccatccaaatttccccttcagtgggaagataagagttaggggccatgatgactccttcctcaagaaccatctagtgtttctggtgatttatggcacaaatggaaccttcaaccagaccctggttactgataacaatggcctagctccctttaccttggagacatccggttggaatgggacagacgtttctctggagggaaagtttcaaatggaagacttagtatataatccggaacaagtgccacgttactaccaaaatgcctacctgcacctgcgacccttctacagcacaacccgcagcttccttggcatccaccggctaaacggccccttgaaatgtggccagccccaggaagtgctggtggattattacatcgacccggccgatgcaagccctgaccaagagatcagcttctcctactatttaatagggaaaggaagtttggtgatggaggggcagaaacacctgaactctaagaagaaaggactgaaagcctccttctctctctcactgaccttcacttcgagactggcccctgatccttccctggtgatctatgccatttttcccagtggaggtgttgtagctgacaaaattcagttctcagtcgagatgtgctttgacaatcaggtttcccttggcttctccccctcccagcagcttccaggagcagaagtggagctgcagctgcaggcagctcccggatccctgtgtgcgctccgggcggtggatgagagtgtcttactgcttaggccagacagagagctgagcaaccgctctgtctatgggatgtttccattctggtatggtcactacccctatcaagtggctgagtatgatcagtgtccagtgtctggcccatgggactttcctcagcccctcattgacccaatgccccaagggcattcgagccagcgttccattatctggaggccctcgttctctgaaggcacggaccttttcagctttttccgggacgtgggcctgaaaatactgtccaatgccaaaatcaagaagccagtagattgcagtcacagatctccagaatacagcactgctatgggtgcaggcggtggtcatccagaggcttttgagtcatcaactcctttacatcaagcagaggattctcaggtccgccagtacttcccagagacctggctctgggatctgtttcctattggtaactcggggaaggaggcggtccacgtcacagttcctgacgccatcaccgagtggaaggcgatgagtttctgcacttcccagtcaagaggcttcgggctttcacccactgttggactaactgctttcaagccgttctttgttgacctgactctcccttactcagtagtccgtggggaatcctttcgtcttactgccaccatcttcaattacctaaaggattgcatcagggttcagactgacctggctaaatcgcatgagtaccagctagaatcatgggcagattctcagacctccagttgtctctgtgctgatgacgcaaaaacccaccactggaacatcacagctgtcaaattgggtcacattaactttactattagtacaaagattctggacagcaatgaaccatgtgggggccagaaggggtttgttccccaaaagggccgaagtgacacgctcatcaagccagttctcgtcaaacctgagggagtcctggtggagaagacacacagctcattgctgtgcccaaaaggaaaggtggcatctgaatctgtctccctggagctcccagtggacattgttcctgactcgaccaaggcttatgttacggttctgggagacattatgggcacagccctgcagaacctggatggtctggtgcagatgcccagtggctgtggcgagcagaacatggtcttgtttgctcccatcatctatgtcttgcagtacctggagaaggcagggctgctgacggaggagatcaggtctcgggcagtgggtttcctggaaatagggtaccagaaggagctgatgtacaaacacagcaatggctcatacagtgcctttggggagcgagatggaaatggaaacacatggctgacagcgtttgtcacaaaatgctttggccaagctcagaaattcatcttcattgatcccaagaacatccaggatgctctcaagtggatggcaggaaaccagctccccagtggctgctatgccaacgtgggaaatctccttcacacagctatgaagggtggtgttgatgatgaggtctccttgactgcgtatgtcacagctgcattgctggagatgggaaaggatgtagatgacccaatggtgagtcagggtctacggtgtctcaagaattcggccacctccacgaccaacctctacacacaggccctgttggcttacattttctccctggctggggaaatggacatcagaaacattctccttaaacagttagatcaacaggctatcatctcaggagaatccatttactggagccagaaacctactccatcatcgaacgccagcccttggtctgagcctgcggctgtagatgtggaactcacagcatatgcattgttggcccagcttaccaagcccagcctgactcaaaaggagatagcgaaggccactagcatagtggcttggttggccaagcaacacaatgcatatgggggcttctcttctactcaggatactgtagttgctctccaagctcttgccaaatatgccactaccgcctacatgccatctgaggagatcaacctggttgtaaaatccactgagaatttccagcgcacattcaacatacagtcagttaacagattggtatttcagcaggataccctgcccaatgtccctggaatgtacacgttggaggcctcaggccagggctgtgtctatgtgcagacggtgttgagatacaatattctccctcccacaaatatgaagacctttagtcttagtgtggaaataggaaaagctagatgtgagcaaccgacttcacctcgatccttgactctcactattcacaccagttatgtggggagccgtagctcttccaatatggctattgtggaagtgaagatgctatctgggttcagtcccatggagggcaccaatcagttacttctccagcaacccctggtgaagaaggttgaatttggaactgacacacttaacatttacttggatgagctcattaagaacactcagacttacaccttcaccatcagccaaagtgtgctggtcaccaacttgaaaccagcaaccatcaaggtctatgactactacctaccagatgaacaggcaacaattcagtattctgatccctgtgaatgaggataggagctggaaactcaattagtcctctgtgacatttactggagggtggaacattcttctgtcgcttgaagcagaactcattcaatcaaataatttaatttctctgactagtatatgggtaacaaatgaatatgtctgaacctcagctataatactttctactacctttgcaaggagatgggataggaacaatcactcagaggaggcgttgcatgggcagggtcatagggggaagaaaggtggtttagctgttttatttagccattcagggggctctccagagaggagacggtggtagagggtgaactagagaagataagaatgtcttcctaggccggatgcggtggctcacgcctgtaatcccagcactttgggattgcgaggtgggcggatcacttgaggtcaggagttcaagaccagcctggccaacatggtaaaacccgtctctactaacaatacaaagattagcctggtgtggtggcacgggcctgtaatcgcagccccttggaaggccaaggcaggagaatcgcctcaacactggaggtggaggttgcagtgagctgagattgtgccactgcactccagcctgggcaatgaggcaagaccctgtctcaaaaaataataaataataataataataatgtttttctagagtttcagtctaagggaaaatgtgatttagggctttggaaattggctaaaaaaataaaaatggaaaagaaaa

SEQ ID NO: 1705 - DNA, 3370 bp, Homo sapiens
  source 1..3370: mol_type = unassigned DNA
agcttccttggcatccaccggctaaacggccccttgaaatgtggccagccccaggaagtgctggtggattattacatcgacccggccgatgcaagccctgaccaagagatcagcttctcctactatttaatagggaaaggaagtttggtgatggaggggcagaaacacctgaactctaagaagaaaggactgaaagcctccttctctctctcactgaccttcacttcgagactggcccctgatccttccctggtgatctatgccatttttcccagtggaggtgttgtagctgacaaaattcagttctcagtcgagatgtgctttgacaatcaggtttcccttggcttctccccctcccagcagcttccaggagcagaagtggagctgcagctgcaggcagctcccggatccctgtgtgcgctccgggcggtggatgagagtgtcttactgcttaggccagacagagagctgagcaaccgctctgtctatgggatgtttccattctggtatggtcactacccctatcaagtggctgagtatgatcagtgtccagtgtctggcccatgggactttcctcagcccctcattgacccaatgccccaagggcattcgagccagcgttccattatctggaggccctcgttctctgaaggcacggaccttttcagctttttccgggacgtgggcctgaaaatactgtccaatgccaaaatcaagaagccagtagattgcagtcacagatctccagaatacagcactgctatgggtgcaggcggtggtcatccagaggcttttgagtcatcaactcctttacatcaagcagaggattctcaggtccgccagtacttcccagagacctggctctgggatctgtttcctattggtaactcggggaaggaggcggtccacgtcacagttcctgacgccatcaccgagtggaaggcgatgagtttctgcacttcccagtcaagaggcttcgggctttcacccactgttggactaactgctttcaagccgttctttgttgacctgactctcccttactcagtagtccgtggggaatcctttcgtcttactgccaccatcttcaattacctaaaggattgcatcagggttcagactgacctggctaaatcgcatgagtaccagctagaatcatgggcagattctcagacctccagttgtctctgtgctgatgacgcaaaaacccaccactggaacatcacagctgtcaaattgggtcacattaactttactattagtacaaagattctggacagcaatgaaccatgtgggggccagaaggggtttgttccccaaaagggccgaagtgacacgctcatcaagccagttctcgtcaaacctgagggagtcctggtggagaagacacacagctcattgctgtgcccaaaaggaaaggtggcatctgaatctgtctccctggagctcccagtggacattgttcctgactcgaccaaggcttatgttacggttctgggagacattatgggcacagccctgcagaacctggatggtctggtgcagatgcccagtggctgtggcgagcagaacatggtcttgtttgctcccatcatctatgtcttgcagtacctggagaaggcagggctgctgacggaggagatcaggtctcgggcagtgggtttcctggaaatagggtaccagaaggagctgatgtacaaacacagcaatggctcatacagtgcctttggggagcgagatggaaatggaaacacatggctgacagcgtttgtcacaaaatgctttggccaagctcagaaattcatcttcattgatcccaagaacatccaggatgctctcaagtggatggcaggaaaccagctccccagtggctgctatgccaacgtgggaaatctccttcacacagctatgaagggtggtgttgatgatgaggtctccttgactgcgtatgtcacagctgcattgctggagatgggaaaggatgtagatgacccaatggtgagtcagggtctacggtgtctcaagaattcggccacctccacgaccaacctctacacacaggccctgttggcttacattttctccctggctggggaaatggacatcagaaacattctccttaaacagttagatcaacaggctatcatctcaggagaatccatttactggagccagaaacctactccatcatcgaacgccagcccttggtctgagcctgcggctgtagatgtggaactcacagcatatgcattgttggcccagcttaccaagcccagcctgactcaaaaggagatagcgaaggccactagcatagtggcttggttggccaagcaacacaatgcatatgggggcttctcttctactcaggatactgtagttgctctccaagctcttgccaaatatgccactaccgcctacatgccatctgaggagatcaacctggttgtaaaatccactgagaatttccagcgcacattcaacatacagtcagttaacagattggtatttcagcaggataccctgcccaatgtccctggaatgtacacgttggaggcctcaggccagggctgtgtctatgtgcagacggtgttgagatacaatattctccctcccacaaatatgaagacctttagtcttagtgtggaaataggaaaagctagatgtgagcaaccgacttcacctcgatccttgactctcactattcacaccagttatgtggggagccgtagctcttccaatatggctattgtggaagtgaagatgctatctgggttcagtcccatggagggcaccaatcagttacttctccagcaacccctggtgaagaaggttgaatttggaactgacacacttaacatttacttggatgagctcattaagaacactcagacttacaccttcaccatcagccaaagtgtgctggtcaccaacttgaaaccagcaaccatcaaggtctatgactactacctaccagatgaacaggcaacaattcagtattctgatccctgtgaatgaggatctggctctgttgcccaggctgcagtgcagtggcgtgatctcagctcactgcagcctctgcctcccaagttcaagcgattcttgtgcctcagcctcctgagtagctgggatgacaggcacgtgccatcacgcccagctaattttttttgtatttttaatagagatggggtttcgccatgttggtcaggctggtctcaaactcctggcctcaggtgatccgcctacttcagcctcccaaagtgctgggattacaggtgtaagccactgtgcccggcctgtcctaaactcttgaaaatagtttacagaagaaaaagctaatgcttggtattaaaacaatacttttttctatcag

SEQ ID NO: 1706 - DNA, 2484 bp, Homo sapiens
  source 1..2484: mol_type = unassigned DNA
actagttaacaggcattgcctgaaaagagtataaaagaatttcagcatgattttccatattgtgcttccaccactgccaataacaaaataactagcaaccatgaagtgggtggaatcaatttttttaattttcctactaaattttactgaatccagaacactgcatagaaatgaatatggaatagcttccatattggattcttaccaatgtactgcagagataagtttagctgacctggctaccatattttttgcccagtttgttcaagaagccacttacaaggaagtaagcaaaatggtgaaagatgcattgactgcaattgagaaacccactggagatgaacagtcttcagggtgtttagaaaaccagctacctgcctttctggaagaactttgccatgagaaagaaattttggagaagtacggacattcagactgctgcagccaaagtgaagagggaagacataactgttttcttgcacacaaaaagcccactccagcatcgatcccacttttccaagttccagaacctgtcacaagctgtgaagcatatgaagaagacagggagacattcatgaacaaattcatttatgagatagcaagaaggcatcccttcctgtatgcacctacaattcttctttgggctgctcgctatgacaaaataattccatcttgctgcaaagctgaaaatgcagttgaatgcttccaaacaaaggcagcaacagttacaaaagaattaagagaaagcagcttgttaaatcaacatgcatgtgcagtaatgaaaaattttgggacccgaactttccaagccataactgttactaaactgagtcagaagtttaccaaagttaattttactgaaatccagaaactagtcctggatgtggcccatgtacatgagcactgttgcagaggagatgtgctggattgtctgcaggatggggaaaaaatcatgtcctacatatgttctcaacaagacactctgtcaaacaaaataacagaatgctgcaaactgaccacgctggaacgtggtcaatgtataattcatgcagaaaatgatgaaaaacctgaaggtctatctccaaatctaaacaggtttttaggagatagagattttaaccaattttcttcaggggaaaaaaatatcttcttggcaagttttgttcatgaatattcaagaagacatcctcagcttgctgtctcagtaattctaagagttgctaaaggataccaggagttattggagaagtgtttccagactgaaaaccctcttgaatgccaagataaaggagaagaagaattacagaaatacatccaggagagccaagcattggcaaagcgaagctgcggcctcttccagaaactaggagaatattacttacaaaatgcgtttctcgttgcttacacaaagaaagccccccagctgacctcgtcggagctgatggccatcaccagaaaaatggcagccacagcagccacttgttgccaactcagtgaggacaaactattggcctgtggcgagggagcggctgacattattatcggacacttatgtatcagacatgaaatgactccagtaaaccctggtgttggccagtgctgcacttcttcatatgccaacaggaggccatgcttcagcagcttggtggtggatgaaacatatgtccctcctgcattctctgatgacaagttcattttccataaggatctgtgccaagctcagggtgtagcgctgcaaacaatgaagcaagagtttctcattaaccttgtgaagcaaaagccacaaataacagaggaacaacttgaggctgtcattgcagatttctcaggcctgttggagaaatgctgccaaggccaggaacaggaagtctgctttgctgaagagggacaaaaactgatttcaaaaactcgtgctgctttgggagtttaaattacttcaggggaagagaagacaaaacgagtctttcattcggtgtgaacttttctctttaattttaactgatttaacactttttgtgaattaatgaaatgataaagacttttatgtgagatttccttatcacagaaataaaatatctccaaatgtttccttttccaagtttgcttatttatgaaaagttatcgataatttctttagttttgtataccattgtctgaagcagattctgttaaaatagcattaagtgttggttattataggagattaaagctatccaaggatggatttacagcactagatcacttggtgaactgaaaaatgttcccaagttaaacactatttgatgctaccagggcattttgtttattaaatgaccatcactgaagtattctaacagataatctggagatgagaaaagaaattattattcttctatgggatctaagaaaatttaacatctactttttttctcaatcttgttcagttctctattcacagacattttaaaacataagaatattacagttttgattgaatataattaa

SEQ ID NO: 1707 - DNA, 4537 bp, Homo sapiens
  source 1..4537: mol_type = unassigned DNA
tttatgagaaacagtgtgtttcagagaggctgtaccagaattaactctgctcagagttagatttgctggtcttaaagtacttttcctctttaagataaaagaagttcttctaaatcaggaatggattgaaatctaatgaaccgaaactttgggtaattgatcaccctagacccagggacacccaattcatcgtaatcatcatgaataatcaaaaagtggtagctgtgctactgcaagagtgcaagcaagtgctggatcagctcttgttggaagcgccagatgtgtcggaagaggacaagagcgaggaccagcgctgcagagctttactccccagcgagttaaggaccctgatccaggaggcaaaggaaatgaagtggcccttcgtgcctgaaaagtggcagtacaaacaagccgtgggcccagaggacaaaacaaacctgaaggatgtgattggcgccgggttgcagcagttactggcgtccctgagggcctccatcctcgctcgggactgtgcggctgcggcggctattgtgttcttggtggaccggttcctgtatgggctcgacgtctctggaaaacttctgcaggtcgccaaaggtctccacaagttgcagccagccacgccaattgccccgcaggtggttattcgccaagcccgaatctccgtgaactcaggaaaacttttaaaagcagagtatattctgagcagtctaataagcaacaatggagcaacgggtacctggctgtacagaaatgaaagtgacaaggtcctggtgcagtcggtctgtatacagatcagagggcagattctgcaaaagctggggatgtggtacgaagcagcagagttaatatgggcctccattgtaggatatttggcacttcctcagccggataaaaagggcctctccacgtcgctaggtatactggcagacatctttgtttccatgagcaagaacgattatgaaaagtttaaaaacaatccacaaattaatttgagcctgctgaaggagtttgaccaccatttgctgtccgctgcagaagcctgcaagctggcagctgccttcagtgcctatacgccgctcttcgtgctcacagctgtgaatatccgtggcacgtgtttattgtcctacagtagttcaaatgactgtcctccagaattgaaaaacttacatctgtgtgaagccaaagaggcctttgagattggcctcctcaccaagagagatgatgagcctgttactggaaaacaggagcttcacagctttgtcaaagctgctttcggtctcaccacagtgcacagaaggctccatggggagacagggacggtccatgcagcaagtcagctctgtaaggaagcaatggggaagctgtacaatttcagcacttcctccagaagtcaggacagagaagctctgtctcaagaagttatgtctgtgattgcccaggtgaaggaacatttacaagttcaaagcttctcaaatgtagatgacagatcttatgttcccgagagtttcgagtgcaggttggataaacttatcttgcatgggcaaggggatttccaaaaaatccttgacacctattcacagcaccatacttcggtgtgtgaagtatttgaaagtgattgtggaaacaacaaaaatgaacagaaagatgcaaaaacaggagtctgcatcactgctctaaaaacagaaataaaaaacatagatactgtgagtactactcaagaaaagccacattgtcaaagagacacaggaatatcttcctccctaatgggtaagaatgttcagagggaactcagaaggggaggaaggagaaactggacccattctgatgcatttcgagtctccttggatcaagatgtggagactgagactgagccatcggactacagcaatggtgagggagctgttttcaacaagtctctgagtggcagccagacttccagtgcttggagcaacttatcagggtttagttcctctgcaagctgggaggaagtgaattatcacgttgacgacaggtcagccagaaaagagcctggcaaagaacatctggtggacactcagtgttccactgccttgtctgaggagctagagaatgacagggaaggcagagctatgcattcattgcattcacagcttcatgatctctctcttcaggaacccaacaatgacaatttggagccttctcaaaatcagccacagcaacagatgcccttgacacccttctcgcctcataataccccaggcattttcttggcccctggtgcagggcttctagaaggagctccagaaggtatccaggaagtcagaaatatgggacccagaaatacttctgctcactccagaccctcatatcgttctgcttcttggtcttctgattctggtaggcccaagaatatgggcacacatccttcagtccaaaaagaagaagcctttgaaataattgttgagtttccagaaaccaactgcgatgtcaaagacaggcaggggaaagagcagggagaagaaattagtgaaagaggcgcaggccctacatttaaagctagtccctcctgggttgacccagaaggagaaacagcagaaagcactgaagatgcacccttagactttcacagggtcctgcacaattctctgggaaacatttccatgctgccatgtagctccttcacccctaattggcctgttcaaaatcctgactccagaaaaagtggtggcccagtcgcagagcagggcatcgaccctgatgcctccacagtggatgaggaggggcaactgctcgacagcatggatgttccctgcacaaatgggcacggctctcatagactgtgcattctgagacagccgcctggtcagagggcggagacccccaattcctctgtaagcggtaacatcctcttccctgtcctcagcgaggactgcactaccacagaggaaggaaatcagcctggaaacatgctaaactgcagccagaactccagctcatcctcagtgtggtggctgaaatcacctgcattttccagtggttcttctgagggggacagcccttggtcctatctgaattccagtgggagttcttgggtttcattgccgggaaagatgaggaaagagatccttgaggctcgcaccttgcaacctgatgactttgaaaagctgttggcaggagtgaggcatgattggctgtttcagagactagagaatacgggggtttttaagcccagtcaactccaccgagcacatagtgctcttttgttaaaatattcaaaaaaatctgaactgtggacggcccaggaaactattgtctatttgggggactacttgactgtgaagaaaaaaggcagacaaagaaatgctttttgggttcatcatcttcatcaagaagaaattctggggaggtatgttgggaaagactataaggagcagaaggggctctggcaccacttcactgatgtggagcgacagatgaccgcacagcactatgtgacagaatttaacaagagactctatgaacaaaacattcccacccagatattctacatcccatccacaatactactgattttagaggacaagacaataaagggatgtatcagtgtggagccttacatactgggagaatttgtaaaattgtcaaataacacgaaagtggtgaaaacagaatacaaagccacagaatatggcttggcctatggccatttttcttatgagttttctaatcatagagatgttgtggtcgatttacaaggttgggtaaccggtaatggaaaaggactcatctacctcacagatccccagattcactccgttgatcagaaagttttcactaccaattttggaaagagaggaattttttacttctttaataaccagcatgtggaatgtaatgaaatctgccatcgtctttctttgactagaccttcaatggagaaaccatgcacatagaatacggcacagtctggtcctttggggcttgggcagggccgtgacacaggttctggccaatgatttgcaagaggaattgatcagtatcactttaagtcctgcatttaattggcagcacaagatcctgcagagcctctttccctctgccacagttatcaagaatgggtcaggagaccgctgcttctgggcataagtcctgcaaggaaagcaacatggaaaacagccccaactcacccatgagggatgaaaagcactcttgagaaaggcatgtgttgtttaagccattgagattttagagctttttgtcactatctgtcaagactgatactactggggcttttcctattgatttgggagttctttacatattaaaaaaatgtgagcctttgtgatacgaattcaatttgttttcctgtcttttgacatttgactttgcataaaagtttatctgtgcataattttatatgtagttgaattcatcaatcttttattttgtatggctttttggttatgtataatacttagatcctccttatactctgagtttctttctttttaattctcctgtatttccttctagtataattaaatctgtaaaaagt

SEQ ID NO: 1708 - DNA, 1336 bp, Homo sapiens
  source 1..1336: mol_type = unassigned DNA
tttatgagaaacagtgtgtttcagagaggctgtaccagaattaactctgctcagagttagatttgctggtcttaaagtacttttcctctttaagataaaagaagttcttctaaatcaggaatggattgaaatctaatgaaccgaaactttgggtacttcggccttcaaggggctcctttattgagaatcaatgtcttctcctaggtaattgatcaccctagacccagggacacccaattcatcgtaatcatcatgaataatcaaaaagtggtagctgtgctactgcaagagtgcaaagctttactccccagcgagttaaggaccctgatccaggaggcaaaggaaatgaagtggcccttcgtgcctgaaaagtggcagtacaaacaagccgtgggcccagaggacaaaacaaacctgaaggatgtgattggcgccgggttgcagcagttactggcgtccctgagggcctccatcctcgctcgggactgtgcggctgcggcggctattgtgttcttggtggaccggttcctgtatgggctcgacgtctctggaaaacttctgcaggtcgccaaaggtctccacaagttgcagccagccacgccaattgccccgcaggtggttattcgccaagcccgaatctccgtgaactcaggatcccatccagccaaacactcaatgtagtgggatgtcagaagcaagagaagacccacaaggccaggcactatggctcatgcctgtaatcccagcactttgggaggccgaagcgggtggatcacctgaagtcaggagttcgagaccagcctggacaacatgatgaaaccccatctctactgaaaactacaaaaattagccaggcgtggtggcagccgcctgtaatcccagctacttaggaggctgaggcaggagaatcacttgaactccggaggtggaagttgcagtgaggtgagatcaaatgcaaaactatactctagagaagtatccacacccagggccatgggaatctcacaggaaaatattcttggctaaagatgaccttacattaaaattataagcaacaggctgggcagcggctcacgcctgtaaacccagcattttgggaggccaaggcgggtggattacctgaagtcaggagttcgagaccagcctggctaacatggtgaaaccccatctctattaaaaatacaaaaaattagcctggtgtggtggcaggcgcacgaaatcccagctacttgggaggctgaggcgggagaattgcttgaacccagaaggcagaggttgcagtgagctgagatcatgccattgcactccagcctgggttacagtgagactctgtctc

SEQ ID NO: 1709 - DNA, 5410 bp, Homo sapiens
  source 1..5410: mol_type = unassigned DNA
aattcctacttcctgaaactgaagccgtttatgagaaacagtgtgtttcagagaggctgtaccagaattaactctgctcagagttagatttgctggtcttaaagtacttttcctctttaagataaaagaagttcttctaaatcaggaatggattgaaatctaatgaaccgaaactttgggtacttcggccttcaaggggctcctttattgagaatcaatgtcttctcctaggtaattgatcaccctagacccagggacacccaattcatcgtaatcatcatgaataatcaaaaagtggtagctgtgctactgcaagagtgcaagcaagtgctggatcagctcttgttggaagcgccagatgtgtcggaagaggacaagagcgaggaccagcgctgcagagctttactccccagcgagttaaggaccctgatccaggaggcaaaggaaatgaagtggcccttcgtgcctgaaaagtggcagtacaaacaagccgtgggcccagaggacaaaacaaacctgaaggatgtgattggcgccgggttgcagcagttactggcgtccctgagggcctccatcctcgctcgggactgtgcggctgcggcggctattgtgttcttggtggaccggttcctgtatgggctcgacgtctctggaaaacttctgcaggtcgccaaaggtctccacaagttgcagccagccacgccaattgccccgcaggtggttattcgccaagcccgaatctccgtgaactcaggaaaacttttaaaagcagagtatattctgagcagtctaataagcaacaatggagcaacgggtacctggctgtacagaaatgaaagtgacaaggtcctggtgcagtcggtctgtatacagatcagagggcagattctgcaaaagctggggatgtggtacgaagcagcagagttaatatgggcctccattgtaggatatttggcacttcctcagccggataaaaagggcctctccacgtcgctaggtatactggcagacatctttgtttccatgagcaagaacgattatgaaaagtttaaaaacaatccacaaattaatttgagcctgctgaaggagtttgaccaccatttgctgtccgctgcagaagcctgcaagctggcagctgccttcagtgcctatacgccgctcttcgtgctcacagctgtgaatatccgtggcacgtgtttattgtcctacagtagttcaaatgactgtcctccagaattgaaaaacttacatctgtgtgaagccaaagaggcctttgagattggcctcctcaccaagagagatgatgagcctgttactggaaaacaggagcttcacagctttgtcaaagctgctttcggtctcaccacagtgcacagaaggctccatggggagacagggacggtccatgcagcaagtcagctctgtaaggaagcaatggggaagctgtacaatttcagcacttcctccagaagtcaggacagagaagctctgtctcaagaagttatgtctgtgattgcccaggtgaaggaacatttacaagttcaaagcttctcaaatgtagatgacagatcttatgttcccgagagtttcgagtgcaggttggataaacttatcttgcatgggcaaggggatttccaaaaaatccttgacacctattcacagcaccatacttcggtgtgtgaagtatttgaaagtgattgtggaaacaacaaaaatgaacagaaagatgcaaaaacaggagtctgcatcactgctctaaaaacagaaataaaaaacatagatactgtgagtactactcaagaaaagccacattgtcaaagagacacaggaatatcttcctccctaatgggtaagaatgttcagagggaactcagaaggggaggaaggagaaactggacccattctgatgcatttcgagtctccttggatcaagatgtggagactgagactgagccatcggactacagcaatggtgagggagctgttttcaacaagtctctgagtggcagccagacttccagtgcttggagcaacttatcagggtttagttcctctgcaagctgggaggaagtgaattatcacgttgacgacaggtcagccagaaaagagcctggcaaagaacatctggtggacactcagtgttccactgccttgtctgaggagctagagaatgacagggaaggcagagctatgcattcattgcattcacagcttcatgatctctctcttcaggaacccaacaatgacaatttggagccttctcaaaatcagccacagcaacagatgcccttgacacccttctcgcctcataataccccaggcattttcttggcccctggtgcagggcttctagaaggagctccagaaggtatccaggaagtcagaaatatgggacccagaaatacttctgctcactccagaccctcatatcgttctgcttcttggtcttctgattctggtaggcccaagaatatgggcacacatccttcagtccaaaaagaagaagcctttgaaataattgttgagtttccagaaaccaactgcgatgtcaaagacaggcaggggaaagagcagggagaagaaattagtgaaagaggcgcaggccctacatttaaagctagtccctcctgggttgacccagaaggagaaacagcagaaagcactgaagatgcacccttagactttcacagggtcctgcacaattctctgggaaacatttccatgctgccatgtagctccttcacccctaattggcctgttcaaaatcctgactccagaaaaagtggtggcccagtcgcagagcagggcatcgaccctgatgcctccacagtggatgaggaggggcaactgctcgacagcatggatgttccctgcacaaatgggcacggctctcatagactgtgcattctgagacagccgcctggtcagagggcggagacccccaattcctctgtaagcggtaacatcctcttccctgtcctcagcgaggactgcactaccacagaggaaggaaatcagcctggaaacatgctaaactgcagccagaactccagctcatcctcagtgtggtggctgaaatcacctgcattttccagtggttcttctgagggggacagcccttggtcctatctgaattccagtgggagttcttgggtttcattgccgggaaagatgaggaaagagatccttgaggctcgcaccttgcaacctgatgactttgaaaagctgttggcaggagtgaggcatgattggctgtttcagagactagagaatacgggggtttttaagcccagtcaactccaccgagcacatagtgctcttttgttaaaatattcaaaaaaatctgaactgtggacggcccaggaaactattgtctatttgggggactacttgactgtgaagaaaaaaggcagacaaagaaatgctttttgggttcatcatcttcatcaagaagaaattctggggaggtatgttgggaaagactataaggagcagaaggggctctggcaccacttcactgatgtggagcgacagatgaccgcacagcactatgtgacagaatttaacaagagactctatgaacaaaacattcccacccagatattctacatcccatccacaatactactgattttagaggacaagacaataaagggatgtatcagtgtggagccttacatactgggagaatttgtaaaattgtcaaataacacgaaagtggtgaaaacagaatacaaagccacagaatatggcttggcctatggccatttttcttatgagttttctaatcatagagatgttgtggtcgatttacaaggttgggtaaccggtaatggaaaaggactcatctacctcacagatccccagattcactccgttgatcagaaagttttcactaccaattttggaaagagaggaattttttacttctttaataaccagcatgtggaatgtaatgaaatctgccatcgtctttctttgactagaccttcaatggagaaaccatgcacatagaatacggcacagtctggtcctttggggcttgggcagggccgtgacacaggttctggccaatgatttgcaagaggaattgatcagtatcactttaagtcctgcatttaattggcagcacaagatcctgcagagcctctttccctctgccacagttatcaagaatgggtcaggagaccgctgcttctgggcataagtcctgcaaggaaagcaacatggaaaacagccccaactcacccatgagggatgaaaagcactcttgagaaaggcatgtgttgtttaagccattgagattttagagctttttgtcactatctgtcaagactgatactactggggcttttcctattgatttgggagttctttacatattaaaaaaatgtgagcctttgtgatacgaattcaatttgttttcctgtcttttgacatttgactttgcataaaagtttatctgtgcataattttatatgtagttgaattcatcaatcttttattttgtatggctttttggttatgtataatacttagatcctccttatactctgagtttctttctttttaattctcctgtatttccttctagtataattaaatctgtaaaaagtaagatggaagagtggtacagttttctttatccagtctgtccttgatgggcatttaggtagactggataaagaaaatgtggtacatatacaccatggaacactatgtgtattaatccactctcacactgctatgaagagatacctgagactgggtaatttagaaagaaaagaggtttaattaactcacagttccacatggctggggagacctcaggaaacttacaatcatggcagaaggcacctcttcatagggtagcaggagagagaatgagtgccagcaggggaaatgccagatgcttataaagccatcagatcttgtgagaattcattcactctcacgagaacagcatgggaaaaactgcctcaattacctcctaccaggtccttcccatgacacatgggaattatgggactacaattcgagatgagatttgggtggggacacaaagccaaaccatatcacaatgtaaccataaaaaagaatgagatcatgtcctttgcagggacatggatagagctggaggccattatttttagcaaactaatgcaagaacagaaaactaaataccacttgttctcacttataggtgagagctaagtgatgagagtaggtggacacatagagggaacaacacacaccagggcttatcagagggtggacagtgggaggagggagaggatcaggaaaaataactaatgggtactaggctgaatacctgggtgatgaagtaattcgcacaacaaacccccatgacacaaacctgcacatgtacccctgaacttaaaataaaagt

SEQ ID NO: 1710 - DNA, 3931 bp, Homo sapiens
  source 1..3931: mol_type = unassigned DNA
acagtgtgtttcagagaggctgtaccagaattaactctgctcagagttagatttgctggtcttaaagtacttttcctctttaagataaaagaagttcttctaaatcaggaatggattgaaatctaatgaaccgaaactttgggtaattgatcaccctagacccagggacacccaattcatcgtaatcatcatgaataatcaaaaagtggtagctgtgctactgcaagagtgcaagcaagtgctggatcagctcttgttggaagcgccagatgtgtcggaagaggacaagagcgaggaccagcgctgcagaggcgtccctgagggcctccatcctcgctcgggactgtgcggctgcggcggctattgtgttcttggtggaccggttcctgtatgggctcgacgtctctggaaaacttctgcaggtcgccaaaggtctccacaagttgcagccagccacgccaattgccccgcaggtggttattcgccaagcccgaatctccgtgaactcaggaaaacttttaaaagcagagtatattctgagcagtctaataagcaacaatggagcaacgggtacctggctgtacagaaatgaaagtgacaaggtcctggtgcagtcggtctgtatacagatcagagggcagattctgcaaaagctggggatgtggtacgaagcagcagagttaatatgggcctccattgtaggatatttggcacttcctcagccggataaaaagggcctctccacgtcgctaggtatactggcagacatctttgtttccatgagcaagaacgattatgaaaagtttaaaaacaatccacaaattaatttgagcctgctgaaggagtttgaccaccatttgctgtccgctgcagaagcctgcaagctggcagctgccttcagtgcctatacgccgctcttcgtgctcacagctgtgaatatccgtggcacgtgtttattgtcctacagtagttcaaatgactgtcctccagaattgaaaaacttacatctgtgtgaagccaaagaggcctttgagattggcctcctcaccaagagagatgatgagcctgttactggaaaacaggagcttcacagctttgtcaaagctgctttcggtctcaccacagtgcacagaaggctccatggggagacagggacggtccatgcagcaagtcagctctgtaaggaagcaatggggaagctgtacaatttcagcacttcctccagaagtcaggacagagaagctctgtctcaagaagttatgtctgtgattgcccaggtgaaggaacatttacaagttcaaagcttctcaaatgtagatgacagatcttatgttcccgagagtttcgagtgcaggttggataaacttatcttgcatgggcaaggggatttccaaaaaatccttgacacctattcacagcaccatacttcggtgtgtgaagtatttgaaagtgattgtggaaacaacaaaaatgaacagaaagatgcaaaaacaggagtctgcatcactgctctaaaaacagaaataaaaaacatagatactgtgagtactactcaagaaaagccacattgtcaaagagacacaggaatatcttcctccctaatgggtaagaatgttcagagggaactcagaaggggaggaaggagaaactggacccattctgatgcatttcgagtctccttggatcaagatgtggagactgagactgagccatcggactacagcaatggtgagggagctgttttcaacaagtctctgagtggcagccagacttccagtgcttggagcaacttatcagggtttagttcctctgcaagctgggaggaagtgaattatcacgttgacgacaggtcagccagaaaagagcctggcaaagaacatctggtggacactcagtgttccactgccttgtctgaggagctagagaatgacagggaaggcagagctatgcattcattgcattcacagcttcatgatctctctcttcaggaacccaacaatgacaatttggagccttctcaaaatcagccacagcaacagatgcccttgacacccttctcgcctcataataccccaggcattttcttggcccctggtgcagggcttctagaaggagctccagaaggtatccaggaagtcagaaatatgggacccagaaatacttctgctcactccagaccctcatatcgttctgcttcttggtcttctgattctggtaggcccaagaatatgggcacacatccttcagtccaaaaagaagaagcctttgaaataattgttgagtttccagaaaccaactgcgatgtcaaagacaggcaggggaaagagcagggagaagaaattagtgaaagaggcgcaggccctacatttaaagctagtccctcctgggttgacccagaaggagaaacagcagaaagcactgaagatgcacccttagactttcacagggtcctgcacaattctctgggaaacatttccatgctgccatgtagctccttcacccctaattggcctgttcaaaatcctgactccagaaaaagtggtggcccagtcgcagagcagggcatcgaccctgatgcctccacagtggatgaggaggggcaactgctcgacagcatggatgttccctgcacaaatgggcacggctctcatagactgtgcattctgagacagccgcctggtcagagggcggagacccccaattcctctgtaagcggtaacatcctcttccctgtcctcagcgaggactgcactaccacagaggaaggaaatcagcctggaaacatgctaaactgcagccagaactccagctcatcctcagtgtggtggctgaaatcacctgcattttccagtggttcttctgagggggacagcccttggtcctatctgaattccagtgggagttcttgggtttcattgccgggaaagatgaggaaagagatccttgaggctcgcaccttgcaacctgatgactttgaaaagctgttggcaggagtgaggcatgattggctgtttcagagactagagaatacgggggtttttaagcccagtcaactccaccgagcacatagtgctcttttgttaaaatattcaaaaaaatctgaactgtggacggcccaggaaactattgtctatttgggggactacttgactgtgaagaaaaaaggcagacaaagaaatgctttttgggttcatcatcttcatcaagaagaaattctggggaggtatgttgggaaagactataaggagcagaaggggctctggcaccacttcactgatgtggagcgacagatgaccgcacagcactatgtgacagaatttaacaagagactctatgaacaaaacattcccacccagatattctacatcccatccacaatactactgattttagaggacaagacaataaagggatgtatcagtgtggagccttacatactgggagaatttgtaaaattgtcaaataacacgaaagtggtgaaaacagaatacaaagccacagaatatggcttggcctatggccatttttcttatgagttttctaatcatagagatgttgtggtcgatttacaaggttgggtaaccggtaatggaaaaggactcatctacctcacagatccccagattcactccgttgatcagaaagttttcactaccaattttggaaagagaggaattttttacttctttaataaccagcatgtggaatgtaatgaaatctgccatcgtctttctttgactagaccttcaatggagaaaccatgcacatagaatacggcacagtctggtcctttggggcttgggcagggccgtgacacaggttctggccaatgatttgcaagaggaattgatcagtatcactttaagtcctgcatttaattggcagcacaagatcctgcagagcctctttccctctgccacagttatcaaga

SEQ ID NO: 1711 - DNA, 4153 bp, Homo sapiens
  source 1..4153: mol_type = unassigned DNA
ggcgccggggattgggagggcttcttgcaggctgctgggctggggctaagggctgctcagtttccttcagcggggcactgggaagcgccatggcactgcagggcatctcggtcgtggagctgtccggcctggccccgggcccgttctgtgctatggtcctggctgacttcggggcgcgtgtggtacgcgtggaccggcccggctcccgctacgacgtgagccgcttgggccggggcaagcgctcgctagtgctggacctgaagcagccgcggggagccgccgtgctgcggcgtctgtgcaagcggtcggatgtgctgctggagcccttccgccgcggtgtcatggagaaactccagctgggcccagagattctgcagcgggaaaatccaaggcttatttatgccaggctgagtggatttggccagtcaggaagcttctgccggttagctggccacgatatcaactatttggctttgtcaggtgttctctcaaaaattggcagaagtggtgagaatccgtatgccccgctgaatctcctggctgactttgctggtggtggccttatgtgtgcactgggcattataatggctctttttgaccgcacacgcactggcaagggtcaggtcattgatgcaaatatggtggaaggaacagcatatttaagttcttttctgtggaaaactcagaaattgagtctgtgggaagcacctcgaggacagaacatgttggatggtggagcacctttctatacgacttacaggacagcagatggggaattcatggctgttggagcaatagaaccccagttctacgagctgctgatcaaaggacttggactaaagtctgatgaacttcccaatcagatgagcatggatgattggccagaaatgaagaagaagtttgcagatgtatttgcagagaagacgaaggcagagtggtgtcaaatctttgacggcacagatgcctgtgtgactccggttctgacttttgaggaggttgttcatcatgatcacaacaaggaacggggctcgtttatcaccagtgaggagcaggacgtgagcccccgccctgcacctctgctgttaaacaccccagccatcccttctttcaaaagggatcctttcataggagaacacactgaggagatacttgaagaatttggattcagccgcgaagagatttatcagcttaactcagataaaatcattgaaagtaataaggtaaaagctagtctctaacttccaggcccacggctcaagtgaatttgaatactgcatttacagtgtagagtaacacataacattgtatgcatggaaacatggaggaacagtattacagtgtcctaccactctaatcaagaaaagaattacagactctgattctacagtgatgattgaattctaaaaatggttatcattagggcttttgatttataaaactttgggtacttatactaaattatggtagttattctgccttccagtttgcttgatatatttgttgatattaagattcttgacttatattttgaatgggttctagtgaaaaaggaatgatatattcttgaagacatcgatatacatttatttacactcttgattctacaatgtagaaaatgaggaaatgccacaaattgtatggtgataaaagtcacgtgaaacagagtgattggttgcatccaggccttttgtcttggtgttcatgatctccctctaagcacattccaaactttagcaacagttatcacactttgtaatttgcaaagaaaagtttcacctgtattgaatcagaatgccttcaactgaaaaaaacatatccaaaataatgaggaaatgtgttggctcactacgtagagtccagagggacagtcagttttagggttgcctgtatccagtaactcggggcctgtttccccgtgggtctctgggctgtcagctttcctttctccatgtgtttgatttctcctcaggctggtagcaagttctggatcttatacccaacacacagcaacatccagaaataaagatctcaggaccccccagcaagtcgttttgtgtctccttggactgagttaagttacaagcctttcttatacctgtctttgacaaagaagacgggattgtctttacataaaaccagcctgctcctggagcttccctggactcaacttcctaaaggcatgtgaggaaggggtagattccacaatctaatccgggtgccatcagagtagagggagtagagaatggatgttgggtaggccatcaataaggtccattctgcgcagtatctcaactgccgttcaacaatcgcaagaggaaggtggagcaggtttcttcatcttacagttgagaaaacagagactcagaagggcttcttagttcatgtttcccttagcgcctcagtgattttttcatggtggcttaggccaaaagaaatatctaaccattcaatttataaataattaggtccccaacgaattaaatattatgtcctaccaacttattagctgcttgaaaaatataatacacataaataaaaaaatatatttttcatttctatttcattgttaatcacaactacttactaaggagatgtatgcacctattggacactgtgcaacttctcacctggaatgagattggacactgctgccctcattttctgctccatgttggtgtccatatagtacttgattttttatcagatggcctggaaaacccagtctcacaaaaatatgaaattatcagaaggattatagtgcaatcttatgttgaaagaatgaactacctcactagtagttcacgtgatgtctgacagatgttgagtttcattgtgtttgtgtgttcaaatttttaaatattctgagatactcttgtgaggtcactctaatgccctgggtgccttggcacagttttagaaataccagttgaaaatatttgctcaggaatatgcaactaggaaggggcagaatcagaatttaagctttcatattctagccttcagtcttgttcttcaaccatttttaggaactttcccataaggttatgttttccagcccaggcatggaggatcacttgaggccaagagttcgagaccagcctggggaacttggctggacctccgtttctacgaaataaaaataaaaaaattatccaggtatggtggtgtgtgcctgtagtcctatctactcaagggtggggcaggaggatcacttgagcccaggaatttgaggccacagtgaattaggattgcaccactgcactctagcccaggcaacagaacaagaacctgtctctaaataaataaataaaaataataataataaaaaagatgttttccctacaactcagacttttcatttgaactcggtccagcaaggaaaatataacccactcgaagtctttaaaacagaggaaatttaatataaagaattccactggtgacgaaagagcagagaagcccagaagatagtgaggcaaccctgataggaacataactaggaagccaagaccactcctatggttgcaggggtgatgggaaagctggtgtacttggacccagaagccaaagttgctgcacccaccttggagacatagacactggcagtaatacctcagggagaagaaagaaatctagggaaatatcctggcttctttccttctctctctcccctagtcttcctaccagtgtctcccattagccaaatctacctagaagccagaaaacaagggaaccctggaaatgtagccccataagataaagagcaccaaaggaaatagatctgagcagacaggcagcacaaaatgcagtgtgtatggtttattcactcagtaattcctttagcaaatgtttattgaggatctactaggtgccaggtatcatgatacttgctggggataccataatgaacaaaacagacctgttctccgctcttgaggaaatcaaagacaaacacaggatatggaataaacccagaattatctcattgtaaaatgtgttaagtaccacgaggagaaatatcagggcgatctgacacagctaatgatttgaagaagggtgtgacctgccaccattttaaatctagttatttcactcctgagctgtgtgtgtggaaaacttgtagtaaaaaatagaatgtctatatttataaaaa

SEQ ID NO: 1712 - DNA, 2919 bp, Homo sapiens
  source 1..2919: mol_type = unassigned DNA
ctgggaagcgccatggcactgcagggcatctcggtcgtggagctgtccggcctggccccgggcccgttctgtgctatggtcctggctgacttcggggcgcgtgtggtacgcgtggaccggcccggctcccgctacgacgtgagccgcttgggccggggcaagcgctcgctagtgctggacctgaagcagccgcggggagccgccgtgctgcggcgtctgtgcaagcggtcggatgtgctgctggagcccttccgccgcggtgtcatggagaaactccagctgggcccagagattctgcagcgggaaaatccaaggcttatttatgccaggctgagtggatttggccagtcaggaagcttctgccggttagctggccacgatatcaactatttggctttgtcaggtggaaggaacagcatatttaagttcttttctgtggaaaactcagaaattgagtctgtgggaagcacctcgaggacagaacatgttggatggtggagcacctttctatacgacttacaggacagcagatggggaattcatggctgttggagcaatagaaccccagttctacgagctgctgatcaaaggacttggactaaagtctgatgaacttcccaatcagatgagcatggatgattggccagaaatgaagaagaagtttgcagatgtatttgcagagaagacgaaggcagagtggtgtcaaatctttgacggcacagatgcctgtgtgactccggttctgacttttgaggaggttgttcatcatgatcacaacaaggaacggggctcgtttatcaccagtgaggagcaggacgtgagcccccgccctgcacctctgctgttaaacaccccagccatcccttctttcaaaagggatcctttcataggagaacacactgaggagatacttgaagaatttggattcagccgcgaagagatttatcagcttaactcagataaaatcattgaaagtaataaggtaaaagctagtctctaacttccaggcccacggctcaagtgaatttgaatactgcatttacagtgtagagtaacacataacattgtatgcatggaaacatggaggaacagtattacagtgtcctaccactctaatcaagaaaagaattacagactctgattctacagtgatgattgaattctaaaaatggttatcattagggcttttgatttataaaactttgggtacttatactaaattatggtagttattctgccttccagtttgcttgatatatttgttgatattaagattcttgacttatattttgaatgggttctagtgaaaaaggaatgatatattcttgaagacatcgatatacatttatttacactcttgattctacaatgtagaaaatgaggaaatgccacaaattgtatggtgataaaagtcacgtgaaacagagtgattggttgcatccaggccttttgtcttggtgttcatgatctccctctaagcacattccaaactttagcaacagttatcacactttgtaatttgcaaagaaaagtttcacctgtattgaatcagaatgccttcaactgaaaaaaacatatccaaaataatgaggaaatgtgttggctcactacgtagagtccagagggacagtcagttttagggttgcctgtatccagtaactcggggcctgtttccccgtgggtctctgggctgtcagctttcctttctccatgtgtttgatttctcctcaggctggtagcaagttctggatcttatacccaacacacagcaacatccagaaataaagatctcaggaccccccagcaagtcgttttgtgtctccttggactgagttaagttacaagcctttcttatacctgtctttgacaaagaagacgggattgtctttacataaaaccagcctgctcctggagcttccctggactcaacttcctaaaggcatgtgaggaaggggtagattccacaatctaatccgggtgccatcagagtagagggagtagagaatggatgttgggtaggccatcaataaggtccattctgcgcagtatctcaactgccgttcaacaatcgcaagaggaaggtggagcaggtttcttcatcttacagttgagaaaacagagactcagaagggcttcttagttcatgtttcccttagcgcctcagtgattttttcatggtggcttaggccaaaagaaatatctaaccattcaatttataaataattaggtccccaacgaattaaatattatgtcctaccaacttattagctgcttgaaaaatataatacacataaataaaaaaatatatttttcatttctatttcattgttaatcacaactacttactaaggagatgtatgcacctattggacactgtgcaacttctcacctggaatgagattggacactgctgccctcattttctgctccatgttggtgtccatatagtacttgattttttatcagatggcctggaaaacccagtctcacaaaaatatgaaattatcagaaggattatagtgcaatcttatgttgaaagaatgaactacctcactagtagttcacgtgatgtctgacagatgttgagtttcattgtgtttgtgtgttcaaatttttaaatattctgagatactcttgtgaggtcactctaatgccctgggtgccttggcacagttttagaaataccagttgaaaatatttgctcaggaatatgcaactaggaaggggcagaatcagaatttaagctttcatattctagccttcagtcttgttcttcaaccatttttaggaactttcccataaggttatgttttccagcccaggcatggaggatcacttgaggccaagagttcgagaccagcctggggaacttggctggacctccgtttctacgaaataaaaataaaaaaattatccagg

SEQ ID NO: 1713 - DNA, 786 bp, Homo sapiens
  source 1..786: mol_type = unassigned DNA
ggggcgtggcgccggggattgggagggcttcttgcaggctgctgggctggggctaagggctgctcagtttccttcagcggggcactgggaagcgccatggcactgcagggcatctcggtcgtggagctgtccggcctggccccgggcccgttctgtgctatggtcctggctgacttcggggcgcgtgtggtacgcgtggaccggcccggctcccgctacgacgtgagccgcttgggccggggcaagcgctcgctagtgctggacctgaagcagccgcggggagccgccgtgctgcggcgtctgtgcaagcggtcggatgtgctgctggagcccttccgccgcggtgtcatggagaaactccagctgggcccagagattctgcagcgggaaaatccaaggcttatttatgccaggctgagtggatttggccagtcaggaagcttctgccggttagctggccacgatatcaactatttggctttgtcaggtggaaggaacagcatatttaagttcttttctgtggaaaactcagaaattgagtctgtgggaagcacctcgaggacagaacatgttggatggtggagcacctttctatacgacttacaggacagcagatggggaattcatggctgttggagcaatagaaccccagttctacgagctgctgatcaaagatctttgataccatactttaatctgtatcttcagtttctgaacataagtatgcaaaatctttttaaggtgcatactctgctgcgtccctgctattttctaggacaaaaataa

SEQ ID NO: 1714 - DNA, 1195 bp, Homo sapiens
  source 1..1195: mol_type = unassigned DNA
ggaagcgccatggcactgcagggcatctcggtcgtggagctgtccggcctggccccgggcccgttctgtgctatggtcctggctgacttcggggcgcgtgtggtacgcgtggaccggcccggctcccgctacgacgtgagccgcttgggccggggcaagcgctcgctagtgctggacctgaagcagccgcggggagccgccgtgctgcggcgtctgtgcaagcggtcggatgtgctgctggagcccttccgccgcggtgtcatggagaaactccagctgggcccagagattctgcagcgggaaaatccaaggcttatttatgccaggctgagtggatttggccagtcaggaagcttctgccggttagctggccacgatatcaactatttggctttgtcaggtgttctctcaaaaattggcagaagtggtgagaatccgtatgccccgctgaatctcctggctgactttgctggtggtggccttatgtgtgcactgggcattataatggctctttttgaccgcacacgcactggcaagggtcaggtcattgatgcaaatatggtggaaggaacagcatatttaagttcttttctgtggaaaactcagaaattgagtctgtgggaagcacctcgaggacagaacatgttggatggtggagcacctttctatacgacttacaggacagcagatggggaattcatggctgttggagcaatagaaccccagttctacgagctgctgatcaaaggacttggactaaagtctgatgaacttcccaatcagatgagcatggatgattggccagaaatgaagaagaagtttgcagatgtatttgcagagaagacgaaggcagagtggtgtcaaatctttgacggcacagatgcctgtgtgactccggttctgacttttgaggaggttgttcatcatgatcacaacaaggaacggggctcgtttatcaccagtgaggagcaggacgtgagcccccgccctgcacctctgctgttaaacaccccagccatcccttctttcaaaagggatcctttcataggagaacacactgaggagatacttgaagaatttggattcagccgcgaagagatttatcagcttaactcagataaaatcattgaaagtaataaggctggtagcaagttctggatcttatacccaacacacagcaacatccagaaataaa

SEQ ID NO: 1715 - DNA, 5504 bp, Homo sapiens
  source 1..5504: mol_type = unassigned DNA
gcgcgcggggcagccgcgtggctaggcagacggggccgggagcggcgcgcgcgcgccccgccagcctctggcgcgcccccggcggcctgagccgcagcgtgctcgcccccgccgccagctcgcctcacttatgggtcggaaacgctgcgtgggggagactgttccaagatggcggcgggttgctgcggggtgaagaagcagaaactgtccagttcgcccccctctggctcgggtggcggtggtggcgcctcctcctcctcccactgcagcggagagagccagtgccgagctggggagctgggactaggaggcgccggtacgcggctcaacgggctgggaggtctaaccggaggaggtagcggcagcggctgtaccctctctcccccccagggctgcggcggcggcggcggggggatcgccctgtcgccacctccgagctgcggagtggggaccctactttctaccccggccgccgccacctcttcctcaccctcctcatcgtccgccgcctcgtcctcatcgccgggctcccggaagatggtggtgtcagcagagatgtgctgcttttgcttcgatgtgctctactgtcacctgtatggataccagcagccccggaccccccgattcaccaacgagccctacccactgtttgtaacatggaagattggtcgagacaaaagattacgtggatgcataggtactttttctgccatgaatttgcattcaggactcagggagtacacacttaccagtgcccttaaagatagccgttttcccccaatgacaagggatgagctgccacggcttttctgctcagtgtctctgctcactaactttgaagatgtctgtgattatttggactgggaggtgggtgtacatggcattagaatagaattcatcaatgaaaaaggatcaaaacgcaccgccacctacctaccggaggttgcaaaggagcaaggatgggaccatatacagaccatagactccttattgaggaaaggaggatacaaagctccgattactaatgaattcaggaaaaccataaaactgaccaggtatcgtagtgaaaagatgaccctgagctatgctgaataccttgctcatcgccagcatcatcatttccaaaatggcattgggcatccccttccgccatacaaccattattcctgacactgagccgcacaaccagtcactgggcctctctgcagacctcttcccaggagaccctacaccttcttggtctagctatctcttttactgtaccattttatgatgatagtttccgttgccatggtgaagcttcgacatcgtcaactaagatcatcatggtaacgggtagaaaaatggcatttgttaagatcctgttttattattttagatcgttgattttttttttgcagcatatataattttgggtttttttttccttataatattatgtagaattttgctttgctgtctcagtcaggtttctgtttttctgtcctccttgcctttcttcccgttttgcttcctgttttccttcttccttcccgttttccttcttccttccctgcctcccttcctttgactgtggatggaagaaagtgtgcagtttttagggattttacttaggttcgtctttagttttcctcagtaagatagttgttttttgatacctgagtttgggattaattcatatcaaattcaggtatttgtatattactcttgatttttgtctgaaattcactttgctatgacagcctagtagttgggtcttcactccttaagtatatgtttttcccatggtgaaaatacatgaactttagttctagtagtgagcattcaaaggtccgtgatagggcttgtcacagagagagagaaatcatttatccctattgtgctggttatcatagaagagactgcctcaccactttatagaaccaatttgcaaactaaaacactgtttggagaaggtacaaactacctttcaaaaaggctacaggaaacattttatgagcagcaaatattaggaagagagcagatacagaatttagtgcctttgagaagaatataattaagtggaattaagaggggttagaaaaaaggcaatttagaaaaatattcttgtaaaactttattgtttctatatgtgaaacagaagattagacaaattccttactcttaagtatttttttaagctgaaaaaaaattattttgagcaaataaccaataagagacatttgtctattttatattaatttaaatttgttagctctaggtttcaataagtcatgattggctagaatccattttagctaccatctaaagatatggtaaagataatttagtaaaacaaaagttcatatttgccatgatttcagatatgtttgtcatggggacaatattagagttttagagatactataaaatagcttgaatttctttctgcactacatacttttgatagaaacacatttactacattgataagatgttatgtcacacctgtgaaaatggagttggcattcagatatgctatagttagagcccagctcatctgcaagtatagtcttcccatgatgcatacaaagataacttactgatgtcgataggaggtccatacatatatccccaggaaaaatgacagattattctggaggaagatgaccttcattttatggttatgtgtgtgtgtctgtgtgtctttggaaaaatatatataattttttcaaataggaagccaacatatcaagtgatgaattaaagtatgctgcagaatatatattctaaaactacaaaaaagtcactgaatatcaaaatgatacagcttatacatatagttactgtgacaagtgacagactgctagttcagaattcaaaaatcctttcctagtttgtgagataatgggctaaattccttctgcctgccactggggcaaagcaaattgctttagtttttgatgagagttcttagaagtttgttggtattccttcatccacagcatccattgttgaaataaccattttcagttgtgatgccttaactaagaagccaattgttagcctgaaatgcaatcttggtagccagtttcaatgaagctagagattagtcagaaaaagttagctgttgggctttagaaagggattttgagtcctgtcatttctacttgggagcattttggagcagattagtctttcagtataaaaacaagtggctacctgatggaaacttttcttacccttatagggaaactgagcacaagctgaatgatattgtctgctgcaaaaaaaaacaaacaaaaaaaaaacaaaacaaaaaacaaaaaaaaggaaaaaaaggtaaataaaacaagcaaactgaagagagacaaaatagaccaatattatcgtgaaatccatcttatccatcatctcatcggttcaacaggctcctcgtcctgggtgagcttatggttagaagtttttttagcaaagatttattacatacatagatgtgtgtgtgtacatatacttacacatacatacatacatatatgtgtgtttatttaacggtgctaatcaatcttgagcaggtcacgtgactggtcatgcggactctaaaatcatatcagattttttaaaatccttgatatatgcagatgttatacagattttcttagcagtgtaataacgttaaactgaagaaataaccatcctgcaggcttcaaaggacgaggtcagcaatatttcccaacatggcttgggggaaaaggatagttttgtctccttttgtattcaagtaatgcaaagtgcatttttgtctctaagtagcttttgactaaaagactttgtagtgtaaagggtgttatacaaactgtaatggtgtgcttcaaacaaatgctagaccctttcacctttgtcgtatatacaaagctgttaattatgtggtatgaattaactttgaacatgttgaaatatgtagcatgtctttaactcagacgaagattctgattgcacaggttgtgttctagccagttgtgatttatttgttcagaaacacaaatgtgaattgcactcttatcatcagaatattgtatgagttcagtgatctttaaacagctcagaagtaatacttgaacttcatttgagtagcacaaagtttacatagccccttttaaatgttaattcgttccatttaagttttccattttcagatgcaactgggtatttttcctcttggaaatagtacgtactttgctttggtatgtagcaaaaggcttccatttctggaagggttttcttgttcttaaacaaggtcagccaggtaccagattctaaaagaacaaattgtcccccacccctcaagtggccttctgactgcacgagaatgtgctactaccctctgtagtctcccctaacacgagaggtcagtgaaattgatggaggaagtgcaaggcttgcttcccctcacccttaaagcttaaagcagttgtaagattttcagtccagcacatacagtcccagtgcccagcacaccggaagtttgtatactggcctcttatcttgtcttcaaatgtgcaggaaatttgaaactgtcatctggaataggttccatctcttatgtgtgttagatcaaaccaaagaagcccccagccatgcccaaatgctgcttcaaaagcctgccttccagtccttacaaaaaccttgcaggattaaatgtgttaacttttttatttttgtacagtttctaagtgatttttgctagtgatgttaaaatgaattaagtttatttgaggggtgtgagcacctcctccatttaaataaactggtgactttccttttattttttaaaagtggaaacccgttgtgtgcctctcgatttaagggtttctgatgacattattcttaagaccagcattgatcctttatatacaaatatatgttttccttgttttttattgctatttcagaagaaaatgaaccttttattttgctctacccagtaactgcgctggtacatagacgcactgagcaaacaaacttttgtaaccacctctgactacttttgtatatcaaagttgattacttttgaaatatttggatctagtttctaagttattttagtgttttatatgttccccaaaattactttgaatctgtcaccagcataatgagttcttggtgatacaatggtgagacttgtaatgagcaaaaagctacctggagtagctcctcttttccttctttcttagtaacctgttttttgattaccgtaagacatcacagattacctgaaaccccttccagtataactaggccctccttccttccacatttaattgcttaatagtttgaagaaactattggaaatgggcattttatatgacatgtatggctttacaatattaaatatgagcaaaaagaaaaaatatgagaaggtttatgtgggtctgtaaggtatggctgtggaaagatattgtagtagttttgacactattgttattacctttaaaatcatttacccaataaaatgttaaaaccga

SEQ ID NO: 1716 - DNA, 3380 bp, Homo sapiens
  source 1..3380: mol_type = unassigned DNA
ctctttctctgggctaatcgtttagaggacagtcgctcctgccaacctaatcccatgagcctgactaccttgccgggccacaggctcaaagaagcagtgtggctgccagcaccctcacggtaaggggcacggaggcaccaggcagtctggcaggatgagagacatcctgggggtggtctgagtttggatgtgggctgagaagacaaagcagggggctttcgggggacaagattttccaaacatcttattcttaggatcatcacttcctaatctgatgcaactgactcggcaggcattcgggagcctgtaagctccattttcctgttccaaattcttctgcacctcaccatgagtcctcaccttgaccctaatcaacttgggattctcctcaaagtacttagaaaggaaaaggaagacggtgactaccctgacatgatggccacccacccgagctccaggtatgaagcctgctcctctggaattactctagggctgcggcggcggcggcggggggatcgccctgtcgccacctccgagctgcggagtggggaccctactttctaccccggccgccgccacctcttcctcaccctcctcatcgtccgccgcctcgtcctcatcgccgggctcccggaagatggtggtgtcagcagagatgtgctgcttttgcttcgatgtgctctactgtcacctgtatggataccagcagccccggaccccccgattcaccaacgagccctacccactgtttgtaacatggaagattggtcgagacaaaagattacgtggatgcataggtactttttctgccatgaatttgcattcaggactcagggagtacacacttaccagtgcccttaaagatagccgttttcccccaatgacaagggatgagctgccacggcttttctgctcagtgtctctgctcactaactttgaagatgtctgtgattatttggactgggaggtgggtgtacatggcattagaatagaattcatcaatgaaaaaggatcaaaacgcaccgccacctacctaccggaggttgcaaaggagcaaggatgggaccatatacagaccatagactccttattgaggaaaggaggatacaaagctccgattactaatgaattcaggaaaaccataaaactgaccaggtatcgtagtgaaaagatgaccctgagctatgctgaataccttgctcatcgccagcatcatcatttccaaaatggcattgggcatccccttccgccatacaaccattattcctgacactgagccgcacaaccagtcactgggcctctctgcagacctcttcccaggagaccctacaccttcttggtctagctatctcttttactgtaccattttatgatgatagtttccgttgccatggtgaagcttcgacatcgtcaactaagatcatcatggtaacgggtagaaaaatggcatttgttaagatcctgttttattattttagatcgttgattttttttttgcagcatatataattttgggtttttttttccttataatattatgtagaattttgctttgctgtctcagtcaggtttctgtttttctgtcctccttgcctttcttcccgttttgcttcctgttttccttcttccttcccgttttccttcttccttccctgcctcccttcctttgactgtggatggaagaaagtgtgcagtttttagggattttacttaggttcgtctttagttttcctcagtaagatagttgttttttgatacctgagtttgggattaattcatatcaaattcaggtatttgtatattactcttgatttttgtctgaaattcactttgctatgacagcctagtagttgggtcttcactccttaagtatatgtttttcccatggtgaaaatacatgaactttagttctagtagtgagcattcaaaggtccgtgatagggcttgtcacagagagagagaaatcatttatccctattgtgctggttatcatagaagagactgcctcaccactttatagaaccaatttgcaaactaaaacactgtttggagaaggtacaaactacctttcaaaaaggctacaggaaacattttatgagcagcaaatattaggaagagagcagatacagaatttagtgcctttgagaagaatataattaagtggaattaagaggggttagaaaaaaggcaatttagaaaaatattcttgtaaaactttattgtttctatatgtgaaacagaagattagacaaattccttactcttaagtatttttttaagctgaaaaaaaattattttgagcaaataaccaataagagacatttgtctattttatattaatttaaatttgttagctctaggtttcaataagtcatgattggctagaatccattttagctaccatctaaagatatggtaaagataatttagtaaaacaaaagttcatatttgccatgatttcagatatgtttgtcatggggacaatattagagttttagagatactataaaatagcttgaatttctttctgcactacatacttttgatagaaacacatttactacattgataagatgttatgtcacacctgtgaaaatggagttggcattcagatatgctatagttagagcccagctcatctgcaagtatagtcttcccatgatgcatacaaagataacttactgatgtcgataggaggtccatacatatatccccaggaaaaatgacagattattctggaggaagatgaccttcattttatggttatgtgtgtgtgtctgtgtgtctttggaaaaatatatataattttttcaaataggaagccaacatatcaagtgatgaattaaagtatgctgcagaatatatattctaaaactacaaaaaagtcactgaatatcaaaatgatacagcttatacatatagttactgtgacaagtgacagactgctagttcagaattcaaaaatcctttcctagtttgtgagataatgggctaaattccttctgcctgccactggggcaaagcaaattgctttagtttttgatgagagttcttagaagtttgttggtattccttcatccacagcatccattgttgaaataaccattttcagttgtgatgccttaactaagaagccaattgttagcctgaaatgcaatcttggtagccagtttcaatgaagctagagattagtcagaaaaagttagctgttgggctttagaaagggattttgagtcctgtcatttctacttgggagcattttggagcagattagtctttcagtataaaaacaagtggctacctgatggaaacttttcttacccttatagggaaactgagcacaagctgaatgatattgtctgctgcaaaaaaaaacaaac

SEQ ID NO: 1717 - DNA, 3052 bp, Homo sapiens
  source 1..3052: mol_type = unassigned DNA
agactgttccaagatggcggcgggttgctgcggggtgaagaagcagaaactgtccagttcgcccccctctggctcgggtggcggtggtggcgcctcctcctcctcccactgcagcggagagagccagtgccgagctggggagctgggactaggaggcgccggtacgcggctcaacgggctgggaggtctaaccggaggaggtagcggcagcggctgtaccctctctcccccccagggctgcggcggcggcggcggggggatcgccctgtcgccacctccgagctgcggagtggggaccctactttctaccccggccgccgccacctcttcctcaccctcctcatcgtccgccgcctcgtcctcatcgccgggctcccggaagatggtggtgtcagcagagatgtgctgcttttgcttcgatgtgctctactgtcacctgtatggataccagcagccccggaccccccgattcaccaacgagccctatgcccttaaagatagccgttttcccccaatgacaagggatgagctgccacggcttttctgctcagtgtctctgctcactaactttgaagatgtctgtgattatttggactgggaggtgggtgtacatggcattagaatagaattcatcaatgaaaaaggatcaaaacgcaccgccacctacctaccggaggttgcaaaggagcaaggatgggaccatatacagaccatagactccttattgaggaaaggaggatacaaagctccgattactaatgaattcaggaaaaccataaaactgaccaggtatcgtagtgaaaagatgaccctgagctatgctgaataccttgctcatcgccagcatcatcatttccaaaatggcattgggcatccccttccgccatacaaccattattcctgacactgagccgcacaaccagtcactgggcctctctgcagacctcttcccaggagaccctacaccttcttggtctagctatctcttttactgtaccattttatgatgatagtttccgttgccatggtgaagcttcgacatcgtcaactaagatcatcatggtaacgggtagaaaaatggcatttgttaagatcctgttttattattttagatcgttgattttttttttgcagcatatataattttgggtttttttttccttataatattatgtagaattttgctttgctgtctcagtcaggtttctgtttttctgtcctccttgcctttcttcccgttttgcttcctgttttccttcttccttcccgttttccttcttccttccctgcctcccttcctttgactgtggatggaagaaagtgtgcagtttttagggattttacttaggttcgtctttagttttcctcagtaagatagttgttttttgatacctgagtttgggattaattcatatcaaattcaggtatttgtatattactcttgatttttgtctgaaattcactttgctatgacagcctagtagttgggtcttcactccttaagtatatgtttttcccatggtgaaaatacatgaactttagttctagtagtgagcattcaaaggtccgtgatagggcttgtcacagagagagagaaatcatttatccctattgtgctggttatcatagaagagactgcctcaccactttatagaaccaatttgcaaactaaaacactgtttggagaaggtacaaactacctttcaaaaaggctacaggaaacattttatgagcagcaaatattaggaagagagcagatacagaatttagtgcctttgagaagaatataattaagtggaattaagaggggttagaaaaaaggcaatttagaaaaatattcttgtaaaactttattgtttctatatgtgaaacagaagattagacaaattccttactcttaagtatttttttaagctgaaaaaaaattattttgagcaaataaccaataagagacatttgtctattttatattaatttaaatttgttagctctaggtttcaataagtcatgattggctagaatccattttagctaccatctaaagatatggtaaagataatttagtaaaacaaaagttcatatttgccatgatttcagatatgtttgtcatggggacaatattagagttttagagatactataaaatagcttgaatttctttctgcactacatacttttgatagaaacacatttactacattgataagatgttatgtcacacctgtgaaaatggagttggcattcagatatgctatagttagagcccagctcatctgcaagtatagtcttcccatgatgcatacaaagataacttactgatgtcgataggaggtccatacatatatccccaggaaaaatgacagattattctggaggaagatgaccttcattttatggttatgtgtgtgtgtctgtgtgtctttggaaaaatatatataattttttcaaataggaagccaacatatcaagtgatgaattaaagtatgctgcagaatatatattctaaaactacaaaaaagtcactgaatatcaaaatgatacagcttatacatatagttactgtgacaagtgacagactgctagttcagaattcaaaaatcctttcctagtttgtgagataatgggctaaattccttctgcctgccactggggcaaagcaaattgctttagtttttgatgagagttcttagaagtttgttggtattccttcatccacagcatccattgttgaaataaccattttcagttgtgatgccttaactaagaagccaattgttagcctgaaatgcaatcttggtagccagtttcaatgaagctagagattagtcagaaaaagttagctgttgggctttagaaagggattttgagtcctgtcatttctacttgggagcattttggagcagattagtctttcagtataaaaacaagtggctacctgatggaaacttttcttacccttatagggaaactgagcacaagctgaatgatattgtctgctgcaaaaaaaaacaaacaaaaaaaaaacaaaacaaaaaacaaaaaaaaggaaaaa

SEQ ID NO: 1718 - DNA, 4741 bp, Homo sapiens
  source 1..4741: mol_type = unassigned DNA
gggggtgcgagcgaggagccgcacaggcagtcccggcgcggggcaaccacagcgctcaggaggccctgagtccggcacctggccatgtgcaaccctgaggaggcagctctgctgcggctggaggaggtcttctcagccaccctcgcccatgtcaacagccttgtcctccagcccctgctcccagccgccccagatccctcggatccctggggcagagagtgcctgcggctcttgcaacagctgcacaagagctcccagcaactctgggaggtgacggaggaaagcctgcactcactgcaggagaggctgcgttacccggactccaccggtctggagtccctgctgctgctgcgaggtgctgaccgtgtactgcaggcccacatagagtacattgagtcctacacaagctgcatggtggtgcaggccttccagaaggcagcaaagaggagaagcgagtactggcggggccagcggaaggcgctgcggcagctgctttcaggtgtgagctcagagggctcggtgggcgcatcgctgggccaggccctccaccagccactcgcccatcacgtgcaacagtacgtgctcctcctgctgagcctcggggacaccattggggagcatcacccaacccgggagctggtggtgaacgcagtcaccctctttgggaacctgcagtccttcatgaagcaggagttggaccaggctgtggccacacaggctctctggcacaccctgagaggccggctgagggatgtgctctgcacccctgctcacagactccttcaggacagccaggacgtacccgtgacggtcgcaccgttgcgggctgagcgtgtgctgctctttgatgatgccctcgtcctgctgcagggccacaatgtccacacctttgatctgaagctggtgtgggtggatcctgggcaggacgggtgcacgtttcacctcctcacgcccgaagaagagttctccttttgtgccaaggactcccagggccaggcagtctggcagtggaaggtgacctgggctgttcaccaggccctgcatgggaagaaggacttccccgtgctgggggctggcctggagccctcccagcctcccgactgccgctgcgcagaatataccttccaggcagagggccggctctgccaggccacctacgagggcgagtggtgcaggggccggccccacggcaagggaaccctgaaatggccggatgggcggaatcacgtggggaatttctgccagggcctggagcatggcttcggcatccgcctgctgccccaggcctctgaggacaagttcgactgttacaagtgtcactggcgagaaggcagcatgtgtggctacggcatctgtgagtacagcaccgacgaggtgtacaagggctacttccaggagggcctgcggcacggatttggggtccttgagagtggtccgcaggccccccagcccttcaggtacacgggccactgggagaggggccagaggagcggctatggcattgaggaggatggtgacagaggtgagcgctacattggcatgtggcaggctggtcagcgccacggcccaggggtcatggtcacccaggcaggtgtctgctaccagggcaccttccaggcggacaagacggtgggcccgggcatcctcctctctgaagacgactccctgtatgagggcaccttcaccagggacctgaccctcatggggaagggcaaggtcaccttccccaatggcttcaccctggagggctcgttcggcagtggggcagggagaggactgcacacacagggtgtgctggacacggctgccctcccaccagacccgagcagtacctgcaagaggcagctgggcgtgggtgccttccccgtggaaagccgctggcagggagtctacagccccttccgggactttgtgtgtgctggctgccccagggacctgcaggaggccctgctgggcttcgacgtgcagagctccagggagctgcgtaggtctcaggattacctgtcctgcgagaggacccaccctgaggacagtgtgggcagtatggaagacatcctggaggagctgctgcagcaccgggagcccaaggccctgcagctgtacctcaggaaggctctgagcaactcactgcaccccctgggaaagctgctccggacactgatgctgaccttccaggctacctacgcaggtgtcggggccaacaagcacctgcaggagctggcccaggaggaggtgaagcagcatgcccaggaactctgggctgcctacaggggtctgctgcgagttgccttagagcgcaagggccaggccctggaggaggatgaagacacagagacaagggacctccaggtgcatggattggtgctgcccctcatgctgcccagcttctactcagagctcttcacgctctacctgctgcttcatgagcgggaggacagcttctacagccagggcattgccaacttgagcctctttcctgatacccaactgctcgagttcctggatgtgcagaagcacttgtggcccctcaaggacctcacgctgacgagcaatcagaggtactccctggtcagggacaagtgtttcctgtcagccaccgagtgcctgcagaagatcatgaccacggtggacccacgggagaagctggaggtgctggagaggacatacggggaaattgagggcacggtgtcgagggtattgggccgggagtacaagctgcccatggacgacctgctgccacttctcatctacgtggtgtcgcgcgcccgaattcagcacctgggagccgagatccacctgatccgtgacatgatggaccccaaccacacaggaggcctgtatgacttcctgctcacagccctggagtcctgttacgagcacatccagaaagaagacatgaggctgcaccgcttacctggccactggcactccagggagctctggtagcctggcctttcctggacagactgaagagctgagcagggcactgccagcctgtccctcattacccaaggcaaggggcaggacaggccctcagaagcagctcttggaggagatgagcattttgttttgcacaggaagatgctgctgctgccctgactgggatgagggtgaggggtgacgggtgtggccctggatgtggtggttttcccttggccactagcccatcttcaatgaccccttaatctgcagcagctcacaggctgggggtgaggagtccctggcttctcttagcctgagcctttctcccaagttccagagcctctccgggcctcagtgctgccatctgtacaatggtggagtgagtacgctgtaaaggaccttccattcattttgctgaattccagagtccttttggaaaactgactttagtctgctgggctgtattgacctctggcaggctcgaagcctcactgggtatgcagtcaacaggatgggcctggagatccgtgaactgcaggccacgtacccatgacgtaaacggcggcactggagcaagctggggcggggggtgggtaaaccctcactgccagcaggccccaagtggcttgtaaatcattctcctgtgatgtctgtgggcctgcgtggggacaacaggggcacatgacatctgcctgggccctgaccaataaaccctcagacccaggacccaggaccctgctgtagttggggagcaggagtacctttgggaggggaggactttatttaaacagtggttctagtgtgggaccaagagaggcaggagctgggtcttggggcagctttattcctgttgggcctcagtttctcttccccacacagtttatcttccgtcacattgtgccgggtgacgtgcacggtctccctctgccctagccggagatgcatgatgacaggcagtgtgatgtgttctgaaagtgtccagggcaaagcgtagggagagggtggatttgtgcagggtgcagctctggagaagaagctggatcactcttggtcccattccctaggccctgagcaagtcaggctcctggctctgggtgtggctcccccaaacgaagtactgacttcagcctgtgaggggagggttgagggaggctctggaaagcccagccacacctgagtccctggcagtagccttggggcagagggcacccgcagagtcccagagatgatgtgggcagtgggcagagagagccttggcgcctctgtttgccaccacttccccaggaaggagggacagcatttctctggctggttccactaaatgtgccagcccaaatgcagggcatgggctctggttctgccaggagcctgtgacacccccaggaagggggtggaactgaggaagagcgaggatatgcaggcactcatgcttaccgggactggggcagctcactaggattctatcctttccaatcggcatcagccagctcttgtcccctgataagtgaggacagcctgaccctggcctcaaatgcagccatccctgagttcatgcgatgctgacgggaccccagcacacttccctgcctcctttgagatctgcgagcccttgctgcagttcagattcaacaaggccctctgcccaccctctcactaggcctcacccaacaccagtggaactggagcctctggctgggcacagtggctcactttgggaggctgaggcaggaaggctgctggaaactgagagttcaagaccagcctgggcaacatagtgagaccctgtctctacaaatacaaaataaaataattagctggg

SEQ ID NO: 1719 - DNA, 1747 bp, Homo sapiens
  source 1..1747: mol_type = unassigned DNA
aggaaggaaccagctgtaagggagggcagagggggatgtcttggaggggaatcccagactttggacactggtctctcttggaccaagaccccctctctggcttggcctccagatctgcccacctttctgtctccgtctttccaggattccatatgcttctgtctgtcttctcgtcgcagggtagattctctgtccctttctctgctgctcttcctcctggagccgtggaggcagctgggcgtgggtgccttccccgtggaaagccgctggcagggagtctacagccccttccgggactttgtgtgtgctggctgccccagggacctgcaggaggccctgctgggcttcgacgtgcagagctccagggagctgcgtaggtctcaggattacctgtcctgcgagaggacccaccctgaggacagtgtgggcagtatggaagacatcctggaggagctgctgcagcaccgggagcccaaggccctgcagctgtacctcaggaaggctctgagcaactcactgcaccccctgggaaagctgctccggacactgatgctgaccttccaggctacctacgcaggtgtcggggccaacaagcacctgcaggagctggcccaggaggaggtgaagcagcatgcccaggaactctgggctgcctacaggggtctgctgcgagttgccttagagcgcaagggccaggccctggaggaggatgaagacacagagacaagggacctccaggtgcatggattggtgctgcccctcatgctgcccagcttctactcagagctcttcacgctctacctgctgcttcatgagcgggaggacagcttctacagccagggcattgccaacttgagcctctttcctgatacccaactgctcgagttcctggatgtgcagaagcacttgtggcccctcaaggacctcacgctgacgagcaatcagaggtactccctggtcagggacaagtgtttcctgtcagccaccgagtgcctgcagaagatcatgaccacggtggacccacgggagaagctggaggtgctggagaggacatacggggaaattgagggcacggtgtcgagggtattgggccgggagtacaagctgcccatggacgacctgctgccacttctcatctacgtggtgtcgcgcgcccgaattcagcacctgggagccgagatccacctgatccgtgacatgatggaccccaaccacacaggaggcctgtatgacttcctgctcacagccctggagtcctgttacgagcacatccagaaagaagacatgaggctgcaccgcttacctggccactggcactccagggagctctggtagcctggcctttcctggacagactgaagagctgagcagggcactgccagcctgtccctcattacccaaggcaaggggcaggacaggccctcagaagcagctcttggaggagatgagcattttgttttgcacaggaagatgctgctgctgccctgactgggatgagggtgaggggtgacgggtgtggccctggatgtggtggttttcccttggccactagcccatcttcaatgaccccttaatctgcagcagctcacaggctgggggtgaggagtccctggcttctcttagcctgagcctttctcccaagttccagagcctctccgggcctcagtgctgccatctgtacaatggtggagtgagtacgctgtaaaggaccttccattcattttgctgaattccagagtccttttgg

SEQ ID NO: 1720 - DNA, 3471 bp, Homo sapiens
  source 1..3471: mol_type = unassigned DNA
acagcgctcaggtaagggcgcgacgaagggcgcgcgtctgcggacgggtgtctgcgctccacgcttagctcgtccaggtgggggctcccgcctcctcggctgctgcggtccccgcccagctccttggtcccggcggcagtcatcccccggccgtccgagtccctcgaggccctgagtccggcacctggccatgtgcaaccctgaggaggcagctctgctgcggctggaggaggtcttctcagccaccctcgcccatgtcaacagccttgtcctccagcccctgctcccagccgccccagatccctcggatccctggggcagagagtgcctgcggctcttgcaacagctgcacaagagctcccagcaactctgggaggtgacggaggaaagcctgcactcactgcaggagaggctgcgttacccggactccaccggtctggagtccctgctgctgctgcgaggtgctgaccgtgtactgcaggcccacatagagtacattgagtcctacacaagctgcatggtggtgcaggccttccagaaggcagcaaagaggagaagcgagtactggcggggccagcggaaggcgctgcggcagctgctttcaggtgtgagctcagagggctcggtgggcgcatcgctgggccaggccctccaccagccactcgcccatcacgtgcaacagtacgtgctcctcctgctgagcctcggggacaccattggggagcatcacccaacccgggagctggtggtgaacgcagtcaccctctttgggaacctgcagtccttcatgaagcaggagttggaccaggctgtggccacacaggctctctggcacaccctgagaggccggctgagggatgtgctctgcacccctgctcacagactccttcaggacagccaggacgtacccgtgacggtcgcaccgttgcgggctgagcgtgtgctgctctttgatgatgccctcgtcctgctgcagggccacaatgtccacacctttgatctgaagctggtgtgggtggatcctgggcaggacgggtgcacgtttcacctcctcacgcccgaagaagagttctccttttgtgccaaggactcccagggccaggcagtctggcagtggaaggtgacctgggctgttcaccaggccctgcatgggaagaaggacttccccgtgctgggggctggcctggagccctcccagcctcccgactgccgctgcgcagaatataccttccaggcagagggccggctctgccaggccacctacgagggcgagtggtgcaggggccggccccacggcaagggaaccctgaaatggccggatgggcggaatcacgtggggaatttctgccagggcctggagcatggcttcggcatccgcctgctgccccaggcctctgaggacaagttcgactgttacaagtgtcactggcgagaaggcagcatgtgtggctacggcatctgtgagtacagcaccgacgaggtgtacaagggctacttccaggagggcctgcggcacggatttggggtccttgagagtggtccgcaggccccccagcccttcaggtacacgggccactgggagaggggccagaggagcggctatggcattgaggaggatggtgacagaggtgagcgctacattggcatgtggcaggctggtcagcgccacggcccaggggtcatggtcacccaggcaggtgtctgctaccagggcaccttccaggcggacaagacggtgggcccgggcatcctcctctctgaagacgactccctgtatgagggcaccttcaccagggacctgaccctcatggggaagggcaaggtcaccttccccaatggcttcaccctggagggctcgttcggcagtggggcagggagaggactgcacacacagggtgtgctggacacggctgccctcccaccagacccgagcagtacctgcaagaggcagctgggcgtgggtgccttccccgtggaaagccgctggcagggagtctacagccccttccgggactttgtgtgtgctggctgccccagggacctgcaggaggccctgctgggcttcgacgtgcagagctccagggagctgcgtaggtctcaggattacctgtcctgcgagaggacccaccctgaggacagtgtgggcagtatggaagacatcctggaggagctgctgcagcaccgggagcccaaggccctgcagctgtacctcaggaaggctctgagcaactcactgcaccccctgggaaagctgctccggacactgatgctgaccttccaggctacctacgcaggtgtcggggccaacaagcacctgcaggagctggcccaggaggaggtgaagcagcatgcccaggaactctgggctgcctacaggggtctgctgcgagttgccttagagcgcaagggccaggccctggaggaggatgaagacacagagacaagggacctccaggtgcatggattggtgctgcccctcatgctgcccagcttctactcagagctcttcacgctctacctgctgcttcatgagcgggaggacagcttctacagccagggcattgccaacttgagcctctttcctgatacccaactgctcgagttcctggatgtgcagaagcacttgtggcccctcaaggacctcacgctgacgagcaatcagaggtactccctggtcagggacaagtgtttcctgtcagccaccgagtgcctgcagaagatcatgaccacggtggacccacgggagaagctggaggtgctggagaggacatacggggaaattgagggcacggtgtcgagggtattgggccgggagtacaagctgcccatggacgacctgctgccacttctcatctacgtggtgtcgcgcgcccgaattcagcacctgggagccgagatccacctgatccgtgacatgatggaccccaaccacacaggaggcctgtatgacttcctgctcacagccctggagtcctgttacgagcacatccagaaagaagacatgaggctgcaccgcttacctggccactggcactccagggagctctggtagcctggcctttcctggacagactgaagagctgagcagggcactgccagcctgtccctcattacccaaggcaaggggcaggacaggccctcagaagcagctcttggaggagatgagcattttgttttgcacaggaagatgctgctgctgccctgactgggatgagggtgaggggtgacgggtgtggccctggatgtggtggttttcccttggccactagcccatcttcaatgaccccttaatctgcagcagctcacaggctgggggtgaggagtccctggcttctcttagcctgagcctttctcccaagttccagagcctctccgggcctcagtgctgccatctgtacaatggtggagtgagtacgctgtaaaggaccttccattcattttgctgaattccagagtccttttggaaaactg

SEQ ID NO: 1721 - DNA, 12922 bp, Homo sapiens
  source 1..12922: mol_type = unassigned DNA
aggcgggcggcactgcgcctaagctgggccacaaccgccagtcagggctctccccttcccctccctccccccctcctcctcctcctctgccgcccagagcgagacaccaacatggagcccgaggatctgccatggccgggcgagctggaggaggaggaggaggaggaggaggaggaggaggaggaagaggaggaggctgcagcggcggcggcggcgaacgtggacgacgtagtggtcgtggaggaggtggaggaagaggcggggcgggagttggactccgactctcactacgggccccagcatctggaaagtatagacgacgaggaggacgaggaggccaaggcctggctgcaggcgcaccccggcaggattttgcctccgctgtcgcccccgcagcaccgctactcggagggcgagcggacctccctggagaagattgttccattgacctgtcatgtatggcaacagatagtatatcaaggcaatagtagaacacaaatttctgatactaatgtggtctgtttggaaacaacagctcagcggggttctggggatgatcagaaaacagaatcttggcattgtcttcctcaagaaatggactcttcccaaaccttggatacatcccagactaggtttaatgtgagaacggaagatactgaagtgacagacttcccctctctggaggagggcatattgacgcaatcagaaaatcaagtaaaggaacccaacagagatctcttctgttctccactgctagtcatacaagatagctttgcttctcctgatttgcctttgctgacctgtttgacacaagaccaagaatttgcgcctgattctttatttcatcaaagtgaactaagttttgcacctctgaggggaattcctgataagtctgaagatactgaatggtcttctcgaccatcggaagttagtgaagctttattccaggctactgcagaagtagcttcagacttagcaagcagtcgctttagtgtatctcagcacccgcttataggcagcacagctgttgggtctcagtgcccttttttaccttctgaacaagggaataatgaagagactatttcgtctgttgatgaactgaaaattcccaaagactgtgatcgttatgatgatctttgttcatatatgtcatggaagacacgaaaagatacacagtggcctgaaaacaatttagctgataaagatcaagtttcagttgcaacttcatttgacataactgatgaaaacatagctactaaaagaagtgaccattttgatgctgctcgttcatatgggcagtattggacacaggaagattcatctaagcaggcagaaacatatttaaccaagggcctgcaggggaaggttgagtctgacgtcattactctggatggcctaaatgaaaatgctgttgtatgcagtgaaagagttgctgaactacaaagaaagccaacaagagagtcggaatatcactcttcagatctcagaatgttgaggatgtctcctgacactgtgccaaaggctcctaaacatttaaaagcaggagacacttctaaaggaggcatagctaaagttactcaatccaacttgaagtcaggcatcactaccactcctgttgattcagacattggatctcatttatccttgtcccttgaggacctgtctcagttggctgtaagttctctagaaactactactggtcaacacactgatactctcaaccaaaagacattagcagatactcatctaactgaagagactctgaaagtcacagctattcctgaaccagctgaccagaagactgcaacaccaacagtactctctagttcccactcacatagggggaagcccagcattttctaccagcagggcttgccagacagtcatctaactgaagaggctttgaaagtttcagctgctcctggactagctgaccagacaactggcatgtcaactctaacctctacttcctactcacatagagagaagcctggtactttttaccaacaagagttaccagagagtaacttaaccgaagagcctttggaagtttcagctgctcctggcccagtggagcagaagacgggaatacctacagtatcctctacatcccactcacatgtagaggacctcctctttttctatcgacagaccttgccagatggtcatctaactgatcaggctctgaaagtctcagctgtgtctggaccagctgaccagaagactgggacagcaacagtactctctactccccactcacatagagagaagcctggtattttttaccaacaagagttcgcagacagtcatcaaactgaagagactcttactaaagtttcagccactcctggaccagctgaccagaagactgagataccagcagtacagtctagttcttactcacaaagagaaaagcctagtattttgtacccacaggacttagcagacagtcatctacctgaagagggtctgaaagtttcagctgttgctggaccagctgaccagaagactggcctaccaacagtaccctctagtgcatactcacacagagagaagctccttgttttctaccaacaggccttgctggacagccatctacccgaagaggctctgaaagtttcagctgtttctggaccagctgacggaaagactgggacaccagctgtaacctctacttcctctgcgtcctcttcacttggagaaaagcccagtgctttctatcagcagaccttacccaatagtcatctaactgaagaggctctgaaagtatcaattgttcctggaccaggtgatcagaagactgggataccctcagcaccatctagtttctactcacacagagagaagcccattattttttcccagcagaccctgccagactttcttttccctgaagaagctctgaaggtttcagctgtttctgtattggctgcccagaagactgggacaccaacagtgtcctctaattctcactcacatagcgagaaatctagtgttttctaccagcaagagttgccagacagtgatctacctagagaatctctgaaaatgtctgctattcctggactgactgaccagaagactgtcccaacaccaacagtaccttcaggttccttctcacatagagagaagcccagtattttctatcaacaggagtggccagatagttatgcaactgaaaaggctctgaaagtttcaactggccctggaccagctgaccagaagactgagataccagcagtacagtctagttcttacccacagagggagaagcctagtgttttgtacccacaggtgttatcagacagtcatctacctgaagagagtctgaaagtttcagccttccctggaccagctgaccagatgactgacacaccagcagtaccgtctactttctactcacaaagagagaagcctggtattttctaccaacagaccttgccagagagtcatctgcctaaagaggctctgaaaatttcagtagctcctggactagcagaccagaagactggcacaccaactgtaacctcaacttcctactcacaacatagagaaaagcccagcattttccaccagcaggccttgccaggtactcatatacctgaagaggctcagaaagtttcagctgttactggaccaggtaaccagaagacttggataccaagagtactttctaccttctactcacaaagagagaaacctggtattttctatcaacagaccttgccaggtagtcacatacctgaagaggcacagaaagtttcacctgttcttggaccagctgaccagaagactgggacaccaactccaacctctgcttcttactcacacacagagaagcctggtattttctaccaacaggtcttgccagataatcatccaactgaagaggctctgaaaatttcagttgcctctgaaccagttgaccagacaactggcacaccagctgtaacctctacttcctactcacaatatagagagaagcccagcattttctaccaacagtcgttgccaagtagtcatctaactgaagaggctaagaatgtttcagcggttcctggaccagctgaccagaagactgtgataccaattttaccctctactttctactcacacacagagaagcctggtgttttctaccaacaggtcttgccacatagtcatccaactgaagaggctctgaaaatttcagttgcctctgaaccagttgaccagacaactggcacaccaactgtaacctctacttcttactcacaacatacagagaagccgagtattttctaccaacagtcgttgccaggtagtcatctaactgaagaggctaagaacgtttcagcggttcctggaccaggtgaccggaagactgggataccaactttaccctctactttctactcacacacagagaagcctggtagtttctaccaacaggtcttgccacatagtcatctacctgaagaggctttggaagtttcagttgctcctggaccagttgaccagacgattggcacaccaactgtaacctccccttccagctcatttggagagaagcccattgttatctacaaacaggcctttccagagggtcatctacctgaagagtctctgaaagtttcagttgctcctggaccagttggccagacaactggcgcaccaactataacctctccttcctactcacaacatagagcaaagtctggcagtttctaccaactggcattgctaggtagtcaaatacctgaagaggctctcagagtttcttctgctcctggaccagctgaccagacaactggcataccaaccataacctctacttcctactcatttggagagaagccgattgttaactacaaacaggcctttccagatggtcatctacctgaagaggctctgaaagtttccattgtttctggacctactgaaaaaaagactgacataccagcaggacctttaggttccagtgcacttggagagaagcccattactttctaccggcaggctctgctagacagtcctctaaataaagaggttgtgaaagtttcagctgctcctggaccagctgaccagaagactgagacattaccagtacattctactagctactcaaatagggggaagcctgtcattttctaccagcagaccctatcagacagtcatttacctgaagaagctctgaaagttccacctgttcctggaccagatgcccagaagactgagacaccatcagtatcctctagtttatactcatatagagagaagcccattgtcttctaccaacaggccctgccagacagtgagctaactcaagaagctctgaaagtttcagctgttcctcaaccagctgaccagaagactgggttatctactgtaacttcctctttctattcacatacagagaagcctaatatttcttaccagcaagagttgccagatagtcatctaactgaagaggctctgaaagtttcaaatgttcctggaccagctgaccagaagactggggtatcaacagtaacctctacttcctactcacacagagagaagcccattgtttcctaccagcgagagttgccgcattttactgaagcaggtttgaaaattttaagagttcctggaccagctgaccagaagactggaataaacatcctgccctctaattcctacccacagagagagcactctgtcatttcttatgagcaggagttgccagatcttactgaagtaactttgaaagcaataggggttcctgggcctgctgaccagaagactgggatacaaatagcatcctctagttcctactcaaatagagagaaggccagtatttttcatcagcaggagttgccagatgttactgaagaagctttaaatgtttttgttgttcctggacaaggtgaccggaagactgagataccaacagtacctttaagttactactcacgtagagagaagcccagtgttatctctcaacaggagttgccagacagtcatctcacagaagaggctctgaaagtttcacctgtttctataccagcagagcagaagactgggataccaataggactgtctagttcctactcacattcacataaagagaaactcaagatttcaactgtgcatataccagatgaccagaaaactgagtttccagcagctacccttagttcctactcacaaatagagaagcccaagatttcaactgtgattggaccaaatgaccagaagactccatcccagacagcttttcatagttcctattctcaaacagtaaagcccaatattttatttcaacagcagttgccagatagagatcaaagtaaaggtattctaaagatttcagctgtccctgaactaactgatgtgaatactggaaaaccagtatctctctctagttcttattttcacagagagaaatcgaatattttcagtccacaggaattgccaggtagtcatgtaactgaagatgtgctgaaggtttcaacaattcctggaccagctggccagaaaacagtattaccaacagctcttcctagttccttttcacatcgagagaaaccagatattttctatcaaaaggatttgccagatagacatctaactgaagatgctctaaagatctcaagtgctcttgggcaagctgatcaaattaccggattacaaacagttccctctggtacttactcacatggtgagaatcacaagcttgtttcagaacatgtccaaaggctaatagataatttgaattcttctgactccagtgttagctcaaataatgtgcttttaaattctcaggctgatgacagagttgtaataaataaaccagaatctgcaggttttagagatgttggctctgaagaaatccaggatgcagaaaatagtgctaaaactcttaaggaaattcggacacttttgatggaggcagaaaatatggcactgaaacgatgcaattttcctgctccccttgcccgtttcagagatattagtgatatttcatttatacaatctaagaaggtggtttgcttcaaagaaccctcttccacgggtgtatctaatggtgatttgcttcacagacagccattcacagaggaaagcccaagcagcaggtgcatacagaaggatattggcacacagacgaatttgaaatgccggagaggcattgaaaattgggagtttattagttcaactacagttagaagtcctctacaggaagcagagagcaaagtcagtatggcattagaagaaactcttaggcaatatcaagcagccaaatctgtaatgaggtctgaacctgaagggtgtagtggaaccattgggaataaaattattatccctatgatgactgtcataaaaagtgattcaagtagtgatgccagtgatggaaatggttcctgctcgtgggacagtaatttaccagagtctttggaatcagtttctgatgttcttctaaacttctttccatatgtttcacccaagacaagtataacagatagcagggaggaagagggtgtgtcagagagtgaggatggtggtggtagcagtgtagattcactggctgcacatgtgaaaaaccttctgcaatgtgaatcctcactgaatcatgctaaagaaatactcagaaatgcagaggaagaggaaagccgggtacgagcacatgcctggaatatgaagttcaatttagcacatgattgtggatactccatttcagaattaaatgaagatgacaggaggaaagtagaagagatcaaggcagagttatttggtcatggaagaacaactgacttgtccaagggtttacagagtccacggggaatgggatgcaagccagaagctgtatgtagtcacattattattgagagccatgaaaagggatgtttccggactctaacttctgaacatccacaactagatagacacccttgtgctttcagatctgctggaccctcagaaatgaccagaggacggcagaacccatcatcatgcagagccaagcatgtcaacctttctgcatccttagaccagaacaactcccatttcaaagtttggaattccttgcagttaaaaagtcattccccatttcagaactttatacctgatgaattcaaaatcagcaaaggtcttcgaatgccattcgatgaaaagatggacccttggctgtcagaattagtagaacctgcttttgtgccacctaaagaagtggattttcattcttcatcacaaatgccgtccccagaacccatgaaaaagtttactacctccatcactttttcatctcaccgacattctaaatgcatttccaattcctctgttgttaaggttggtgttactgaaggtagccagtgtactggagcatctgtgggggtatttaattctcatttcactgaagaacaaaatcctcccagagatcttaaacagaaaacctcttccccttcatcatttaaaatgcatagtaattcacaagataaagaagtgactattttagcagaaggtagaaggcaaagccaaaaattacctgttgattttgagcgttcttttcaagaagaaaaacccttagaaagatcagattttacaggcagtcattctgagcccagtaccagggcaaattgtagcaatttcaaggaaattcagatttctgataaccatacccttattagcatgggcagaccaagttccaccctaggagtaaacagatcgagttccagactaggagtaaaagagaagaatgtaactataactccagatcttccttcttgcatttttcttgaacaacgagagctctttgaacaaagcaaagccccacgtgcagatgaccatgtgaggaaacaccattctccctctcctcaacatcaggattatgtagctccagaccttccttcttgcatttttcttgaacaacgagaactctttgaacagtgcaaagccccatatgtagatcatcaaatgagagaaaaccattctccccttcctcaaggtcaggattctatagcttcagaccttccgtctcccatttctcttgaacaatgccaaagcaaagcgccaggtgtagatgaccaaatgaataaacaccattttccccttcctcaaggtcaggattgtgtagtggaaaagaataatcaacataagcctaaatcacacatttctaatataaatgttgaagccaagttcaatactgtggtctcccagtcagccccaaatcactgtacattagcagcatctgcatctactcctccttcaaatagaaaagcactttcttgtgttcatataactctttgtcccaagacttcttccaagttggatagtggaactttagatgaaagattccattcattggatgctgcttctaaagcgaggatgaatagtgagtttaactttgacttacatactgtatcttcgagatcactggaaccaacctccaaattattgaccagtaaacctgtagcacaggatcaagaatctttaggttttctaggacctaaatcttcactggatttccaagtcgtacagccttctcttccagacagtaacactattactcaggacttgaaaaccataccttctcagaatagccagatagtaacctccaggcaaatacaagtgaacatttcagatttcgaaggacattccaatccagaggggaccccagtatttgcagatcgattaccagagaagatgaagaccccactttctgctttctctgaaaaattgtcatctgatgcagtcactcagataacaacagaaagtccagaaaagaccctattttcatctgagatttttattaatgctgaagatcgtggacatgaaattatagagcctggtaaccagaagctacgcaaagctcctgtcaagtttgcctcatcatcttcagtccaacaggttactttttctcgcggcacagatggccagcctttattattgccatataagccttctggtagtaccaagatgtattatgttccacaattaagacaaattcctccatctccggattccaaatcagataccaccgttgaaagctcccattcaggatccaatgatgccattgctccagacttcccagctcaggtgctaggcacaagagatgatgacctctcagccactgttaacattaaacataaagaaggaatctacagtaagagggtagtgactaaggcatccttgccagtgggagaaaaacccttgcagaatgaaaatgcagatgcctcagttcaagtgctaatcactggggatgagaacctctcagacaaaaaacagcaagagattcacagtacaagggcagtgactgaggctgcccaggctaaagaaaaagaatctttgcagaaagatactgcagattccagtgctgctgctgctgcagagcactcagctcaagtaggagacccagaaatgaagaacttgccagacactaaagccattacacagaaagaggagatccataggaagaagacagttcccgaggaagcctggccaaacaataaagaatccctacagatcaatattgaagagtccgaatgtcattcagaatttgaaaatactacccgttctgtcttcaggtcagcaaagttttacattcatcatcccgtacacctaccaagtgatcaagatatttgccatgaatctttgggaaagagtgttttcatgagacattcttggaaagatttctttcagcatcatccagacaaacatagagaacacatgtgtcttcctcttccttatcaaaacatggacaagactaagacagattataccagaataaagagcctcagcatcaatgtgaatttgggaaacaaagaagtgatggatactactaaaagtcaagttagagattatccaaaacataatggacaaattagtgatccacaaagggatcagaaggtcaccccagagcaaacaactcagcacactgtgagtttgaatgaactgtggaacaagtatcgggagcgacagaggcaacagagacagcctgagttgggtgacaggaaagaactgtccttggtggaccgacttgatcgtttggctaaaattcttcagaatccaatcacacattctctccaggtctcagaaagtacacatgatgatagcagaggggaacgaagtgtgaaggaatggagtggtagacaacagcagagaaataagcttcagaaaaagaagcggtttaaaagcctagagaaaagccataaaaatacaggcgagcttaaaaaaagcaaggtgctttctcatcatcgagctgggaggtctaatcaaattaaaattgaacagattaaatttgataaatatattctgagtaaacagccaggttttaattatataagcaacacttcttcggattgtcggccctcagaggagagtgagctgctcacagatactaccaccaacatcctttccggcaccacttctactgtcgaatcagatatattgacccaaacagatagagaggtggctctgcacgaaaggagtagctctgtttccactattgacactgcccggctgattcaagcttttggccatgaaagagtatgcttgtcacccagacgaattaaattatatagcagcatcaccaaccaacagaggagataccttgagaagcggagcaaacacagcaagaaagtgctgaatacaggtcatcccctagtgacttctgagcacaccagaaggagacacatccaggtagcaaaccatgtgatttcttctgactctatttcctcttctgccagtagtttcctgagctcaaactctactttttgcaacaagcagaatgtacacatgttaaacaagggcatacaagcaggtaacttggagattgtgaacggtgccaaaaaacacactcgagatgttgggataactttcccaactccaagttccagcgaggctaaattggaagagaacagtgatgtgacttcttggtcagaagaaaaacgtgaagagaaaatgctctttaccggttatcctgaggacagaaagttaaaaaagaacaagaagaattcccatgaaggagtttcctggtttgttcctgtggaaaatgtggagtctagatcaaagaaggaaaacgtgcctaacacttgtggccctggcatctcctggtttgaaccaataaccaagaccagaccctggagggagccactgcgggagcagaactgtcaggggcagcacctggacggtcggggctacctggcaggcccaggcagagaggctggcagagacctactgaggccatttgtgagagcaacccttcaggaatcgcttcagtttcacagacctgacttcatctcccgctctggggagcggataaagcgcctgaagttaatagtccaggagaggaagctgcagagcatgttacagaccgagcgggatgcactattcaacattgacagggaacggcagggccaccagaatcgcatgtgcccgctgcccaagagagtcttcctggctatccagaagaacaagcctatcagcaagaaggaaatgattcagaggtccaaacggatttatgagcagcttccagaagtacagaaaaagagagaagaagagaagagaaaatcagaatataagtcataccggctgcgagcccagctatataaaaagagagtgaccaatcaacttctggggagaaaagttccctgggactgacacaagtttattttcctcagagccttggaattctattttatgaacctagagaagcagaatccttacttttgtgagtctggttgaataaagcttattctttgtccatgtgtattttagaaatagtaacttctaaagagtctggaacaaagtggtgattaaaattcctaatggtttgggagcaatactttctgcatagtggccttgtccaatggcctgtgtgttacaatgatatgatcatttctcaagaataagtccctttttgtatgtgtttttatacttttagaaaataaaaactttagattaactc

SEQ ID NO: 1722 - DNA, 7797 bp, Homo sapiens
  source 1..7797: mol_type = unassigned DNA
aggcgggcggcactgcgcctaagctgggccacaaccgccagtcagggctctccccttcccctccctccccccctcctcctcctcctctgccgcccagagcgagacaccaacatggagcccgaggatctgccatggccgggcgagctggaggaggaggaggaggaggaggaggaggaggaggaggaagaggaggaggctgcagcggcggcggcggcgaacgtggacgacgtagtggtcgtggaggaggtggaggaagaggcggggcgggagttggactccgactctcactacgggccccagcatctggaaagtatagacgacgaggaggacgaggaggccaaggcctggctgcaggcgcaccccggcaggattttgcctccgctgtcgcccccgcagcaccgctactcggagggcgagcggacctccctggagaagattgttccattgacctgtcatgtatggcaacagatagtatatcaaggcaatagtagaacacaaatttctgatactaatgtggtctgtttggaaacaacagctcagcggggttctggggatgatcagaaaacagaatcttggcattgtcttcctcaagaaatggactcttcccaaaccttggatacatcccagactaggtttaatgtgagaacggaagatactgaagtgacagacttcccctctctggaggagggcatattgacgcaatcagaaaatcaagtaaaggaacccaacagagatctcttctgttctccactgctagtcatacaagatagctttgcttctcctgatttgcctttgctgacctgtttgacacaagaccaagaatttgcgcctgattctttatttcatcaaagtgaactaagttttgcacctctgaggggaattcctgataagtctgaagatactgaatggtcttctcgaccatcggaagttagtgaagctttattccaggctactgcagaagtagcttcagacttagcaagcagtcgctttagtgtatctcagcacccgcttataggcagcacagctgttgggtctcagtgcccttttttaccttctgaacaagggaataatgaagagactatttcgtctgttgatgaactgaaaattcccaaagactgtgatcgttatgatgatctttgttcatatatgtcatggaagacacgaaaagatacacagtggcctgaaaacaatttagctgataaagatcaagtttcagttgcaacttcatttgacataactgatgaaaacatagctactaaaagaagtgaccattttgatgctgctcgttcatatgggcagtattggacacaggaagattcatctaagcaggcagaaacatatttaaccaagggcctgcaggggaaggttgagtctgacgtcattactctggatggcctaaatgaaaatgctgttgtatgcagtgaaagagttgctgaactacaaagaaagccaacaagagagtcggaatatcactcttcagatctcagaatgttgaggatgtctcctgacactgtgccaaaggctcctaaacatttaaaagcaggagacacttctaaaggaggcatagctaaagttactcaatccaacttgaagtcaggcatcactaccactcctgttgattcagacattggatctcatttatccttgtcccttgaggacctgtctcagttggctgtaagttctctagaaactactactggtcaacacactgatactctcaaccaaaagacattagcagatactcatctaactgaagagactctgaaagtcacagctattcctgaaccagctgaccagaagactgcaacaccaacagtactctctagttcccactcacatagggggaagcccagcattttctaccagcagggcttgccagacagtcatctaactgaagaggctttgaaagtttcagctgctcctggactagctgaccagacaactggcatgtcaactctaacctctacttcctactcacatagagagaagcctggtactttttaccaacaagagttaccagagagtaacttaaccgaagagcctttggaagtttcagctgctcctggcccagtggagcagaagacgggaatacctacagtatcctctacatcccactcacatgtagaggacctcctctttttctatcgacagaccttgccagatggtcatctaactgatcaggctctgaaagtctcagctgtgtctggaccagctgaccagaagactgggacagcaacagtactctctactccccactcacatagagagaagcctggtattttttaccaacaagagttcgcagacagtcatcaaactgaagagactcttactaaagtttcagccactcctggaccagctgaccagaagactgagataccagcagtacagtctagttcttactcacaaagagaaaagcctagtattttgtacccacaggacttagcagacagtcatctacctgaagagggtctgaaagtttcagctgttgctggaccagctgaccagaagactggcctaccaacagtaccctctagtgcatactcacacagagagaagctccttgttttctaccaacaggccttgctggacagccatctacccgaagaggctctgaaagtttcagctgtttctggaccagctgacggaaagactgggacaccagctgtaacctctacttcctctgcgtcctcttcacttggagaaaagcccagtgctttctatcagcagaccttacccaatagtcatctaactgaagaggctctgaaagtatcaattgttcctggaccaggtgatcagaagactgggataccctcagcaccatctagtttctactcacacagagagaagcccattattttttcccagcagaccctgccagactttcttttccctgaagaagctctgaaggtttcagctgtttctgtattggctgcccagaagactgggacaccaacagtgtcctctaattctcactcacatagcgagaaatctagtgttttctaccagcaagagttgccagacagtgatctacctagagaatctctgaaaatgtctgctattcctggactgactgaccagaagactgtcccaacaccaacagtaccttcaggttccttctcacatagagagaagcccagtattttctatcaacaggagtggccagatagttatgcaactgaaaaggctctgaaagtttcaactggccctggaccagctgaccagaagactgagataccagcagtacagtctagttcttacccacagagggagaagcctagtgttttgtacccacaggtgttatcagacagtcatctacctgaagagagtctgaaagtttcagccttccctggaccagctgaccagatgactgacacaccagcagtaccgtctactttctactcacaaagagagaagcctggtattttctaccaacagaccttgccagagagtcatctgcctaaagaggctctgaaaatttcagtagctcctggactagcagaccagaagactggcacaccaactgtaacctcaacttcctactcacaacatagagaaaagcccagcattttccaccagcaggccttgccaggtactcatatacctgaagaggctcagaaagtttcagctgttactggaccaggtaaccagaagacttggataccaagagtactttctaccttctactcacaaagagagaaacctggtattttctatcaacagaccttgccaggtagtcacatacctgaagaggcacagaaagtttcacctgttcttggaccagctgaccagaagactgggacaccaactccaacctctgcttcttactcacacacagagaagcctggtattttctaccaacaggtcttgccagataatcatccaactgaagaggctctgaaaatttcagttgcctctgaaccagttgaccagacaactggcacaccagctgtaacctctacttcctactcacaatatagagagaagcccagcattttctaccaacagtcgttgccaagtagtcatctaactgaagaggctaagaatgtttcagcggttcctggaccagctgaccagaagactgtgataccaattttaccctctactttctactcacacacagagaagcctggtgttttctaccaacaggtcttgccacatagtcatccaactgaagaggctctgaaaatttcagttgcctctgaaccagttgaccagacaactggcacaccaactgtaacctctacttcttactcacaacatacagagaagccgagtattttctaccaacagtcgttgccaggtagtcatctaactgaagaggctaagaacgtttcagcggttcctggaccaggtgaccggaagactgggataccaactttaccctctactttctactcacacacagagaagcctggtagtttctaccaacaggtcttgccacatagtcatctacctgaagaggctttggaagtttcagttgctcctggaccagttgaccagacgattggcacaccaactgtaacctccccttccagctcatttggagagaagcccattgttatctacaaacaggcctttccagagggtcatctacctgaagagtctctgaaagtttcagttgctcctggaccagttggccagacaactggcgcaccaactataacctctccttcctactcacaacatagagcaaagtctggcagtttctaccaactggcattgctaggtagtcaaatacctgaagaggctctcagagtttcttctgctcctggaccagctgaccagacaactggcataccaaccataacctctacttcctactcatttggagagaagccgattgttaactacaaacaggcctttccagatggtcatctacctgaagaggctctgaaagtttccattgtttctggacctactgaaaaaaagactgacataccagcaggacctttaggttccagtgcacttggagagaagcccattactttctaccggcaggctctgctagacagtcctctaaataaagaggttgtgaaagtttcagctgctcctggaccagctgaccagaagactgagacattaccagtacattctactagctactcaaatagggggaagcctgtcattttctaccagcagaccctatcagacagtcatttacctgaagaagctctgaaagttccacctgttcctggaccagatgcccagaagactgagacaccatcagtatcctctagtttatactcatatagagagaagcccattgtcttctaccaacaggccctgccagacagtgagctaactcaagaagctctgaaagtttcagctgttcctcaaccagctgaccagaagactgggttatctactgtaacttcctctttctattcacatacagagaagcctaatatttcttaccagcaagagttgccagatagtcatctaactgaagaggctctgaaagtttcaaatgttcctggaccagctgaccagaagactggggtatcaacagtaacctctacttcctactcacacagagagaagcccattgtttcctaccagcgagagttgccgcattttactgaagcaggtttgaaaattttaagagttcctggaccagctgaccagaagactggaataaacatcctgccctctaattcctacccacagagagagcactctgtcatttcttatgagcaggagttgccagatcttactgaagtaactttgaaagcaataggggttcctgggcctgctgaccagaagactgggatacaaatagcatcctctagttcctactcaaatagagagaaggccagtatttttcatcagcaggagttgccagatgttactgaagaagctttaaatgtttttgttgttcctggacaaggtgaccggaagactgagataccaacagtacctttaagttactactcacgtagagagaagcccagtgttatctctcaacaggagttgccagacagtcatctcacagaagaggctctgaaagtttcacctgtttctataccagcagagcagaagactgggataccaataggactgtctagttcctactcacattcacataaagagaaactcaagatttcaactgtgcatataccagatgaccagaaaactgagtttccagcagctacccttagttcctactcacaaatagagaagcccaagatttcaactgtgattggaccaaatgaccagaagactccatcccagacagcttttcatagttcctattctcaaacagtaaagcccaatattttatttcaacagcagttgccagatagagatcaaagtaaaggtattctaaagatttcagctgtccctgaactaactgatgtgaatactggaaaaccagtatctctctctagttcttattttcacagagagaaatcgaatattttcagtccacaggaattgccaggtagtcatgtaactgaagatgtgctgaaggtttcaacaattcctggaccagctggccagaaaacagtattaccaacagctcttcctagttccttttcacatcgagagaaaccagatattttctatcaaaaggatttgccagatagacatctaactgaagatgctctaaagatctcaagtgctcttgggcaagctgatcaaattaccggattacaaacagttccctctggtacttactcacatggtgagaatcacaagcttgtttcagaacatgtccaaaggctaatagataatttgaattcttctgactccagtgttagctcaaataatgtgcttttaaattctcaggctgatgacagagttgtaataaataaaccagaatctgcaggttttagagatgttggctctgaagaaatccaggatgcagaaaatagtgctaaaactcttaaggaaattcggacacttttgatggaggcagaaaatatggcactgaaacgatgcaattttcctgctccccttgcccgtttcagagatattagtgatatttcatttatacaatctaagaaggtggtttgcttcaaagaaccctcttccacgggtgtatctaatggtgatttgcttcacagacagccattcacagaggaaagcccaagcagcaggtgcatacagaaggatattggcacacagacgaatttgaaatgccggagaggcattgaaaattgggagtttattagttcaactacagttagaagtcctctacaggaagcagagagcaaagtcagtatggcattagaagaaactcttaggcaatatcaagcagccaaatctgtaatgaggtctgaacctgaagggtgtagtggaaccattgggaataaaattattatccctatgatgactgtcataaaaagtgattcaagtagtgatgccagtgatggaaatggttcctgctcgtgggacagtaatttaccagagtctttggaatcagtttctgatgttcttctaaacttctttccatatgtttcacccaagacaagtataacagatagcagggaggaagagggtgtgtcagagagtgaggatggtggtggtagcagtgtagattcactggctgcacatgtgaaaaaccttctgcaatgtgaatcctcactgaatcatgctaaagaaatactcagaaatgcagaggaagaggaaagccgggtacgagcacatgcctggaatatgaagttcaatttagcacatgattgtggatactccatttcagaattaaatgaagatgacaggaggaaagtagaagagatcaaggcagagttatttggtcatggaagaacaactgacttgtccaaggggttgcaatcctag

SEQ ID NO: 1723 - DNA, 2028 bp, Homo sapiens
  source 1..2028: mol_type = unassigned DNA
aaatggcggccccggcaggcggcggaggctccgcggtgtcggtgctggccccgaacggccggcgccacacggtgaaggtgacgccgagcaccgtgctgcttcaggttctggaggacacgtgccggcggcaggacttcaacccctgtgaatatgatctgaagtttcagaggagcgtgctcgacctttctctccagtggagatttgccaacctgcccaacaatgccaagctggagatggtgcccgcttcccggagccgtgaggggcctgagaacatggttcgcatcgctttgcagctggacgatggctcgaggttgcaggactctttctgttcaggccagaccctctgggagcttctcagccattttccacagatcagggagtgcctgcagcaccccggcggggccaccccagtctgcgtgtacacgagggatgaggtgacgggtgaagctgccctgcggggcacgacgctgcagtcgctgggcctgaccgggggcagcgccaccatcaggtttgtcatgaagtgctacgaccccgtgggcaagaccccaggaagcctgggctcgtcagcgtcggctggccaggcagccgccagcgctccacttcccttggaatctggggagctcagccgcggcgacttgagccgtccggaggacgcggacacctcagggccctgctgcgagcacactcaggagaagcagagcacaagggcacccgcagctgccccctttgttcctttctcgggtgggggacagagactggggggccctcctgggcccacgaggcctctgacatcatcttcagctaagttgccgaagtccctctccagccctggaggcccctccaagccaaagaagtccaagtcgggccaggatccccagcaggagcaggagcaggagcgggagcgggatccccagcaggagcaggagcgggagcggcccgtggaccgggagcccgtggaccgggagccggtggtgtgccaccccgacctggaggagcggctgcaggcctggccagcggagctgcctgatgagttctttgagctgacggtggacgacgtgagaagacgcttggcccagctcaagagtgagcggaagcgcctggaagaagcccccttggtgaccaaggccttcagggaggcgcagataaaggagaagctggagcgctacccaaaggtggctctgagggtcctgttccccgaccgctacgtcctacagggcttcttccgccccagcgagacagtgggggacttgcgagacttcgtgaggagccacctggggaaccccgagctgtcattttacctgttcatcacccctccaaaaacagtcctggacgaccacacgcagaccctctttcagccccagcttggtgaccgggtggctccattcaccctgggtccctcgctgaaacggtgcctgggaccagagcagagaacacgcttgccagtggtaggagatggaggcgacgtggactctgggaggcttcttttttggggtccatccagaggccgagcctctccaagcactggtcagcctccatgccacccagtctgccgaccctcctctccaccatcccctcgtccgagcagtggcgatccctcccgagtcaaggctgggcacaagcacgtggggacaggccgggcgaacctcttcccggccgctctggtgcacttgggagccgaggagccggcaggtgtctacctggagcctggcctgctggagcatgccatctccccatctgcggccgatgtgctggtggccaggtacatgtccagggccgccgggtccccttccccattgccagcccctgaccctgcacctaagtctgagccagctgctgaggagggggcgctggtcccccctgagcccatcccagggacggcccagcccgtgaagaggagcctgggcaaggtgcccaagtggctgaagctgccggccagcaagaggtgagagctgccagcctgaggtgcccactccgccagccacaggaccacctcctctgccagcaggaataaagacttgtgcatccctc

SEQ ID NO: 1724 - DNA, 1841 bp, Homo sapiens
  source 1..1841: mol_type = unassigned DNA
gctgcggccccgccccctggccgcgtggctgcgcgtcctggctgttgccgataaagttgtttgacgccggcccggcggcgggtcacgtgagcggaaaatggcggccccggcaggcggcggaggctccgcggtgtcggtgctggccccgaacggccggcgccacacggtgaaggtgacgccgagcaccgtgctgcttcaggttctggaggacacgtgccggcggcaggacttcaacccctgtgaatatgatctgaagtttcagaggagcgtgctcgacctttctctccagtggagatttgccaacctgcccaacaatgccaagctggagatggtgcccgcttcccggagccgtgaggggcctgagaacatggttcgcatcgctttgcagctggacgatggctcgaggttgcaggactctttctgttcaggccagaccctctgggagcttctcagccattttccacagatcagggagtgcctgcagcaccccggcggggccaccccagtctgcgtgtacacgagggatgaggtgacgggtgaagctgccctgcggggcacgacgctgcagtcgctgggcctgaccgggggcagcgccaccatcaggtttgtcatgaagtgctacgaccccgtgggcaagaccccaggaagcctgggctcgtcagcgtcggctggccaggcagccgccagcgctccacttcccttggaatctggggagctcagccgcggcgacttgagccgtccggaggacgcggacacctcagggccctgctgcgagcacactcaggagaagcagagcacaagggcacccgcagctgccccctttgttcctttctcgggtgggggacagagactggggggccctcctgggcccacgaggcctctgacatcatcttcagctaagttgccgaagtccctctccagccctggaggcccctccaagccaaagaagtccaagtcgggccaggatccccagcaggagcaggagcaggagcgggagcgggatccccagcaggagcaggagcgggagcggcccgtggaccgggagcccgtggaccgggagccggtggtgtgccaccccgacctggaggagcggctgcaggcctggccagcggagctgcctgatgagttctttgagctgacggtggacgacgtgagaagacgcttggcccagctcaagagtgagcggaagcgcctggaagaagcccccttggtgaccaaggccttcagggaggcgcagataaaggagaagctggagcgctacccaaaggtggctctgagggtcctgttccccgaccgctacgtcctacagggcttcttccgccccagcgagacagtgggggacttgcgagacttcgtgaggagccacctggggaaccccgagctgtcattttacctgttcatcacccctccaaaaacagtcctggacgaccacacgcagaccctctttcaggcgaacctcttcccggccgctctggtgcacttgggagccgaggagccggcaggtgtctacctggagcctggcctgctggagcatgccatctccccatctgcggccgatgtgctggtggccaggtacatgtccagggccgccgggtccccttccccattgccagcccctgaccctgcacctaagtctgagccagctgctgaggagggggcgctggtcccccctgagcccatcccagggacggcccagcccgtgaagaggagcctgggcaaggtgcccaagtggctgaagctgccggccagcaagaggtgagagctgccagcctgaggtgcccactccgccagccacaggaccacctcctctgccagcaggaataaagacttgtgcatccctc

SEQ ID NO: 1725 - DNA, 1283 bp, Homo sapiens
  source 1..1283: mol_type = unassigned DNA
aaatggcggccccggcaggcggcggaggctccgcggtgtcggtgctggccccgaacggccggcgccacacggtgaaggtgacgccgagcaccgtgctgcttcaggttctggaggacacgtgccggcggcaggacttcaacccctgtgaatatgatctgaagtttcagaggagcgtgctcgacctttctctccagtggagatttgccaacctgcccaacaatgccaagctggagatggtgcccgcttcccggagccgtgaggggcctgagaacatggttcgcatcgctttgcagctggacgatggctcgaggttgcaggactctttctgttcaggccagaccctctgggagcttctcagccattttccacagatcagggagtgcctgcagcaccccggcggggccaccccagtctgcgtgtacacgagggatgaggtgacgggtgaagctgccctgcggggcacgacgctgcagtcgctgggcctgaccgggggcagcgccaccatcaggtttgtcatgaagtgctacgaccccgtgggcaagaccccaggaagcctgggctcgtcagcgtcggctggccaggcagccgccagcgctccacttcccttggaatctggggagctcagccgcggcgacttgagccgtccggaggacgcggacacctcagggccctgctgcgagcacactcaggagaagcagagcacaagggcacccgcagctgccccctttgttcctttctcgggtgggggacagagactggggggccctcctgggcccacgaggcctctgacatcatcttcagctaagttgccgaagtccctctccagccctggaggcccctccaagccaaagaagtccaagtcgggccaggatccccagcaggagcaggagcaggagcgggagcgggatccccagcaggagcaggagcgggagcggcccgtggaccgggagcccgtggaccgggagccggtggtgtgccaccccgacctggaggagcggctgcaggcctggccagcggagctgcctgatgagttctttgagctgacggtggacgacgtgagaagacgcttggcccagctcaagagtgagcggaagcgcctggaagaagcccccttggtgaccaaggccttcagggaggcgcagataaaggagaagctggagcgctacccaaagagacggagtctctctctgtcgcccaggctggagtcagtggtgccatctcagctcactgcaagctccgcctcccgggttcaagtggttctcctgcctcagcctcccaagtag

SEQ ID NO: 1726 - DNA, 1445 bp, Homo sapiens
  source 1..1445: mol_type = unassigned DNA
gtattaaagggaccggagcggggcagttcccgacgccgcagcgctcgctttcccttccctcctctctggccctccctcctcccacccactggctccctcccccagcgctctccagtttctgtgccccaggagctacgcgacagtcttccaggattatggagtttctgagcgagaagtttgccctcaagagccctccgagtaaaaacagtgacttttacatgggcgcaggaggtcctctggagcacgttatggagacgctggacaatgagtccttttacagcaaagcgtctgcaggcaaatgcgtgcaggccttcggacccctgccccgcgccgagcatcacgtgcgcttggagaggacctcgccctgtcaggacagcagcgtgaactatgggatcactaaagtagaaggacagccccttcacaccgaactgaatagagctatggacaactgtaacagtctccgaatgtctcccgtgaaagggatgcaagagaagggagagctggatgaacttggggataaatgtgatagcaatgtatccagcagtaagaaacggaggcaccgaaccaccttcaccagtttgcagctagaggagctggagaaagtctttcagaaaactcattacccggatgtgtatgtcagagaacagcttgctctgaggacagagctcactgaggccagggtccaggtttggtttcaaaatcgaagggccaaatggagaaaaagggaacgttatggccaaatacaacaagcgaaaagccattttgctgccacctatgatatatcagttttgccaaggactgacagctacccacagattcagaacaatttgtgggcaggaaatgcaagtggtggttctgtggttacttcatgcatgttaccacgtgacacttcctcctgtatgacaccttattctcactcgcctcggacagattccagttacacggggttttcaaaccaccagaaccagttcagccacgtgcccctcaacaattttttcactgactctcttcttactggggcaaccaatggacatgcatttgaaacaaagccagagtttgaaaggaggtcttccagtatcgcagttcttcgaatgaaagccaaggagcacaccgccaatatttcatgggccatgtaacatacagtactcttttatttttcttttaatagcaaagttaaacattcttatttctcatatttaaaggataccacaataagctgctgtgtgtggaattgctaaaggtcaagatattcagtgagaccagcttaaatgaatagttgttatttaacattaaaatctaagaatgaacctctgaaaagactaaataggtttaccatgtgccagtctccacaaaccctgttttagtagtaaggttttctttttctattgtacaagtcaatgaaatatgatcacgcaacttattaaagaataaatgtgttaaacaaa

SEQ ID NO: 1727 - DNA, 1771 bp, Homo sapiens
  source 1..1771: mol_type = unassigned DNA
atggaccccgagcactgcgcgcctttccgcgtggggcctgcacccggcccctatgtggcctcgggggacgagcctccgggcccgcagggaacccccgccgctgcgcctcacctgcaccccgcgccgccccgcggcccgcggctgacccgctttccggcctgcgggcccctggagccctacctcccagagccggccaagccgcccgccaagtacctgcaggacctcgggcccggcccggccctcaacggcggccacttctacgagggccccgcggaagctgaggagaagacctccaaagctgccagcttcccccagctgcccttggactgccgagggggccccagagacgggccctctaacttgcaaggctccccaggcccctgcctggccagcctgcatcttcctctttccccgggactccctgactccatggagttggccaagaacaagagcaagaagcgtcgtaaccgcacgaccttcagcacattccagctggaggagctggagaaggtcttccagaaaacccactatcctgatgtgtatgcccgggagcagctggccctgcgcacagacctgactgaggcccgggtacaggtctggttccagaaccgcagagccaagtggcggaagcgcgagcgttatgggaagatccaggaggggcggaaccccttcacggctgcctatgacatctctgtgctgccccgtactgacagccaccctcagctgcagaactccctgtgggccagtccaggatctgggagccctggaggcccctgccttgtgtctccagagggcatcccctccccatgcatgtctccatattcccacccccatgggagtgtggctggcttcatgggggtgccagccccttctgcggctcaccctggcatctactccatccatggctttccccccaccctggggggccacagctttgagccttcctcagatggtgactataagtctccaagcctcgtctcgctcagggtaaagcccaaggagccacccggccttctgaactggaccacgtgatcggttgcatggacctgcagaatgagctgcccacctctttttccattcccagtcgctcccagcccacctctgcctccaagccccagatggttctggaggctgcgagagcagctggcactgtcagcccccagcagggaacacgttacagggtcttttctcttagaacaaggtggggctgcctaggagaaggggcttcgaagcagccaggactcttcctaccacaaactgagtcccctcacctgaactctgggctggaggcagggagacactgccctgcttcctccagactttgtccaagtccattgtcatctctccagctaagacagcttacttggctcatcgttcagggaacccaggaaaatgggaggagaacgccgcgtggactgaagctcttcatgatgagatggaaaccaaaagggagtctcccatgatggggtggagtcagccctgcttcccctccccaccagcagggggcgcactggtgtctgacactaaggagggtgtaaaggccaaggtcagcatagactgaggcacactggctcctcagctccagccaccctcactcctgccatgtgcctgcactcccagcatgccatgcagtcatcttcccctccaagggggcagaaattccaccagaaatcaccacatatttggaatctcttccacgggaccagcccagagctatgccatggaaatgatattggatgttggtaagaataaaacagatttctacagactg

SEQ ID NO: 1728 - DNA, 5750 bp, Homo sapiens
  source 1..5750: mol_type = unassigned DNA
gcacagccacagcctcctcgcctccccaaactcccagccaaggcgcgcggtggcgtcctcgcgccctcgctcgcgtccccgcccgccgcctgcgcaagccaggcatgaatgctgagacttgcgtctcttactgcgagtcgccggccgctgccatggacgcctactacagcccggtgtcgcagagtcgggagggctcgtcgccttttagggcatttcccggaggcgacaagttcggcacaactttcctgtcggccgccgccaaagcacagggattcggggacgccaagagccgggcccgttacggcgctgggcagcaggacctggcgacacccctggagagtggagctggggcgcggggctcctttaacaagttccagccccagccgtcgaccccgcagccccagccgccgccgcagccgcagccgcagcagcagcagccgcagccccagccgcccgcgcaaccgcatctttacttgcagcgaggcgcctgcaagacgcccccggacggcagcctcaaactccaggaaggcagcagcggccacagcgcggccttgcaggttccctgctacgctaaagagagctccctgggtgagccagagttaccccctgactctgacactgtggggatggacagcagctacctgagtgtcaaggaggctggggtgaaggggccccaggaccgggccagctcagacctccccagcccattggagaaggccgactcagagagcaacaagggcaagaagcggcggaaccggaccaccttcaccagctaccagctggaggagctggagaaggtcttccagaagacccactacccagacgtgtatgcgcgggaacagctggccatgaggacagacctcactgaggcccgcgtgcaggtctggttccagaaccgaagggccaagtggaggaagcgggagcgttttgggcagatgcagcaggttcgaacccacttctccactgcatatgagctgcccctcctcacccgagctgagaactacgcccagattcagaacccgtcctggctcggcaacaacggggctgcctcaccagtgccagcctgcgtggtcccctgcgacccggtgcctgcctgcatgtcccctcatgcccacccccctggctctggggccagcagcgtcaccgacttcctgagtgtgtctggggctggcagtcacgtgggccagacgcacatgggcagcctgtttggagcagccagcctcagcccaggcctcaatggctacgagctcaacggcgagccggaccgcaagacctcgagcatcgcggccctccgcatgaaggccaaggagcacagtgcggccatttcctgggccacatgacagggcacccctgccccgtccccacctcgggacaccatgggccacgcccatgttttccaggcccccagcctcccactcgactttcctcttaggaacctggcctgggccaggggcctgaccctcagcactttcagccgccccaagtctgaggccccgtggactgctgggagggagggggcagcaggcccctggcccctccctggcactgaggccctgacccctgctcccggccacaggcagtggagaaagccaggtggccacgtttttcagcttcgcatccatgataagctgaaagcgctttcttgctcccgcccactcctctgctctgcctagttgaccatgagtcaatgctagatttccatgcagacccagcagcctcaccagcccagtcttgtccatccttcccgctcctagtggggtcccctggtcaccaggccggtggctgtgtgtctgaagcacaggctgccctgcagagccagcctcctgccctcccatctttctctccctgaaagcacacggaatccgacctgctggggccaaggcgccagcctccacctccccccgaacagtgacgagtctgacagagcctggctgactgcatcctggctgtcccctaggctggatacacctggagagagtgggcagaggatgacaggagctggagccgaggacccctgctgccatctagcaatgccagtccccaggggagacacgggccagcccctcactggacactataggggaggagccagacctgagggaggctgagaacacagatgccacaagggctcccatggtgctagaagaaggaaaggtcctgggagagggggaggcatccgggtggggcgtgggcccgggcagtcctcccgctctccggcctgcctggcatctggtacagcggggaggtctgggcagctttgttctccatccagagcccagtcaggttccctccaggaggatgcggaggggctcgtctcttccctgccctaccctggcccctccctggggctgctcagcagtgtcccggcatggaaggactcacaacttcggaacacataagctagagcttgggggccgggtggcagagggtcaaaagctgcgtgcaggctttgctagaggacgtgtggccatgctcggcctccaggccctgctatggcctcaaactgactgtcctccctgccatatctgtcagtgtcatcgctgcccagagccttccacggcagatgggggctctgtgtccctccaggcactaggaggtgttgctcttctccacacagctttccacactccgtccttacacttcttccacagggaccaggactctctgccctctctccagcctgcggaagggctcctggcctgggctcctcggtgtggctttgctattgcaaatggggctgtcaggatgccctcctgaaaccaggcttcctgcctccaggaagcggggctctgtgcctgcctgcccgacccctgtagcttgggtctggccctgagccccagccctcacctcagctgggagtacacagtaaccgtccagaggcaggcctgtcagaccccaggtggggggtccctccagcaggcagcgccccgcattgaagcgctcgccttttctaccttctcccttgattcctgtcatggagtagggccaggcccactatgctcagggtcgtggacacagaaaggcctcctgggttgggcggagggtaaacttggtgttgttgaatgagggtctctggggttgggggtgacagtctcccgcctgcctggtgttctcatctgctctagaaaccaggctgaggaagggtctggctgtggcctcccttaatgagtcagacctctttgtgaaccgtagctctaaaatggatcttatagaggtgaaagggtcttggacattgaattaaatgttcttggaggcttggctttaagtgtttcaaatatttgaggatttggagtgacttttgggaagttttttctagttctgaggttcgctgaaatgacccagactcccccaaaatctagccagggaaaggaagaacttaaggctgggaacagtttccccatttctcccccctttccttctgaaatgctcatggctgaggaaggatggggaaggaaggaactttcaccttgggtctttctcacccatgagagaatcaggacaaagaggaggagagccaggtagctccagagtgggccaggagggagagcaagggaatcaggacaaagaggaggacagacaggtagctccagagcaggcagggagggagagtgagagctttaagggggctcttccgcagtggcccccggcactcagttcctccatgcgtctgctctctggctgggctagacccaagtcaggcaaatttcaacccaaaagcttgagaagaaaaggcgtctattagaagactctgtggctatggctgcctgtcccaacacacccaggaagtgtctaggattaaacatgccaatgtgaaacattcctgttcatctcgtcaaaggcagccacgtaccccaggcctgtcctctgtggcttggcccagcccttgggggccacctaaccacactaagtatgataggaccaccgagttgggaggaagcttagaaaccctctagttagtccagtcccttcacaacagagaagaccctggcccagagtggagacatgactgccctgacctgtacttgccctgagactaggctgagagaggagcctgggacgtgccacccagggtgtgagggcctgggcttcgttggcaccaggggcggccggtgctgcatggagctcccctctccaatgcctcatgggcattcactcagcagctcagttctccagaagagaaccttggggcccagtcccttccaagacaggtggctaggcccaaccttctgcactgcagagcagggggccactgccgtgtcagctcctaggatgactgagcaagtcagggcagctgcccaaggccatctggagctaaagctcatgaaggcaggtggagagaagcatctacctgccacgtggttcattgctatgcgaataagctaagagaggtgaggatttcctttggatacctgcctaagatctcaacagagatggcaacttaaaaataaagtcgtgggtagccggcagatggatgggcagcctccccacactgacagcctccagtccctgctgggcacaggtctcagcatggcaaggcttgacactaaggtgctgctactgccctccagatgccagcactactcctggggcatgggagcgagggctctggggggcacacagagaggcttgtctccaaggctgaaatagcacttggaggacatgggcttttagaactttccttgaattcttttaactatacttgattctcagcgctcactaccgtgcctccagcttcgggaagcacggtggccaggttagctcaaagacactgcgatggggtaggtgcagcaagtgtggggtgggtccccagcacacacagctgtgatcacactggacccagctccgtgccccatctcctgtcatttcggctgggcagacgagggacgcttccatgaaaactacgtaccctgcttatgcagtcattccctccctgggctagacagtggggggccatcttcgagaacctgaaagacacgcgggggttcctggtctgtttcatggcccttactgtccagtgcaaaggcaaacaggcctagctgggggaggatggttggtaaactggcccccaggataatactctgtgactatccagttaaaaaataagaaggtgacaatgacccatcaaccccacttcacttctttcaggatgctgtagggaggaaaggtgcttccatgacctaacctcggcctctcctttcttccctcttcactcacacacatagagctaggcctttatactactgattttgaaggacagttttcaatgtctaatcatctgtttaggtgtgcagtggttgaaaaaagaaagctgagtgctagaaggaacatgaacctcaaccgttacttattgttctcattgtaagatattttaaccctgtataaatgcaacttttcctttagcttaatggcctggggtggaatattaaaaatatatattaaaaatacagtaaaaatccagaaaaatgtaaaaaaaaaaatgaggtcggttccataaagttttactgcctataccaccatgtaactacattatagcaaaatattaaaagaaacgttcttgccttttaaagtaagttattgcacttacatcttttttgggagaggaggaacacggatgggaaggagatgtaggggcccaggcatggggcaaaatggagtgcagaggtagccgggcactcccagaacaccctttgctggcccagcccaaactgtttggttgttgttatttgcaataaactccttctccttcctcc

SEQ ID NO: 1729 - DNA, 1037 bp, Homo sapiens
  source 1..1037: mol_type = unassigned DNA
tttaaatttcttctacaaacacatacatcattgaagggtaaaatttttcaccagagtaaacttgagaaaccaactggaccttgagtattgtacattttgcctcgtggacccaaaggtagcaatctgaaacatgaggagtacgattctactgttttgtcttctaggatcaactcggtcattaccacagctcaaacctgctttgggactccctcccacaaaactggctccggatcagggaacactaccaaaccaacagcagtcaaatcaggtctttccttctttaagtctgataccattaacacagatgctcacactggggccagatctgcatctgttaaatcctgctgcaggaatgacacctggtacccagacccacccattgaccctgggagggttgaatgtacaacagcaactgcacccacatgtgttaccaatttttgtcacacaacttggagcccagggcactatcctaagctcagaggaattgccacaaatcttcacgagcctcatcatccattccttgttcccgggaggcatcctgcccaccagtcaggcaggggctaatccagatgtccaggatggaagccttccagcaggaggagcaggtgtaaatcctgccacccagggaaccccagcaggccgcctcccaactcccagtggcacagatgacgactttgcagtgaccacccctgcaggcatccaaaggagcacacatgccatcgaggaagccaccacagaatcagcaaatggaattcagtaagctgtttcaaattttttcaactaagctgcctcgaatttggtgatacatgtgaatctttatcattgattatattatggaatagattgagacacattggatagtcttagaagaaattaattcttaatttacctgaaaatattcttgaaatttcagaaaatatgttctatgtagagaatcccaacttttaaaaacaataattcaatggataaatctgtctttgaaatataacattatgctgcctggatgatatgcatattaaaacatatttggaaaactg

SEQ ID NO: 1730 - DNA, 761 bp, Homo sapiens
  source 1..761: mol_type = unassigned DNA
tttcaccagagtaaacttgagaaaccaactggaccttgagtattgtacattttgcctcgtggacccaaaggtagcaatctgaaacatgaggagtacgattctactgttttgtcttctaggatcaactcggtcattaccactcaaacctgctttgggactccctcccacaaaactggctccggatcagggaacactaccaaaccaacagcagtcaaatcaggtctttccttctttaagtctgataccattaacacagatgctcacactggggccagatctgcatctgttaaatcctgctgcaggaatgacacctggtacccagacccacccattgaccctgggagggttgaatgtacaacagcaactgcacccacatgtgttaccaatttttgtcacacaacttggagcccagggcactatcctaagctcagaggaattgccacaaatcttcacgagcctcatcatccattccttgttcccgggaggcatcctgcccaccagtcaggcaggggctaatccagatgtccaggatggaagccttccagcaggaggagcaggtgtaaatcctgccacccagggaaccccagcaggccgcctcccaactcccagtggcacagatgacgactttgcagtgaccacccctgcaggcatccaaaggagcacacatgccatcgaggaagccaccacagaatcagcaaatggaattcagtaagctgtttcaaattttttcaactaagctgcctcgaatttggtgatacatg

SEQ ID NO: 1731 - DNA, 2649 bp, Homo sapiens
  source 1..2649: mol_type = unassigned DNA
tctgattgacttcaagaaggagtcagagatcagcttaagggcaaaggctggaagcagagcgaactgggagcagagcacacagagccgtggagcgagagatgccggccctgggctgggccgtggctgccatcctgatgctgcagacggccatggcggagccctccccggggactctgcccaggaaggcaggggtgttttcagacctaagcaaccaagagctgaaggcagtgcacagcttcctctggtccaagaaggagctgaggctgcagccctccagtaccaccaccatggccaagaacaccgtgtttctcatcgagatgctgctgcccaagaagtaccatgtgctgaggtttctggataaaggtgaaaggcatcctgtgcgggaagcccgtgccgtcatcttctttggtgaccaggagcatcccaatgtcaccgagtttgctgtggggcccctgccagggccctgctacatgcgagcactgtcccccaggcctgggtaccagtcctcctgggcatcgaggcccatctccacagcagagtatgccctcctctaccacaccctgcaggaagccaccaagcccctgcatcagttcttcctcaataccacaggcttctcattccaagactgccatgacagatgcctggccttcaccgatgtggccccccggggtgtggcttctggccagcgccgcagttggcttatcatacagcgctatgtagaaggctactttctgcaccccactgggctggagctcctcgtggatcatgggagcacagatgctgggcactgggccgtggagcaggtgtggtacaacgggaagttctatgggagcccagaggaactggctcggaagtatgcagatggagaggtggacgtggtggtcctggaggacccgctgcctgggggcaaggggcatgacagcacagaggagccgcccctcttctcctcccacaagccccgcggggacttccccagccccatccatgtgagcggcccccgcttggtccagccccacggccctcgcttcaggctggagggcaacgctgtgctctacggcggctggagctttgccttccggctgcgctcctcctccgggctgcaggtcctgaacgtgcacttcggcggagagcgcattgcctatgaggtcagcgtgcaagaggcagtggcgctgtatggaggacacacacctgcaggcatgcagaccaagtacctcgatgtcggctggggcctgggcagcgtcactcatgagttagcccccggcatcgactgcccggagaccgccaccttcctggacactttccactactatgatgccgatgacccggtccattatccccgagccctctgcctctttgaaatgcccacaggggtgccccttcggcggcactttaattccaactttaaaggtggcttcaacttctatgcggggctgaagggccaggtgctggtgctgcggacaacttcaactgtctacaattatgattacatttgggactttatcttctaccccaacggggtgatggaggccaagatgcatgccactggctacgtccacgccaccttctacacccccgaggggctgcgccacggcactcgcctgcacacccacctgattggcaacatacacactcacttggtgcactaccgcgtagacctggatgtggcaggcaccaagaacagcttccagacactgcagatgaagctagaaaacatcaccaacccctggagcccaagacaccgcgtggtccagccaactctggagcagacgcagtactcctgggagcgccaggcggccttccgcttcaaaaggaagctgcctaagtacctgctctttaccagcccccaggagaacccctggggccacaagcgcacgtaccgcctgcagatccactccatggccgaccaggtgctgcccccaggctggcaggaggagcaggccatcacctgggcaaggtaccccctggcagtgaccaagtaccgggagtcggagctgtgcagcagcagcatctaccaccagaacgacccctggcacccgcccgtggtctttgagcagtttcttcacaacaacgagaacattgaaaatgaggacctggtggcctgggtgacggtgggcttcctgcacatcccccactcagaggacattcccaacacagccacacctgggaactccgtgggcttcctgctccggccattcaacttcttcccagaggacccctccctggcatccagagacactgtgatcgtgtggcctcgggacaacggccccaactacgtccagcgctggatccctgaggacagggactgctcgatgcctcccccttttagctacaatgggacctatagacctgtgtgaccagcccccagttcctcccccagttcctcccaggaagcccaggagcctcactggggcagacaataaaccctcagagcctcgctctgtgtgctgcttcttgcggggaggcacagggccatgtgtgtaggaaacacacgaacagacgtgcacacacacagacgtgcacacacacacagacatgcacacacacacagacgtgcacacacacagacgtgcacgcactcacacggacatgcacacacatggcatgtactttattcacactggtctactgcagtccagaaaagccaccatt

SEQ ID NO: 1732 - DNA, 2453 bp, Homo sapiens
  source 1..2453: mol_type = unassigned DNA
gggcaaaggctggaagcagagcgaactgggagcagagcacacagagccgtggagcgagagatgccggccctgggctgggccgtggctgccatcctgatgctgcagacggccatggcggagccctccccggggactctgcccaggaaggcaggggtgttttcagacctaagcaaccaagagctgaaggcagtgcacagcttcctctggtccaagaaggagctgaggctgcagccctccagtaccaccaccatggccaagaacaccgtgtttctcatcgagatgctgctgcccaagaagtaccatgtgctgaggtttctggataaaggtgaaaggcatcctgtgcgggaagcccgtgccgtcatcttctttggtgaccaggagcatcccaatgtcaccgagtttgctgtggggcccctgccagggccctgctacatgcgagcactgtcccccaggcctgggtaccagtcctcctgggcatcgaggcccatctccacagcagagtatgccctcctctaccacaccctgcaggaagccaccaagcccctgcatcagttcttcctcaataccacaggcttctcattccaagactgccatgacagatgcctggccttcaccgatgtggccccccggggtgtggcttctggccagcgccgcagttggcttatcatacagcgctatgtagaaggctactttctgcaccccactgggctggagctcctcgtggatcatgggagcacagatgctgggcactgggccgtggagcaggtgtggtacaacgggaagttctatgggagcccagaggaactggctcggaagtatgcagatggagaggtggacgtggtggtcctggaggacccgctgcctgggggcaaggggcatgacagcacagaggagccgcccctcttctcctcccacaagccccgcggggacttccccagccccatccatgtgagcggcccccgcttggtccagccccacggccctcgcttcaggctggagggcaacgctgtgctctacggcggctggagctttgccttccggctgcgctcctcctccgggctgcaggtcctgaacgtgcacttcggcggagagcgcattgcctatgaggtcagcgtgcaagaggcagtggcgctgtatggaggacacacacctgcaggcatgcagaccaagtacctcgatgtcggctggggcctgggcagcgtcactcatgagttagcccccggcatcgactgcccggagaccgccaccttcctggacactttccactactatgatgccgatgacccggtccattatccccgagccctctgcctctttgaaatgcccacaggggtgccccttcggcggcactttaattccaactttaaaggtggcttcaacttctatgcggggctgaagggccaggtgctggtgctgcggacaacttcaactgtctacaattatgattacatttgggactttatcttctaccccaacggggtgatggaggccaagatgcatgccactggctacgtccacgccaccttctacacccccgaggggctgcgccacggcactcgcctgcacacccacctgattggcaacatacacactcacttggtgcactaccgcgtagacctggatgtggcaggcaccaagaacagcttccagacactgcagatgaagctagaaaacatcaccaacccctggagcccaagacaccgcgtggtccagccaactctggagcagacgcagtactcctgggagcgccaggcggccttccgcttcaaaaggaagctgcctaagtacctgctctttaccagcccccaggagaacccctggggccacaagcgcacgtaccgcctgcagatccactccatggccgaccaggtgctgcccccaggctggcaggaggagcaggccatcacctgggcaaggactgaggggggccagcccagggccctgagccaagctgcttcgcctgtgcctggcaggtaccccctggcagtgaccaagtaccgggagtcggagctgtgcagcagcagcatctaccaccagaacgacccctggcacccgcccgtggtctttgagcagtttcttcacaacaacgagaacattgaaaatgaggacctggtggcctgggtgacggtgggcttcctgcacatcccccactcagaggacattcccaacacagccacacctgggaactccgtgggcttcctgctccggccattcaacttcttcccagaggacccctccctggcatccagagacactgtgatcgtgtggcctcgggacaacggccccaactacgtccagcgctggatccctgaggacagggactgctcgatgcctcccccttttagctacaatgggacctatagacctgtgtgaccagcccccagttcctcccccagttcctcccaggaagcccaggagcctcactggggcagacaataaaccctcagagcctc

SEQ ID NO: 1733 - DNA, 2249 bp, Homo sapiens
  source 1..2249: mol_type = unassigned DNA
gcaaaggctggaagcagagcgaactgggagcagagcacacagagccgtggagcgagagatgccggccctgggctgggccgtggctgccatcctgatgctgcagacggccatggcggagccctccccggggactctgcccaggaaggcaggggtgttttcagacctaagcaaccaagaggtgaaaggcatcctgtgcgggaagcccgtgccgtcatcttctttggtgaccaggagcatcccaatgtcaccgagtttgctgtggggcccctgccagggccctgctacatgcgagcactgtcccccaggcctgggtaccagtcctcctgggcatcgaggcccatctccacagcagagtatgccctcctctaccacaccctgcaggaagccaccaagcccctgcatcagttcttcctcaataccacaggcttctcattccaagactgccatgacagatgcctggccttcaccgatgtggccccccggggtgtggcttctggccagcgccgcagttggcttatcatacagcgctatgtagaaggctactttctgcaccccactgggctggagctcctcgtggatcatgggagcacagatgctgggcactgggccgtggagcaggtgtggtacaacgggaagttctatgggagcccagaggaactggctcggaagtatgcagatggagaggtggacgtggtggtcctggaggacccgctgcctgggggcaaggggcatgacagcacagaggagccgcccctcttctcctcccacaagccccgcggggacttccccagccccatccatgtgagcggcccccgcttggtccagccccacggccctcgcttcaggctggagggcaacgctgtgctctacggcggctggagctttgccttccggctgcgctcctcctccgggctgcaggtcctgaacgtgcacttcggcggagagcgcattgcctatgaggtcagcgtgcaagaggcagtggcgctgtatggaggacacacacctgcaggcatgcagaccaagtacctcgatgtcggctggggcctgggcagcgtcactcatgagttagcccccggcatcgactgcccggagaccgccaccttcctggacactttccactactatgatgccgatgacccggtccattatccccgagccctctgcctctttgaaatgcccacaggggtgccccttcggcggcactttaattccaactttaaaggtggcttcaacttctatgcggggctgaagggccaggtgctggtgctgcggacaacttcaactgtctacaattatgattacatttgggactttatcttctaccccaacggggtgatggaggccaagatgcatgccactggctacgtccacgccaccttctacacccccgaggggctgcgccacggcactcgcctgcacacccacctgattggcaacatacacactcacttggtgcactaccgcgtagacctggatgtggcaggcaccaagaacagcttccagacactgcagatgaagctagaaaacatcaccaacccctggagcccaagacaccgcgtggtccagccaactctggagcagacgcagtactcctgggagcgccaggcggccttccgcttcaaaaggaagctgcctaagtacctgctctttaccagcccccaggagaacccctggggccacaagcgcacgtaccgcctgcagatccactccatggccgaccaggtgctgcccccaggctggcaggaggagcaggccatcacctgggcaaggtaccccctggcagtgaccaagtaccgggagtcggagctgtgcagcagcagcatctaccaccagaacgacccctggcacccgcccgtggtctttgagcagtttcttcacaacaacgagaacattgaaaatgaggacctggtggcctgggtgacggtgggcttcctgcacatcccccactcagaggacattcccaacacagccacacctgggaactccgtgggcttcctgctccggccattcaacttcttcccagaggacccctccctggcatccagagacactgtgatcgtgtggcctcgggacaacggccccaactacgtccagcgctggatccctgaggacagggactgctcgatgcctcccccttttagctacaatgggacctatagacctgtgtgaccagcccccagttcctcccccagttcctcccaggaagcccaggagcctcactggggcagacaataaaccctcagagcctc

SEQ ID NO: 1734 - DNA, 945 bp, Homo sapiens
  source 1..945: mol_type = unassigned DNA
gaatctggtcagggtctcaaagatcgttaaaaagccgccaaagtttgcaactcgtcttgagtggctgctcctcccaaacggttctgcctctggtgtcttgttctaggagcggttgaattctctgttttgctgtgggtgccagcctctatcagcccctgccctggtccatctgtcagcttcagagccgtggagcgagagatgccggccctgggctgggccgtggctgccatcctgatgctgcagacggccatggcggagccctccccggggactctgcccaggaaggcaggggtgttttcagacctaagcaaccaagagctgaaggcagtgcacagcttcctctggtccaagaaggagctgaggctgcagccctccagtaccaccaccatggccaagaacaccgtgtttctcatcgagatgctgctgcccaagaagtaccatgtgctgaggtttctggataaaggtgaaaggcatcctgtgcgggaagcccgtgccgtcatcttctttggtgaccaggagcatcccaatgtcaccgagtttgctgtggggcccctgccagggccctgctacatgcgagcactgtcccccaggcctgggtaccagtcctcctgggcatcgaggcccatctccacagcagagtatgccctcctctaccacaccctgcaggaagccaccaagcccctgcatcagttcttcctcaataccacaggcttctcattccaagactgccatgacagatgcctggccttcaccgatgtggccccccggggtgtggcttctggccagcgccgcagttggcttatcatacagcgctatgtagaaggctactttctgcaccccactgggctggagctcctcgtggatcatgggagcacagatgctgggcactgggccgtggagcaggtgtggtacaacgggaagttctatgggagcccagaggaactg

SEQ ID NO: 1735 - DNA, 2857 bp, Homo sapiens
  source 1..2857: mol_type = unassigned DNA
tttggaggagacaagtttgggagcaggaaagccagtaggagtctactgcaggaatttagctttcaaatctgtacctgttgatgagagaacctccaggtttgtcccctactaccaatgatgaggcaaacacagagagaggaacccctttgactaaagctgaattgtaaaggactaaagccctaacttctcttcgaatgacctgcattcaaatcaagagcggttgaattctctgttttgctgtgggtgccagcctctatcagcccctgccctggtccatctgtcagcttcagagccgtggagcgagagatgccggccctgggctgggccgtggctgccatcctgatgctgcagacggccatggcggagccctccccggggactctgcccaggaaggcaggggtgttttcagacctaagcaaccaagagctgaaggcagtgcacagcttcctctggtccaagaaggagctgaggctgcagccctccagtaccaccaccatggccaagaacaccgtgtttctcatcgagatgctgctgcccaagaagtaccatgtgctgaggtttctggataaaggtgaaaggcatcctgtgcgggaagcccgtgccgtcatcttctttggtgaccaggagcatcccaatgtcaccgagtttgctgtggggcccctgccagggccctgctacatgcgagcactgtcccccaggcctgggtaccagtcctcctgggcatcgaggcccatctccacagcagagtatgccctcctctaccacaccctgcaggaagccaccaagcccctgcatcagttcttcctcaataccacaggcttctcattccaagactgccatgacagatgcctggccttcaccgatgtggccccccggggtgtggcttctggccagcgccgcagttggcttatcatacagcgctatgtagaaggctactttctgcaccccactgggctggagctcctcgtggatcatgggagcacagatgctgggcactgggccgtggagcaggtgtggtacaacgggaagttctatgggagcccagaggaactggctcggaagtatgcagatggagaggtggacgtggtggtcctggaggacccgctgcctgggggcaaggggcatgacagcacagaggagccgcccctcttctcctcccacaagccccgcggggacttccccagccccatccatgtgagcggcccccgcttggtccagccccacggccctcgcttcaggctggagggcaacgctgtgctctacggcggctggagctttgccttccggctgcgctcctcctccgggctgcaggtcctgaacgtgcacttcggcggagagcgcattgcctatgaggtcagcgtgcaagaggcagtggcgctgtatggaggacacacacctgcaggcatgcagaccaagtacctcgatgtcggctggggcctgggcagcgtcactcatgagttagcccccggcatcgactgcccggagaccgccaccttcctggacactttccactactatgatgccgatgacccggtccattatccccgagccctctgcctctttgaaatgcccacaggggtgccccttcggcggcactttaattccaactttaaaggtggcttcaacttctatgcggggctgaagggccaggtgctggtgctgcggacaacttcaactgtctacaattatgattacatttgggactttatcttctaccccaacggggtgatggaggccaagatgcatgccactggctacgtccacgccaccttctacacccccgaggggctgcgccacggcactcgcctgcacacccacctgattggcaacatacacactcacttggtgcactaccgcgtagacctggatgtggcaggcaccaagaacagcttccagacactgcagatgaagctagaaaacatcaccaacccctggagcccaagacaccgcgtggtccagccaactctggagcagacgcagtactcctgggagcgccaggcggccttccgcttcaaaaggaagctgcctaagtacctgctctttaccagcccccaggagaacccctggggccacaagcgcacgtaccgcctgcagatccactccatggccgaccaggtgctgcccccaggctggcaggaggagcaggccatcacctgggcaaggtaccccctggcagtgaccaagtaccgggagtcggagctgtgcagcagcagcatctaccaccagaacgacccctggcacccgcccgtggtctttgagcagtttcttcacaacaacgagaacattgaaaatgaggacctggtggcctgggtgacggtgggcttcctgcacatcccccactcagaggacattcccaacacagccacacctgggaactccgtgggcttcctgctccggccattcaacttcttcccagaggacccctccctggcatccagagacactgtgatcgtgtggcctcgggacaacggccccaactacgtccagcgctggatccctgaggacagggactgctcgatgcctcccccttttagctacaatgggacctatagacctgtgtgaccagcccccagttcctcccccagttcctcccaggaagcccaggagcctcactggggcagacaataaaccctcagagcctcgctctgtgtgctgcttcttgcggggaggcacagggccatgtgtgtaggaaacacacgaacagacgtgcacacacacagacgtgcacacacacacagacatgcacacacacacagacgtgcacacacacagacgtgcacgcactcacacggacatgcacacacatggcatgtactttattcacactggtctactgcagtccagaaaagccaccatt

SEQ ID NO: 1736 - DNA, 1314 bp, Homo sapiens
  source 1..1314: mol_type = unassigned DNA
aaaggctggaagcagagcgaactgggagcagagcacacagaggctgaggcaggagaattgcttgaacctgggaggcagaggtagcagtgagccaagatcgcatcactgcactccagcctgggctacagagcaagactgtctcaggaaaaagaaaaaatagtctatttaaagaagaaaaaaaagaggcctggccaatatttaataggagaacacaagaactcacctcatatccttcctgctggctctgggttccgcctgcagcccctgcctcacctgctccctccagagccgtggagcgagagatgccggccctgggctgggccgtggctgccatcctgatgctgcagacggccatggcggagccctccccggggactctgcccaggaaggcaggggtgttttcagacctaagcaaccaagagctgaaggcagtgcacagcttcctctggtccaagaaggagctgaggctgcagccctccagtaccaccaccatggccaagaacaccgtgtttctcatcgagatgctgctgcccaagaagtaccatgtgctgaggtttctggataaaggtgaaaggcatcctgtgcgggaagcccgtgccgtcatcttctttggtgaccaggagcatcccaatgtcaccgagtttgctgtggggcccctgccagggccctgctacatgcgagcactgtcccccaggcctgggtaccagtcctcctgggcatcgaggcccatctccacagcagagtatgccctcctctaccacaccctgcaggaagccaccaagcccctgcatcagttcttcctcaataccacaggcttctcattccaagactgccatgacagatgcctggccttcaccgatgtggccccccggggtgtggcttctggccagcgccgcagttggcttatcatacagcgctatgtagaaggctactttctgcaccccactgggctggagctcctcgtggatcatgggagcacagatgctgggcactgggccgtggagcaggtgtggtacaacgggaagttctatgggagcccagaggaactggctcggaagtatgcagatggagaggtggacgtggtggtcctggaggacccgctgcctgggggcaaggggcatgacagcacagaggagccgcccctcttctcctcccacaagccccgcggggacttccccagccccatccatgtgagcggcccccgcttggtccagccccacggccctcgcttcaggctggagggcaacgctgtgctctacggcggctggagctttgccttccggctgcgctcctcctccgggctgcaggtcctga

SEQ ID NO: 1737 - DNA, 2424 bp, Homo sapiens
  source 1..2424: mol_type = unassigned DNA
acttcaagaaggagtcagagatcagcttaagggcaaaggctggaagcagagcgaactgggagcagagcacacagagccgtggagcgagagatgccggccctgggctgggccgtggctgccatcctgatgctgcagacggccatggcggagccctccccggggactctgcccaggaaggcaggggtgttttcagacctaagcaaccaagagctgaaggcagtgcacagcttcctctggtccaagaaggagctgaggctgcagccctccagtaccaccaccatggccaagaacaccgtgtttctcatcgagatgctgctgcccaagaagtaccatgtgctgaggtttctggataaaggtgaaaggcatcctgtgcgggaagcccgtgccgtcatcttctttggtgaccaggagcatcccaatgtcaccgagtttgctgtggggcccctgccagggccctgctacatgcgagcactgtcccccaggcctgggtaccagtcctcctgggcatcgaggcccatctccacagcagagtatgccctcctctaccacaccctgcaggaagccaccaagcccctgcatcagttcttcctcaataccacaggcttctcattccaagactgccatgacagatgcctggccttcaccgatgtggccccccggggtgtggcttctggccagcgccgcagttggcttatcatacagcgctatgtagaaggctactttctgcaccccactgggctggagctcctcgtggatcatgggagcacagatgctgggcactgggccgtggagcaggtgtggtacaacgggaagttctatgggagcccagaggaactggctcggaagtatgcagatggagaggtggacgtggtggtcctggaggacccgctgcctgggggcaaggggcatgacagcacagaggagccgcccctcttctcctcccacaagccccgcggggacttccccagccccatccatgtgagcggcccccgcttggtccagccccacggccctcgcttcaggctggagggcaacgctgtgctctacggcggctggagctttgccttccggctgcgctcctcctccgggctgcaggtcctgaacgtgcacttcggcggagagcgcattgcctatgaggtcagcgtgcaagaggcagtggcgctgtatggaggacacacacctgcaggcatgcagaccaagtacctcgatgtcggctggggcctgggcagcgtcactcatgagttagcccccggcatcgactgcccggagaccgccaccttcctggacactttccactactatgatgccgatgacccggtccattatccccgagccctctgcctctttgaaatgcccacaggggtgccccttcggcggcactttaattccaactttaaaggtggcttcaacttctatgcggggctgaagggccaggtgctggtgctgcggacaacttcaactgtctacaattatgattacatttgggactttatcttctaccccaacggggtgatggaggccaagatgcatgccactggctacgtccacgccaccttctacacccccgaggggctgcgccacggcactcgcctgcacacccacctgattggcaacatacacactcacttggtgcactaccgcgtagacctggatgtggcaggcaccaagaacagcttccagacactgcagatgaagctagaaaacatcaccaacccctggagcccaagacaccgcgtggtccagccaactctggagcagacgcagtactcctgggagcgccaggcggccttccgcttcaaaaggaagctgcctaagtacctgctctttaccagcccccaggagaacccctggggccacaagcgcacgtaccgcctgcagatccactccatggccgaccaggtgctgcccccaggctggcaggaggagcaggccatcacctgggcaaggtaccccctggcagtgaccaagtaccgggagtcggagctgtgcagcagcagcatctaccaccagaacgacccctggcacccgtggtctttgagcagtttcttcacaacaacgagaacattgaaaatgaggacctggtggcctgggtgacggtgggcttcctgcacatcccccactcagaggacattcccaacacagccacacctgggaactccgtgggcttcctgctccggccattcaacttcttcccagaggacccctccctggcatccagagacactgtgatcgtgtggcctcgggacaacggccccaactacgtccagcgctggatccctgaggacagggactgctcgatgcctcccccttttagctacaatgggacctatagacctgtgtgaccagcccccagttcctcccccagttcctcccaggaagcccaggagcctcactggggcagacaataaaccctcagagcctcgc

SEQ ID NO: 1738 - DNA, 3135 bp, Homo sapiens
  source 1..3135: mol_type = unassigned DNA
gactgggaagacatgaccttacacaccttggttctttaacttgaccttgggaagacagggccagccagcaaggtggctggggagaaggccgaggtccccgggccgcagacgggaattgagggtcaggagccgaagtgaaactggagccggcgccacgagatgcagccctgaagggcacctccacccagtggccctcccccaccccactcccggggccctcctggcccagcgtcaccctgctgcgctaggacctacaagggcggcctctgggagccctctgctttacctcctctcctgggtcaggctgcagaaagaacaagctcctccaccctgcctgctttcaaatctgtacctgttgatgagagaacctccaggtttgtcccctactaccaatgatgaggcaaacacagagagaggaacccctttgactaaagctgaattgtaaaggactaaagccctaacttctcttcgaatgacctgcattcaaatcaagagcggttgaattctctgttttgctgtgggtgccagcctctatcagcccctgccctggtccatctgtcagcttcagagccgtggagcgagagatgccggccctgggctgggccgtggctgccatcctgatgctgcagacggccatggcggagccctccccggggactctgcccaggaaggcaggggtgttttcagacctaagcaaccaagagctgaaggcagtgcacagcttcctctggtccaagaaggagctgaggctgcagccctccagtaccaccaccatggccaagaacaccgtgtttctcatcgagatgctgctgcccaagaagtaccatgtgctgaggtttctggataaaggtgaaaggcatcctgtgcgggaagcccgtgccgtcatcttctttggtgaccaggagcatcccaatgtcaccgagtttgctgtggggcccctgccagggccctgctacatgcgagcactgtcccccaggcctgggtaccagtcctcctgggcatcgaggcccatctccacagcagagtatgccctcctctaccacaccctgcaggaagccaccaagcccctgcatcagttcttcctcaataccacaggcttctcattccaagactgccatgacagatgcctggccttcaccgatgtggccccccggggtgtggcttctggccagcgccgcagttggcttatcatacagcgctatgtagaaggctactttctgcaccccactgggctggagctcctcgtggatcatgggagcacagatgctgggcactgggccgtggagcaggtgtggtacaacgggaagttctatgggagcccagaggaactggctcggaagtatgcagatggagaggtggacgtggtggtcctggaggacccgctgcctgggggcaaggggcatgacagcacagaggagccgcccctcttctcctcccacaagccccgcggggacttccccagccccatccatgtgagcggcccccgcttggtccagccccacggccctcgcttcaggctggagggcaacgctgtgctctacggcggctggagctttgccttccggctgcgctcctcctccgggctgcaggtcctgaacgtgcacttcggcggagagcgcattgcctatgaggtcagcgtgcaagaggcagtggcgctgtatggaggacacacacctgcaggcatgcagaccaagtacctcgatgtcggctggggcctgggcagcgtcactcatgagttagcccccggcatcgactgcccggagaccgccaccttcctggacactttccactactatgatgccgatgacccggtccattatccccgagccctctgcctctttgaaatgcccacaggggtgccccttcggcggcactttaattccaactttaaaggtggcttcaacttctatgcggggctgaagggccaggtgctggtgctgcggacaacttcaactgtctacaattatgattacatttgggactttatcttctaccccaacggggtgatggaggccaagatgcatgccactggctacgtccacgccaccttctacacccccgaggggctgcgccacggcactcgcctgcacacccacctgattggcaacatacacactcacttggtgcactaccgcgtagacctggatgtggcaggcaccaagaacagcttccagacactgcagatgaagctagaaaacatcaccaacccctggagcccaagacaccgcgtggtccagccaactctggagcagacgcagtactcctgggagcgccaggcggccttccgcttcaaaaggaagctgcctaagtacctgctctttaccagcccccaggagaacccctggggccacaagcgcacgtaccgcctgcagatccactccatggccgaccaggtgctgcccccaggctggcaggaggagcaggccatcacctgggcaaggtaccccctggcagtgaccaagtaccgggagtcggagctgtgcagcagcagcatctaccaccagaacgacccctggcacccgcccgtggtctttgagcagtttcttcacaacaacgagaacattgaaaatgaggacctggtggcctgggtgacggtgggcttcctgcacatcccccactcagaggacattcccaacacagccacacctgggaactccgtgggcttcctgctccggccattcaacttcttcccagaggacccctccctggcatccagagacactgtgatcgtgtggcctcgggacaacggccccaactacgtccagcgctggatccctgaggacagggactgctcgatgcctcccccttttagctacaatgggacctatagacctgtgtgaccagcccccagttcctcccccagttcctcccaggaagcccaggagcctcactggggcagacaataaaccctcagagcctcgctctgtgtgctgcttcttgcggggaggcacagggccatgtgtgtaggaaacacacgaacagacgtgcacacacacagacgtgcacacacacacagacatgcacacacacacagacgtgcacacacacagacgtgcacgcactcacacggacatgcacacacatggcatgtactttattcacactggtctactgcagtccagaaaagccaccatt

SEQ ID NO: 1739 - DNA, 3443 bp, Homo sapiens
  source 1..3443: mol_type = unassigned DNA
cacctgggagagccgaggcgagaagcgacacttccctgcggctagcatccttgaaggaccccggcggcgaacagcctcccgcaggacgccctgagaagctctcagccccaggcgagagcgggcgcctggcaggacttaggcgcaggacttggggaagcctaagcaggtctctgccgagcgcagcccagggagcagtaacaaggaagggtcctggaggggaagggaaagaaggcggcagccggcaaggcgaccactcacccccgtacacacccaccccgcccgcccagccaggagccgcggtgcgcctctgggggcgctcgttccttggcgccttctctcccgtgtcccagcaccgctgggctacgggccgggctggtggggtccctggggatgtccagatcaggcatggtggccgagtggcccttctcccaggaccagcgtaaaagctggggttaggcggggcaggggggactcggctcagggtcccccgaggtccaggacgagggaaggcgggcgcagcacccagggactggagaggcggctcccagtgggacccctccagaagtagtgccgggcgccgggcatcctccaggaagaccaggggccgggaaagcctgggaggcgctcgggagaggccactgccaggggctgcgggctgaggcggcgctcagccccgggcgggcgcccgcggaggcggcagcggcggcgccgggcgggcatgccgcgccaccggagctcctttcgggcgcacgcttccctggcgcgggctgcgcgcggctgccgctgctgctgcttccactgctgctgcggactcccatggcggctccgcccggccggggccgccgccgctgccgccagccgcgggctgaatgaatgagccggattggcggagccgggctgcccgcagccgcgctcaccggcccgggacgcttccgcatggcccgcgaggagccggcgcccgcggcgttggcggctgccgggcagcccgggggcggcagaggcggcgagcgggcgctgcaggggccaggggtcgcccgcagggggcggccatcgctgagccgcgctaaactgcacgggctgcggcacatgtgtgccgggcgcacggcggctgggggctccttccagcggcgggcgctgtgggtgctggccttctgtacatccttcggcttgctgctgtcctggtcctcgaaccgcttgctctactggctcagcttcccgtcacacacgcgggtgcaccgcgagtggagccgccagttacccttccccgccgtcactgtgtgcaacaacaacccgctgcgcttcccgcgcctctccaagggggacctctactatgccggccactggctcgggctgctgctgcccaaccgcaccgcgcgcccgcttgtcagcgagctgctgcggggcgacgagccgcgccgccagtggttccgcaagctggcggacttccgcctcttcctgcctccgcgccacttcgagggaatcagcgccgccttcatggaccgcctgggccaccagctggaggacatgctgctctcctgcaagtaccgcggcgagctctgcgggccgcacaacttctcctccgtgtttacaaaatatgggaagtgttacatgtttaactcaggcgaggatggcaaacctctgctcaccacggtcaagggggggacaggcaacgggctggagatcatgctggacattcagcaggatgagtacctgcccatctggggagagacagaggaaacgacatttgaagcaggagtgaaagttcagatccacagtcagtctgagccacctttcatccaagagctgggctttggggtggctccagggttccagacctttgtggccacacaggagcagaggctcacatacctgcccccaccgtggggtgagtgccgatcctcagagatgggcctcgacttttttcctgtttacagcatcaccgcctgtaggattgactgtgagacccgctacattgtggaaaactgcaactgccgcatggttcacatgccaggggatgcccctttttgtacccctgagcagcacaaggagtgtgcagagcctgccctaggtctgttggcggaaaaggacagcaattactgtctctgcaggacaccctgcaacctaacccgctacaacaaagagctctccatggtgaagatccccagcaagacatcagccaagtaccttgagaagaaatttaacaaatcagaaaaatatatctcagagaacatccttgttctggatatattttttgaagctctcaattatgagacaattgaacagaagaaggcgtatgaagttgctgccttacttggtgatattggtggtcagatgggattgttcattggtgctagtatccttacaatactagagctctttgattatatttatgagctgatcaaagagaagctattagacctgcttggcaaagaggaggacgaagggagccacgatgagaatgtgagtacttgtgacacaatgccaaaccactctgaaaccatcagtcacactgtgaacgtgcccctgcagacgaccctggggaccttggaggagattgcctgctgacacccctcgagtcacccagcactccctccaaacagaccttgaggcccaagacccaggacaaggaacagcaagctcaggtgggatggccccagtgctggaaagaagcaagagccccctatgcacacattgcagactagctgcctagacctcgctccggccacgtccaacacgacgcatccttgggccccgccgtgcgtccctcttaggagagatgagtcacactctggaactgtccaagaacgaacctgccatcacatctcactgccagatgtataaagcacctgcatgctcagacttcttgtggcgccacctccacgtctgtcttgtacatgacactcctccacgcggtttccagtgtccacactgctgcccgtgcagtgggaccagattccaggtccaaagtcaccatgaggccaccctggaatcagaactgcacaatcaagagggaacccatgggactctctgctacattcagttcttgtgtcgtttgtgaaagttcttaacctgcccaaaaacccccttttccccaagctgcccatggggcttcggcgccaaaggtgacccgcgccaacctccctcccccccagtgcctatgacggcggcacagcagccagcgggtgggggacgcctgtgttcacccatggtgcccatgtcgttcttctctccctgtgacacagcttgtacagtctgattctttttatctggggtaggggggcttttatgtttgtccgatggagatttgttttgttttgcttcattttatgcttttttattttagttttgatgttctgaggtttgctttggtttttccattttctttggcatttatttattcgtgcttcaaatcacagtcatattaaaagctggtcttgtggaaa

SEQ ID NO: 1740 - DNA, 2414 bp, Homo sapiens
  source 1..2414: mol_type = unassigned DNA
atggacctcaaggaaagccccagtgagggcagcctgcaaccttctagcatccagatctttgccaacacctccaccctccatggcatccgccacatcttcgtgtatgggccgctgaccatccggcgtgtgctgtgggcagtggccttcgtgggctctctgggcctgctgctggtggagagctctgagagggtgtcctactacttctcctaccagcatgtcactaaggtggacgaagtggtggctcaaagcctggtcttcccagctgtgaccctctgtaacctgaatggcttccggttctccaggctcaccaccaatgacctgtaccatgctggggagctgctggccctgctggatgtcaacctgcagatcccggacccccatctggctgacccctccgtgctggaggccctgcggcagaaggccaacttcaagcactacaaacccaagcagttcagcatgctggagttcctgcaccgtgtgggccatgacctgaaggatatgatgctctactgcaagttcaaagggcaggagtgcggccaccaagacttcaccacagtgtttacaaaatatgggaagtgttacatgtttaactcaggcgaggatggcaaacctctgctcaccacggtcaagggggggacaggcaacgggctggagatcatgctggacattcagcaggatgagtacctgcccatctggggagagacagaggaaacgacatttgaagcaggagtgaaagttcagatccacagtcagtctgagccacctttcatccaagagctgggctttggggtggctccagggttccagacctttgtggccacacaggagcagaggctcacatacctgcccccaccgtggggtgagtgccgatcctcagagatgggcctcgacttttttcctgtttacagcatcaccgcctgtaggattgactgtgagacccgctacattgtggaaaactgcaactgccgcatggttcacatgccaggggatgcccctttttgtacccctgagcagcacaaggagtgtgcagagcctgccctaggtctgttggcggaaaaggacagcaattactgtctctgcaggacaccctgcaacctaacccgctacaacaaagagctctccatggtgaagatccccagcaagacatcagccaagtaccttgagaagaaatttaacaaatcagaaaaatatatctcagagaacatccttgttctggatatattttttgaagctctcaattatgagacaattgaacagaagaaggcgtatgaagttgctgccttacttggtgatattggtggtcagatgggattgttcattggtgctagtatccttacaatactagagctctttgattatatttatgagctgatcaaagagaagctattagacctgcttggcaaagaggaggacgaagggagccacgatgagaatgtgagtacttgtgacacaatgccaaaccactctgaaaccatcagtcacactgtgaacgtgcccctgcagacgaccctggggaccttggaggagattgcctgctgacacccctcgagtcacccagcactccctccaaacagaccttgaggcccaagacccaggacaaggaacagcaagctcaggtgggatggccccagtgctggaaagaagcaagagccccctatgcacacattgcagactagctgcctagacctcgctccggccacgtccaacacgacgcatccttgggccccgccgtgcgtccctcttaggagagatgagtcacactctggaactgtccaagaacgaacctgccatcacatctcactgccagatgtataaagcacctgcatgctcagacttcttgtggcgccacctccacgtctgtcttgtacatgacactcctccacgcggtttccagtgtccacactgctgcccgtgcagtgggaccagattccaggtccaaagtcaccatgaggccaccctggaatcagaactgcacaatcaagagggaacccatgggactctctgctacattcagttcttgtgtcgtttgtgaaagttcttaacctgcccaaaaacccccttttccccaagctgcccatggggcttcggcgccaaaggtgacccgcgccaacctccctcccccccagtgcctatgacggcggcacagcagccagcgggtgggggacgcctgtgttcacccatggtgcccatgtcgttcttctctccctgtgacacagcttgtacagtctgattctttttatctggggtaggggggcttttatgtttgtccgatggagatttgttttgttttgcttcattttatgcttttttattttagttttgatgttctgaggtttgctttggtttttccattttctttggcatttatttattcgtgcttcaaatcacagtcatattaaaagctggtcttgtgg

SEQ ID NO: 1741 - DNA, 750 bp, Homo sapiens
  source 1..750: mol_type = unassigned DNA
cggcgagctctgcgggccgcacaacttctcctccgagtcttgagcatccagcggaactgagcagtggtgcgccagggttgggcccttcacctggcctccgtcccccataaaatgtgtttacaaaatatgggaagtgttacatgtttaactcaggcgaggatggcaaacctctgctcaccacggtcaagggggggacaggcaacgggctggagatcatgctggacattcagcaggatgagtacctgcccatctggggagagacagaggaaacgacatttgaagcaggagtgaaagttcagatccacagtcagtctgagccacctttcatccaagagctgggctttggggtggctccagggttccagacctttgtggccacacaggagcagaggctcacatacctgcccccaccgtggggtgagtgccgatcctcagagatgggcctcgacttttttcctgtttacagcatcaccgcctgtaggattgactgtgagacccgctacattgtggaaaactgcaactgccgcatggttcacatgccaggggatgcccctttttgtacccctgagcagcacaaggagtgtgcagagcctgccctaggtctgttggcggaaaaggacagcaattactgtctctgcaggacaccctgcaacctaacccgctacaacaaagagctctccatggtgaagatccccagcaagacatcagccaagtaccttgagaagaaatttaacaaatcagaaaaatata

SEQ ID NO: 1742 - DNA, 4072 bp, Homo sapiens
  source 1..4072: mol_type = unassigned DNA
agacagcctcgcagacactcgtaggcgcgcacgcgcaccctctcccctccccctcccctcccgccgcctcccggccggacgatggatccctgcagatcccagggctgagagcaccgcgcaccgcgccgagcccgggcagaccgagccgaggcgagcgagccagcgagccagcgcgcgcgggcgggcggacagatcggagccgagcggggccgggcggggcgctccctgcagggctctgcgcggcgtgccgcggcggccgcgggctccggccccgggccatgagcccctccgcgactcggcgctgagcccgccaccggtccagcgccccaggacccgccgccggctgccggcttgccgaagccccctcaggatcccctcaacaaggatggaactgaaggccgaggaggaggaggtgggtggcgtccagccggtgagcatccaggccttcgccagcagctccacactgcacggcctggcccacatcttctcctacgagcggctgtctctgaagcgggcactgtgggccctgtgcttcctgggctccctggctgtgctgctgtgtgtgtgcacggagcgtgtgcagtactacttccactaccaccatgtcaccaagctcgacgaggtggctgcctctcagcttaccttccctgctgtcacgctgtgcaacctcaacgagttccgctttagccaagtctccaagaatgacctgtatcatgctggggagctgctggccctgctcaacaacaggtatgagataccagacacacagatggcagatgaaaagcagctggagatactgcaggacaaagccaacttccgcagcttcaaacccaaacccttcaacatgcgtgagttctacgaccgagctgggcacgacattcgagacatgctgctctcctgccacttccggggggaggtctgcagcgctgaagacttcaaggtggtcttcacacgctatggaaagtgctacacgttcaactcgggccgagatgggcggccgcggctgaagaccatgaagggtgggacgggcaatgggctggaaatcatgctggacatccagcaggacgagtacctgcctgtgtggggggagactgacgagacgtccttcgaagcaggcatcaaagtgcagatccatagtcaggatgaacctcctttcatcgaccagctgggctttggcgtggccccaggcttccagacctttgtggcctgccaggagcagcggctcatctacctgcccccaccctggggcacctgcaaagctgttaccatggactcggatttggatttcttcgactcctacagcatcactgcctgccgcatcgactgtgagacgcgctacctggtggagaactgcaactgccgcatggtgcacatgccaggggatgccccatactgtactccagagcagtacaaggagtgtgcagatcctgctctggacttcctggtggagaaggaccaggagtactgcgtgtgtgaaatgccttgcaacctgacccgctatggcaaagagctgtccatggtcaagatccccagcaaagcctcagccaagtacctggccaagaagttcaacaaatctgagcaatacataggggagaacatcctggtgctggacattttctttgaagtcctcaactatgagaccattgaacagaagaaggcctatgagattgcagggctcctgggtgagctgctgatgacacctgtccccttctcatgccatgggcatggcgtggctccctatcatccaaaagcagggtgctcacttctgtcccatgagggtcctccaccccagaggcccttccccaaaccctgttgtcttggtgacatcgggggccagatggggctgttcatcggggccagcatcctcacggtgctggagctctttgactacgcctacgaggtcattaagcacaagctgtgccgacgaggaaaatgccagaaggaggccaaaaggagcagtgcggacaagggcgtggccctcagcctggacgacgtcaaaagacacaacccgtgcgagagccttcggggccaccctgccgggatgacatacgctgccaacatcctacctcaccatccggcccgaggcacgttcgaggactttacctgctgagccccgcaggccgctgaaccaaaggcctagatggggaggactaggagagcgagggggcccccagctgcctcctcacatctgccctggggactccccacactccggggcagatctttcctcttgtctgtggtaaggaaggagtcttgaccatagagtcctctctctgcctctatcccattctttttacatttaacaaaactaatctaaaaaagaactaaaaagggagaacggggcaagggacctcaggctgcccctctctcctccatgctgcctcccctagctcccagcctgaattctgtctatctagctgtctgccatctgagtgtccatctacattctgctgccaccagtcaccaaaggcccttcccagtgaggggtggaagggatctctggggtctggaatttggccccaaaccagagaatgtaccttaagggggagggctagtgtgggggagggaggcttccccagccttaagagaccctctcagcccagtgactgtccccaaacccaagtctcctggcaggaactaaaacctcagccccactctctcacaccatgtggaatctcgtgggggtcggggatccccttaagaagtggtaatggggacaagatgcggccctggtgctgtaggctacatcctgatacctataagttcacccccaccccacagctgctggagagaaatcccaagaggcagcccttcctcaccatcccattaaagaccgggctggttagcgtccagctcagggagaagggcgctagtgcctaacctcactggtccctctcccggaggcccttgtagagggccacgtccataaattttcttatggaactctcccacatcctcttccccaacttcatttgcttctctcaacaacctcatctgcattttctatttctatatgatacagactctatattgctatatctctgtatatactttcccagccctgtctgtctccaccccatcccctcttgtctctgagaaccattctcccaccccaagttccaccttctatgtttctactccctccctggtctctgaatgccttcgcctgtataaagagttggactctctcccctggtgtctgtactgtgtacacacatccctctgagaagcacaaggagacgacacgcgcattgtaacctttgcactgtctcagtggcgacaaaggaagctgtgaatcacaagctctgcctctttctggcctcaccctctcccccaacccgggcaccctcggccctccctgcagccttaacattctcttcccctgctcctcctatcccattgccctctgcccagctgacagtggcatccccagggaaggggttgctgtagagatagcccccacccaggggatggaggtctaccctggacactaagccaagtgtgtcagagacagaagggagctggggattggcgactcctgaagttggggcagtgggatgctgacaggcagaagctgaggtcctcagtcagtggcctttcctccttctgggtgcccagccccctttcctcacctgatacccaagcccaccacttttattttctggtgaggtgggtttgggaggaaagagaggcctagaggaggagttgaaagctctgctgttgtctcaccctatcttaatgagagacaagtgaggtggagggcctgccccccctccctccaccagacactccttccaggcctgagccccaacccctcttcaggccttccttccctagctgtgtcttggtcttcaatcccagaacaggacctgtgagcagctgcattggcctggagctggagagtaaggctgtaggatctttggaatctcttggttcctaagagtttcctcagagatcatacctccccagagggaagcaggaatgaggccaaaaagtgtgcattggataggggaacagcaggcagggctctgggtgacgcatgcctctggtctaataaactgggtttcaacca

SEQ ID NO: 1743 - DNA, 3778 bp, Homo sapiens
  source 1..3778: mol_type = unassigned DNA
gagccagcgagccagcgcgcgcgggcgggcggacagatcggagccgagcggggccgggcggggcgctccctgcagggctctgcgcggcgtgccgcggcggccgcgggctccggccccgggccatgagcccctccgcgactcggcgctgagcccgccaccggtccagcgccccaggacccgccgccggctgccggcttgccgaagccccctcaggatcccctcaacaaggatggaactgaaggccgaggaggaggaggtgggtggcgtccagccggtgagcatccaggccttcgccagcagctccacactgcacggcctggcccacatcttctcctacgagcggctgtctctgaagcgggcactgtgggccctgtgcttcctgggctccctggctgtgctgctgtgtgtgtgcacggagcgtgtgcagtactacttccactaccaccatgtcaccaagctcgacgaggtggctgcctctcagcttaccttccctgctgtcacgctgtgcaacctcaacgagttccgctttagccaagtctccaagaatgacctgtatcatgctggggagctgctggccctgctcaacaacaggtatgagataccagacacacagatggcagatgaaaagcagctggagatactgcaggacaaagccaacttccgcagcttcaaacccaaacccttcaacatgcgtgagttctacgaccgagctgggcacgacattcgagacatgctgctctcctgccacttccggggggaggtctgcagcgctgaagacttcaaggtggtcttcacacgctatggaaagtgctacacgttcaactcgggccgagatgggcggccgcggctgaagaccatgaagggtgggacgggcaatgggctggaaatcatgctggacatccagcaggacgagtacctgcctgtgtggggggagactgacgagacgtccttcgaagcaggcatcaaagtgcagatccatagtcaggatgaacctcctttcatcgaccagctgggctttggcgtggccccaggcttccagacctttgtggcctgccaggagcagcggctcatctacctgcccccaccctggggcacctgcaaagctgttaccatggactcggatttggatttcttcgactcctacagcatcactgcctgccgcatcgactgtgagacgcgctacctggtggagaactgcaactgccgcatggtgcacatgccaggggatgccccatactgtactccagagcagtacaaggagtgtgcagatcctgctctggacttcctggtggagaaggaccaggagtactgcgtgtgtgaaatgccttgcaacctgacccgctatggcaaagagctgtccatggtcaagatccccagcaaagcctcagccaagtacctggccaagaagttcaacaaatctgagcaatacataggggagaacatcctggtgctggacattttctttgaagtcctcaactatgagaccattgaacagaagaaggcctatgagattgcagggctcctgggtgacatcgggggccagatggggctgttcatcggggccagcatcctcacggtgctggagctctttgactacgcctacgaggtcattaagcacaagctgtgccgacgaggaaaatgccagaaggaggccaaaaggagcagtgcggacaagggcgtggccctcagcctggacgacgtcaaaagacacaacccgtgcgagagccttcggggccaccctgccgggatgacatacgctgccaacatcctacctcaccatccggcccgaggcacgttcgaggactttacctgctgagccccgcaggccgctgaaccaaaggcctagatggggaggactaggagagcgagggggcccccagctgcctcctcacatctgccctggggactccccacactccggggcagatctttcctcttgtctgtggtaaggaaggagtcttgaccatagagtcctctctctgcctctatcccattctttttacatttaacaaaactaatctaaaaaagaactaaaaagggagaacggggcaagggacctcaggctgcccctctctcctccatgctgcctcccctagctcccagcctgaattctgtctatctagctgtctgccatctgagtgtccatctacattctgctgccaccagtcaccaaaggcccttcccagtgaggggtggaagggatctctggggtctggaatttggccccaaaccagagaatgtaccttaagggggagggctagtgtgggggagggaggcttccccagccttaagagaccctctcagcccagtgactgtccccaaacccaagtctcctggcaggaactaaaacctcagccccactctctcacaccatgtggaatctcgtgggggtcggggatccccttaagaagtggtaatggggacaagatgcggccctggtgctgtaggctacatcctgatacctataagttcacccccaccccacagctgctggagagaaatcccaagaggcagcccttcctcaccatcccattaaagaccgggctggttagcgtccagctcagggagaagggcgctagtgcctaacctcactggtccctctcccggaggcccttgtagagggccacgtccataaattttcttatggaactctcccacatcctcttccccaacttcatttgcttctctcaacaacctcatctgcattttctatttctatatgatacagactctatattgctatatctctgtatatactttcccagccctgtctgtctccaccccatcccctcttgtctctgagaaccattctcccaccccaagttccaccttctatgtttctactccctccctggtctctgaatgccttcgcctgtataaagagttggactctctcccctggtgtctgtactgtgtacacacatccctctgagaagcacaaggagacgacacgcgcattgtaacctttgcactgtctcagtggcgacaaaggaagctgtgaatcacaagctctgcctctttctggcctcaccctctcccccaacccgggcaccctcggccctccctgcagccttaacattctcttcccctgctcctcctatcccattgccctctgcccagctgacagtggcatccccagggaaggggttgctgtagagatagcccccacccaggggatggaggtctaccctggacactaagccaagtgtgtcagagacagaagggagctggggattggcgactcctgaagttggggcagtgggatgctgacaggcagaagctgaggtcctcagtcagtggcctttcctccttctgggtgcccagccccctttcctcacctgatacccaagcccaccacttttattttctggtgaggtgggtttgggaggaaagagaggcctagaggaggagttgaaagctctgctgttgtctcaccctatcttaatgagagacaagtgaggtggagggcctgccccccctccctccaccagacactccttccaggcctgagccccaacccctcttcaggccttccttccctagctgtgtcttggtcttcaatcccagaacaggacctgtgagcagctgcattggcctggagctggagagtaaggctgtaggatctttggaatctcttggttcctaagagtttcctcagagatcatacctccccagagggaagcaggaatgaggccaaaaagtgtgcattggataggggaacagcaggcagggctctgggtgacgcatgcctctggtctaataaactgggtttcaacca

SEQ ID NO: 1744 - DNA, 3327 bp, Homo sapiens
  source 1..3327: mol_type = unassigned DNA
cctggagaaaatgcccatccagatcttctgctccatgtcattctcctctggagaggaagccccagggcccttgggagatatttggggtccccaccaccatcagcagcagcaggacatctcagaatcggaagaggaggaagaagagaaggaaaaggaggcagtgaggaaggaggccagtgaggggcattcacccatggacttggtggcctttgccaacagctgcaccctccatggcaccaaccacatttttgtggaggggggtccagggccaaggcaggtgctgtgggcggtggcctttgtcctggcactgggtgccttcctgtgccaggtaggggaccgcgttgcttattacctcagctacccacacgtgacccttctaaacgaagtggccaccacggagctggccttcccggcagtcaccctctgcaacactaatgctgtgcggctgtcccagctcagctaccctgacttgctttatttggcccccatgctgggactggatgaaagtgatgaccccggggtgcccctcgctccaccgggccctgaggccttctctggggagccctttaacctgcaccgcttctacaatcgctcctgccaccggctggaggacatgctgctctattgctcctaccaagggggaccctgcggccctcacaacttctcagtggtcttcacacgctatggaaagtgctacacgttcaactcgggccgagatgggcggccgcggctgaagaccatgaagggtgggacgggcaatgggctggaaatcatgctggacatccagcaggacgagtacctgcctgtgtggggggagactgacgagacgtccttcgaagcaggcatcaaagtgcagatccatagtcaggatgaacctcctttcatcgaccagctgggctttggcgtggccccaggcttccagacctttgtggcctgccaggagcagcggctcatctacctgcccccaccctggggcacctgcaaagctgttaccatggactcggatttggatttcttcgactcctacagcatcactgcctgccgcatcgactgtgagacgcgctacctggtggagaactgcaactgccgcatggtgcacatgccaggggatgccccatactgtactccagagcagtacaaggagtgtgcagatcctgctctggacttcctggtggagaaggaccaggagtactgcgtgtgtgaaatgccttgcaacctgacccgctatggcaaagagctgtccatggtcaagatccccagcaaagcctcagccaagtacctggccaagaagttcaacaaatctgagcaatacataggggagaacatcctggtgctggacattttctttgaagtcctcaactatgagaccattgaacagaagaaggcctatgagattgcagggctcctgggtgacatcgggggccagatggggctgttcatcggggccagcatcctcacggtgctggagctctttgactacgcctacgaggtcattaagcacaagctgtgccgacgaggaaaatgccagaaggaggccaaaaggagcagtgcggacaagggcgtggccctcagcctggacgacgtcaaaagacacaacccgtgcgagagccttcggggccaccctgccgggatgacatacgctgccaacatcctacctcaccatccggcccgaggcacgttcgaggactttacctgctgagccccgcaggccgctgaaccaaaggcctagatggggaggactaggagagcgagggggcccccagctgcctcctcacatctgccctggggactccccacactccggggcagatctttcctcttgtctgtggtaaggaaggagtcttgaccatagagtcctctctctgcctctatcccattctttttacatttaacaaaactaatctaaaaaagaactaaaaagggagaacggggcaagggacctcaggctgcccctctctcctccatgctgcctcccctagctcccagcctgaattctgtctatctagctgtctgccatctgagtgtccatctacattctgctgccaccagtcaccaaaggcccttcccagtgaggggtggaagggatctctggggtctggaatttggccccaaaccagagaatgtaccttaagggggagggctagtgtgggggagggaggcttccccagccttaagagaccctctcagcccagtgactgtccccaaacccaagtctcctggcaggaactaaaacctcagccccactctctcacaccatgtggaatctcgtgggggtcggggatccccttaagaagtggtaatggggacaagatgcggccctggtgctgtaggctacatcctgatacctataagttcacccccaccccacagctgctggagagaaatcccaagaggcagcccttcctcaccatcccattaaagaccgggctggttagcgtccagctcagggagaagggcgctagtgcctaacctcactggtccctctcccggaggcccttgtagagggccacgtccataaattttcttatggaactctcccacatcctcttccccaacttcatttgcttctctcaacaacctcatctgcattttctatttctatatgatacagactctatattgctatatctctgtatatactttcccagccctgtctgtctccaccccatcccctcttgtctctgagaaccattctcccaccccaagttccaccttctatgtttctactccctccctggtctctgaatgccttcgcctgtataaagagttggactctctcccctggtgtctgtactgtgtacacacatccctctgagaagcacaaggagacgacacgcgcattgtaacctttgcactgtctcagtggcgacaaaggaagctgtgaatcacaagctctgcctctttctggcctcaccctctcccccaacccgggcaccctcggccctccctgcagccttaacattctcttcccctgctcctcctatcccattgccctctgcccagctgacagtggcatccccagggaaggggttgctgtagagatagcccccacccaggggatggaggtctaccctggacactaagccaagtgtgtcagagacagaagggagctggggattggcgactcctgaagttggggcagtgggatgctgacaggcagaagctgaggtcctcagtcagtggcctttcctccttctgggtgcccagccccctttcctcacctgatacccaagcccaccacttttattttctggtgaggtgggtttgggaggaaagagaggcctagaggaggagttgaaagctctgctgttgtctcaccctatctta

SEQ ID NO: 1745 - DNA, 1718 bp, Homo sapiens
  source 1..1718: mol_type = unassigned DNA
atgaagcccacctcaggcccagaggaggcccggcggccagcctcggacatccgcgtgttcgccagcaactgctcgatgcacgggctgggccacgtcttcgggccaggcagcctgagcctgcgccgggggatgtgggcagcggccgtggtcctgtcagtggccaccttcctctaccaggtggctgagagggtgcgctactacagggagttccaccaccagactgccctggatgagcgagaaagccaccggctcatcttcccggctgtcaccctgtgcaacatcaacccactgcgccgctcgcgcctaacgcccaacgacctgcactgggctgggtctgcgctgctgggcctggatcccgcagagcacgccgccttcctgcgcgccctgggccggccccctgcaccgcccggcttcatgcccagtcccacctttgacatggcgcaactctatgcccgtgctgggcactccctggatgacatgctgctggactgtcgcttccgtggccaaccttgtgggcctgagaacttcaccacgatcttcacccggatgggaaagtgctacacatttaactctggcgctgatggggcagagctgctcaccactactaggggtggcatgggcaatgggctggacatcatgctggacgtgcagcaggaggaatatctacctgtgtggagggacaatgaggagaccccgtttgaggtggggatccgagtgcagatccacagccaggaggagccgcccatcatcgatcagctgggcttgggggtgtccccgggctaccagacctttgtttcttgccagcagcagcagctgagcttcctgccaccgccctggggcgattgcagttcagcatctctgaaccccaactatgagccagagccctctgatcccctaggctcccccagccccagccccagccctccctatacccttatggggtgtcgcctggcctgcgaaacccgctacgtggctcggaagtgcggctgccgaatggtgtacatgccaggcgacgtgccagtgtgcagcccccagcagtacaagaactgtgcccacccggccatagatgccatgcttcgcaaggactcgtgcgcctgccccaacccgtgcgccagcacgcgctacgccaaggagctctccatggtgcggatcccgagccgcgccgccgcgcgcttcctggcccggaagctcaaccgcagcgaggcctacatcgcggagaacgtgctggccctggacatcttctttgaggccctcaactatgagaccgtggagcagaagaaggcctatgagatgtcagagctgcttggtgacattgggggccagatggggctgttcatcggggccagcctgctcaccatcctcgagatcctagactacctctgtgaggtgttccgagacaaggtcctgggatatttctggaaccgacagcactcccaaaggcactccagcaccaatctgcttcaggaagggctgggcagccatcgaacccaagttccccacctcagcctgggccccagcactctgctctgttccgaagacctcccacccctccctgtgccgtcaccaagactctctccgcctcccaccgcacctgctaccttgtcacacagctctagacctgctgtctgtgtcctcggagccccgccctgacatcctggacatgcctagcctgcacgtagcttttccgtcttcaccccaaataaagtcctaatgcatca

SEQ ID NO: 1746 - DNA, 1895 bp, Homo sapiens
  source 1..1895: mol_type = unassigned DNA
acctgaccggccagatcacctcctccaatcctgccaggctagtgcctccctgccttccaaccttggctgtctcccaccctctcttctcctctccttgcctggcctcctgaatcctatcttagcctccttagccccctgactgactctctctcgcttcttccaagcctctgtagctggttccgctcctgggttctggccatgaagcccacctcaggcccagaggaggcccggcggccagcctcggacatccgcgtgttcgccagcaactgctcgatgcacgggctgggccacgtcttcgggccaggcagcctgagcctgcgccgggggatgtgggcagcggccgtggtcctgtcagtggccaccttcctctaccaggtggctgagagggtgcgctactacagggagttccaccaccagactgccctggatgagcgagaaagccaccggctcatcttcccggctgtcaccctgtgcaacatcaacccactgcgccgctcgcgcctaacgcccaacgacctgcactgggctgggtctgcgctgctgggcctggatcccgcagagcacgccgccttcctgcgcgccctgggccggccccctgcaccgcccggcttcatgcccagtcccacctttgacatggcgcaactctatgcccgtgctgggcactccctggatgacatgctgctggactgtcgcttccgtggccaaccttgtgggcctgagaacttcaccacgatcttcacccggatgggaaagtgctacacatttaactctggcgctgatggggcagagctgctcaccactactaggggtggcatgggcaatgggctggacatcatgctggacgtgcagcaggaggaatatctacctgtgtggagggacaatgaggagaccccgtttgaggtggggatccgagtgcagatccacagccaggaggagccgcccatcatcgatcagctgggcttgggggtgtccccgggctaccagacctttgtttcttgccagcagcagcagctgagcttcctgccaccgccctggggcgattgcagttcagcatctctgaaccccaactatgagccagagccctctgatcccctaggctcccccagccccagccccagccctccctatacccttatggggtgtcgcctggcctgcgaaacccgctacgtggctcggaagtgcggctgccgaatggtgtacatgccaggcgacgtgccagtgtgcagcccccagcagtacaagaactgtgcccacccggccatagatgccatgcttcgcaaggactcgtgcgcctgccccaacccgtgcgccagcacgcgctacgccaaggagctctccatggtgcggatcccgagccgcgccgccgcgcgcttcctggcccggaagctcaaccgcagcgaggcctacatcgcggagaacgtgctggccctggacatcttctttgaggccctcaactatgagaccgtggagcagaagaaggcctatgagatgtcagagctgcttggtgacattgggggccagatggggctgttcatcggggccagcctgctcaccatcctcgagatcctagactacctctgtgaggtgttccgagacaaggtcctgggatatttctggaaccgacagcactcccaaaggcactccagcaccaatctgcttcaggaagggctgggcagccatcgaacccaagttccccacctcagcctgggccccagacctcccacccctccctgtgccgtcaccaagactctctccgcctcccaccgcacctgctaccttgtcacacagctctagacctgctgtctgtgtcctcggagccccgccctgacatcctggacatgcctagcctgcacgtagcttttccgtcttcaccccaaataaagtcctaatgcatc

SEQ ID NO: 1747 - DNA, 2232 bp, Homo sapiens
  source 1..2232: mol_type = unassigned DNA
tacaggggttgcaactgggagcctagggggccccaaggcatctccaggcccaatctacctctgggcttttctcaagctctccctaggattactgcggtttcctcctggcgcctctcgtcttggacagccatgcccccctccatgctgcactaatggctcagcctggggccctagggacctctcctaccccccagactgctctgtcggccccctttcccccctactgctgaaacccaatcctctgcagcagcgccggctcagcaccgccggctcagcaccgctccgcagcccctgcctgccacggtcagctacgtcccacctggtctgctgcggagtccccagcccagtgcctagcccagtggagccaccgcctgttcctcgggaaggaacagtgggacctgaccggccagatcacctcctccaatcctgccaggctagtgcctccctgccttccaaccttggctgtctcccaccctctcttctcctctccttgcctggcctcctgaatcctatcttagcctccttagccccctgactgactctctctcgcttcttccaagcctctgtagctggttccgctcctgggttctggccatgaagcccacctcaggcccagaggaggcccggcggccagcctcggacatccgcgtgttcgccagcaactgctcgatgcacgggctgggccacgtcttcgggccaggcagcctgagcctgcgccgggggatgtgggcagcggccgtggtcctgtcagtggccaccttcctctaccaggtggctgagagggtgcgctactacagggagttccaccaccagactgccctggatgagcgagaaagccaccggctcatcttcccggctgtcaccctgtgcaacatcaacccactgcgccgctcgcgcctaacgcccaacgacctgcactgggctgggtctgcgctgctgggcctggatcccgcagagcacgccgccttcctgcgcgccctgggccggccccctgcaccgcccggcttcatgcccagtcccacctttgacatggcgcaactctatgcccgtgctgggcactccctggatgacatgctgctggactgtcgcttccgtggccaaccttgtgggcctgagaacttcaccacgatcttcacccggatgggaaagtgctacacatttaactctggcgctgatggggcagagctgctcaccactactaggggtggcatgggcaatgggctggacatcatgctggacgtgcagcaggaggaatatctacctgtgtggagggacaatgaggagaccccgtttgaggtggggatccgagtgcagatccacagccaggaggagccgcccatcatcgatcagctgggcttgggggtgtccccgggctaccagacctttgtttcttgccagcagcagcagctgagcttcctgccaccgccctggggcgattgcagttcagcatctctgaaccccaactatgagccagagccctctgatcccctaggctcccccagccccagccccagccctccctatacccttatggggtgtcgcctggcctgcgaaacccgctacgtggctcggaagtgcggctgccgaatggtgtacatgccaggcgacgtgccagtgtgcagcccccagcagtacaagaactgtgcccacccggccatagatgccatgcttcgcaaggactcgtgcgcctgccccaacccgtgcgccagcacgcgctacgccaaggagctctccatggtgcggatcccgagccgcgccgccgcgcgcttcctggcccggaagctcaaccgcagcgaggcctacatcgcggagaacgtgctggccctggacatcttctttgaggccctcaactatgagaccgtggagcagaagaaggcctatgagatgtcagagctgcttggtgacattgggggccagatggggctgttcatcggggccagcctgctcaccatcctcgagatcctagactacctctgtgaggtgttccgagacaaggtcctgggatatttctggaaccgacagcactcccaaaggcactccagcaccaatctgacctcccacccctccctgtgccgtcaccaagactctctccgcctcccaccgcacctgctaccttgtcacacagctctagacctgctgtctgtgtcctcggagccccgccctgacatcctggacatgcctagcctgcacgtagcttttccgtcttcaccccaaataaagtcctaatgcatc

SEQ ID NO: 1748 - DNA, 2684 bp, Homo sapiens
  source 1..2684: mol_type = unassigned DNA
gggctccggagcacatgctgagcggagcggctggggctgcgcggcgtggcggagcagcgctcgctccctcgctcactcgctcgctcgcagggacacacgcaggggctgacagctgtgctggtgctgataagggaagccacaaggagacgatcgaggagagagacaagcggcagcagaggcagcagcggcagaggcagcaccagggctgcggagctgctgggagtgggagtgactcccccacctcgggcccccaccctgtccctgtcctcttcccgcttgccctgagtttagaagagcagccgctgccaccactgccactcgggagggcaccagggctgctggctagggagggacagggcagggaggctctggccagtcccagcagccggggacagatgccgatcgagattgtgtgcaaaatcaaatttgctgaggaggatgcgaaacccaaggagaaggaggcaggggatgagcagagcctcctcggggctgttgcccctggagcagccccccgagacctggccacctttgccagcaccagcaccctgcatggactgggccgggcctgtggcccaggcccccacggactgcgcagaaccctgtgggcactggccctactcacctcgctggctgccttcctgtaccaggcggctggcctggcccggggctacctgacccggcctcacctggtggcaatggaccccgctgccccagccccagtggcgggcttcccggctgtcaccctctgcaatatcaaccgcttccggcattcggcactcagcgatgccgacatcttccacctggccaatctgacagggctgccccccaaagaccgggatgggcaccgtgcggctggcctgcgctacccagagcctgacatggtagacatcctcaaccgcactggccaccagctcgccgacatgcttaagagctgcaacttcagtgggcatcactgctccgccagcaacttctctgtggtctatactcgctatgggaagtgttacaccttcaacgcggacccgcggagctcgctgcccagccgggcagggggcatgggcagtggcctggagatcatgctggacatccagcaggaggagtacctgcccatctggagggagacaaatgagacgtcgtttgaggcaggtattcgggtgcagatccacagccaggaggagccgccctacatccaccagctggggttcggggtgtccccaggcttccagacctttgtgtcctgccaggaacagcggctgacctacctgccccagccctggggcaactgccgcgcagagagtgagctcagggagcctgagcttcagggctactcggcctacagtgtgtctgcctgccggctgcgctgtgaaaaggaggccgtgcttcagcgctgccactgccggatggtgcacatgccagactccctgggtgggggccctgagggcccgtgcttctgccccaccccctgcaacctgacacgctatgggaaagagatctccatggtcaggatccccaacaggggctcagcccggtacctggcgaggaagtacaaccgcaacgagacctacatacgggagaacttcctggtcctagatgtcttctttgaggccctgacctctgaagccatggagcagcgagcagcctatggcctgtcagccctgctgggagacctcgggggacagatgggcctgttcattggggccagcatcctcacgttgctggagatcctcgactacatctatgaggtgtcctgggatcgactgaagcgggtatggaggcgtcccaagacccccctgcggacctccactgggggcatctccactttggggcttcaggagctgaaggaacagagtccctgcccgagccggggccgagtggagggtgggggggtcagcagtctgctccccaatcaccaccacccccacggtcccccaggaggtctctttgaagattttgcttgctaggacggtgctgtgactgaaaggacccaggagtctgggacccctcctgggatccccagcacattctcctgctcctgggagaggcctgggggcggtgctcactgggagggccaggactcagttcctgctctcatcctcccctgccctgatgtcagctgctttgcacaaaggtccttcttgtccacaccccttatccccaggctggtgccccgggagggctggagaccaggccatgggccctcacggagaggaagggaaggaaggagagggagggggaggatagagcccatcccagccggggagggggagccctctgtacatttgtaaatatttagggaaagccgggtggggggaggggatacagatgtagaaggtgggtagggctacaggggtgggtgatttagggacagccagggtcccagccccaatgtcagcaggatagggagagccccaggactcaggagtgctgggctggtcctacttcctgcccctctccaggcccagctcccctcttggcagggggagaggatggcccagcaggcctggcccagctcccagttccccctgcaccagccccacccctagagtcccttctatagggagggggcaggagaccttccagacttcggctgagcttggagggtgggaagggagccttctcagtcctctctccctccagtctgattttataaagtgctgacgagattgggaataaagaggcataaagaa

SEQ ID NO: 1749 - DNA, 2741 bp, Homo sapiens
  source 1..2741: mol_type = unassigned DNA
gggctccggagcacatgctgagcggagcggctggggctgcgcggcgtggcggagcagcgctcgctccctcgctcactcgctcgctcgcagggacacacgcaggggctgacagctgtgctggtgctgataagggaagccacaaggagacgatcgaggagagagacaagcggcagcagaggcagcagcggcagaggcagcaccagggctgcggagctgctgggagtgggagtgactcccccacctcgggcccccaccctgtccctgtcctcttcccgcttgccctgagtttagaagagcagccgctgccaccactgccactcgggagggcaccagggctgctggctagggagggacagggcagggaggctctggccagtcccagcagccggggacagatgccgatcgagattgtgtgcaaaatcaaatttgctgaggaggatgcgaaacccaaggagaaggaggcaggggatgagcagagcctcctcggggctgttgcccctggagcagccccccgagacctggccacctttgccagcaccagcaccctgcatggactgggccgggcctgtggcccaggcccccacggactgcgcagaaccctgtgggcactggccctactcacctcgctggctgccttcctgtaccaggcggctggcctggcccggggctacctgacccggcctcacctggtggcaatggaccccgctgccccagccccagtggcgggcttcccggctgtcaccctctgcaatatcaaccgcttccggcattcggcactcagcgatgccgacatcttccacctggccaatctgacagggctgccccccaaagaccgggatgggcaccgtgcggctggcctgcgctacccagagcctgacatggtagacatcctcaaccgcactggccaccagctcgccgacatgcttaagagctgcaacttcagtgggcatcactgctccgccagcaacttctctgtggtctatactcgctatgggaagtgttacaccttcaacgcggacccgcggagctcgctgcccagccgggcagggggcatgggcagtggcctggagatcatgctggacatccagcaggaggagtacctgcccatctggagggagacaaatgagacgtcgtttgaggcaggtattcgggtgcagatccacagccaggaggagccgccctacatccaccagctggggttcggggtgtccccaggcttccagacctttgtgtcctgccaggaacagcggctgacctacctgccccagccctggggcaactgccgcgcagagagtgagctcagggagcctgagcttcagggctactcggcctacagtgtgtctgcctgccggctgcgctgtgaaaaggaggccgtgcttcagcgctgccactgccggatggtgcacatgccaggcaatgagaccatctgcccaccaaatatctacatcgagtgtgcagaccacacactggactccctgggtgggggccctgagggcccgtgcttctgccccaccccctgcaacctgacacgctatgggaaagagatctccatggtcaggatccccaacaggggctcagcccggtacctggcgaggaagtacaaccgcaacgagacctacatacgggagaacttcctggtcctagatgtcttctttgaggccctgacctctgaagccatggagcagcgagcagcctatggcctgtcagccctgctgggagacctcgggggacagatgggcctgttcattggggccagcatcctcacgttgctggagatcctcgactacatctatgaggtgtcctgggatcgactgaagcgggtatggaggcgtcccaagacccccctgcggacctccactgggggcatctccactttggggcttcaggagctgaaggaacagagtccctgcccgagccggggccgagtggagggtgggggggtcagcagtctgctccccaatcaccaccacccccacggtcccccaggaggtctctttgaagattttgcttgctaggacggtgctgtgactgaaaggacccaggagtctgggacccctcctgggatccccagcacattctcctgctcctgggagaggcctgggggcggtgctcactgggagggccaggactcagttcctgctctcatcctcccctgccctgatgtcagctgctttgcacaaaggtccttcttgtccacaccccttatccccaggctggtgccccgggagggctggagaccaggccatgggccctcacggagaggaagggaaggaaggagagggagggggaggatagagcccatcccagccggggagggggagccctctgtacatttgtaaatatttagggaaagccgggtggggggaggggatacagatgtagaaggtgggtagggctacaggggtgggtgatttagggacagccagggtcccagccccaatgtcagcaggatagggagagccccaggactcaggagtgctgggctggtcctacttcctgcccctctccaggcccagctcccctcttggcagggggagaggatggcccagcaggcctggcccagctcccagttccccctgcaccagccccacccctagagtcccttctatagggagggggcaggagaccttccagacttcggctgagcttggagggtgggaagggagccttctcagtcctctctccctccagtctgattttataaagtgctgacgagattgggaataaagaggcataaagaa

SEQ ID NO: 1750 - DNA, 2663 bp, Homo sapiens
  source 1..2663: mol_type = unassigned DNA
tgttagaattctgatttcagctctcagcatccaccatgcatctcaagatagtcctggcgttcctggcactgtccctcattaccatctttgccctggcctatgttttgctgaccagcccaggtggttccagccagcctccccactgcccctctgtatcccatagggcccagccctggccacaccctggccagagccagctgtttgcagacctgagccgagaggagttgacagctgtgatgcgctttctgacccagcggctggggccagggctggtggacgcagcccaggctcagccctcggacaactgcatcttctcagtggagctgcagctgccccccaaggctgcagccctggcccacctggacagggggagccccccacctgcccgggaggcactggccatcgtcctctttggtggacaaccccaacccaatgtgagtgagctggtggtggggccgctgcctcacccctcgtacatgcgggatgtgactgtggagcgtcacggcgggcccctgccctatcaccgtcgcccggtgctgagagctgagtttacacagatgtggaggcatctgaaagaggtggagctacccaaggcacccatcttcctgtcgtccaccttcaactacaatggctctaccctggcagctgtgcatgccacccctcggggcttgcgctcaggggaccgagctacctggatggccctctaccataacatctcaggggttggtcttttccttcaccccgtggggctggagctactactggaccacagggccctggaccctgcccactggactgtccagcaggtcttctaccttgggcactactatgcagacttgggccagttggaacgggagtttaagtctggccggttggaagtggttagagtccctctacctccaccaaatggagcttcatccctgaggtctcggaactctccaggtcctcttccccctcttcagttctcgccccagggttcccagtacagtgtgcaaggaaacctggtggtatcctccctctggtcatttacctttggccatggggtgttcagcggcctgaggatttttgatgttcggttccagggtgagcgaatagcctatgaagtcagtgtccaggagtgtgtatctatctatggtgccgattcacccaagacgatgctgactcgctatttggatagcagctttggactcggccgtaacagccgaggcttggtgcggggagtggactgcccctatcaagccacgatggtggacatccatatattagtgggcaaaggggcagtccagctgcttccaggggctgtgtgtgtatttgaggaagcccagggactgccccttcgaaggcaccacaattaccttcaaaatcatttctatggtggtttggccagctcagcccttgtggtcaggtctgtgtcatctgtgggcaactatgactacatttgggactttgtgttgtacccaaatggggcacttgaagggcgggtccatgccacgggttatatcaacacagctttcctgaaagggggagaggagggcctcctctttgggaaccgtgtgggggaaagagtgctgggaacggtgcacacacatgccttccacttcaagctggacctggatgtggcagggctgaaaaactgggtggtagctgaagacgtggtgtttaaacctgtggctgccccctggaacccggagcactggctacagcgcccacagctgactcggcaggtcctgggaaaggaggacctgacagctttttccttgggaagccccctaccccgctacctctacctggctagcaaccagactaatgcgtggggtcaccagcgcgggtaccgaatccagatccacagcccccttggcatacacatacccctggagagtgacatggagagggccctcagctgggggagataccagcttgtggtgacccagagaaaggaggaggagtcacagagcagtagcatctatcaccagaatgacatctggacacccacagttacctttgctgacttcatcaacaatgaaaccctcttaggagaggatctggtggcttgggtcacagccagcttcctgcacattccccatgccgaggacatcccaaacacagtgactctggggaacagagttggcttcttgctccgaccctataacttctttgatgaggacccctccatcttctcccctggcagtgtctactttgagaagggccaggatgctgggctctgcagcatcaatcctgtggcctgcctccccgacctggcagcctgtgtcccggacttaccccctttctcttaccacggcttctagtcctgagggtgtggcgggcggcgtggttaggcacatgtacttttccctgtttctactttctattctccgtgtttttatcacacctgctccccagattcccaccccctcaatgttcctctcacacgaaacccccatcagtccctttggttaattcttacttcctgttcatctctaaagtgttaaattataaaaatgatttttaaatattcaaagaaaaatatcacaaatcctactactcagaaataggtggtcacattacatcagacatctctttatgcatgtgcattcaaaaggaagagtagatagaattttgtaaaacagatgttgtatgtaatttataataaaaagtattagagg

SEQ ID NO: 1751 - DNA, 2582 bp, Homo sapiens
  source 1..2582: mol_type = unassigned DNA
tgttagaattctgatttcagctctcagcatccaccatgcatctcaagatagtcctggcgttcctggcactgtccctcattaccatctttgccctggcctatgttttgctgaccagcccaggtggttccagccagcctccccactgcccctctgtatcccatagggcccagccctggccacaccctggccagagccagctgtttgcagacctgagccgagaggagttgacagctgtgatgcgctttctgacccagcggctggggccagggctggtggacgcagcccaggctcagccctcggacaactgcatcttctcagtggagctgcagctgccccccaaggctgcagccctggcccacctggacagggggagccccccacctgcccgggaggcactggccatcgtcctctttggtggacaaccccaacccaatgtgagtgagctggtggtggggccgctgcctcacccctcgtacatgcgggatgtgactgtggagcgtcacggcgggcccctgccctatcaccgtcgcccggtgctgagagctgagtttacacagatgtggaggcatctgaaagaggtggagctacccaaggcacccatcttcctgtcgtccaccttcaactacaatggctctaccctggcagctgtgcatgccacccctcggggcttgcgctcaggggaccgagctacctggatggccctctaccataacatctcaggggttggtcttttccttcaccccgtggggctggagctactactggaccacagggccctggaccctgcccactggactgtccagcaggtcttctaccttgggcactactatgcagacttgggccagttggaacgggagtttaagtctggccggttggaagtggttagagtccctctacctccaccaaatggagcttcatccctgaggtctcggaactctccaggtcctcttccccctcttcagttctcgccccagggttcccagtacagtgtgcaaggaaacctggtggtatcctccctctggtcatttacctttggccatggggtgttcagcggcctgaggatttttgatgttcggttccagggtgagcgaatagcctatgaagtcagtgtccaggagtgtgtatctatctatggtgccgattcacccaagacgatgctgactcgctatttggatagcagctttggactcggccgtaacagccgaggcttggtgcggggagtggactgcccctatcaagccacgatggtggacatccatatattagtgggcaaaggggcagtccagctgcttccaggggctgtgtgtgtatttgaggaagcccagggactgccccttcgaaggcaccacaattaccttcaaaatcatttctatggtggtttggccagctcagcccttgtggtcaggtctgtgtcatctgtgggcaactatgactacatttgggactttgtgttgtacccaaatggggcacttgaagggcgggtccatgccacgggttatatcaacacagctttcctgaaagggggagaggagggcctcctctttgggaaccgtgtgggggaaagagtgctgggaacggtgcacacacatgccttccacttcaagctggacctggatgtggcagggctgaaaaactgggtggtagctgaagacgtggtgtttaaacctgtggctgccccctggaacccggagcactggctacagcgcccacagctgactcggcaggtcctgggaaaggaggacctgacagctttttccttgggaagccccctaccccgctacctctacctggctagcaaccagactaatgcgtggggtcaccagcgcggataccagcttgtggtgacccagagaaaggaggaggagtcacagagcagtagcatctatcaccagaatgacatctggacacccacagttacctttgctgacttcatcaacaatgaaaccctcttaggagaggatctggtggcttgggtcacagccagcttcctgcacattccccatgccgaggacatcccaaacacagtgactctggggaacagagttggcttcttgctccgaccctataacttctttgatgaggacccctccatcttctcccctggcagtgtctactttgagaagggccaggatgctgggctctgcagcatcaatcctgtggcctgcctccccgacctggcagcctgtgtcccggacttaccccctttctcttaccacggcttctagtcctgagggtgtggcgggcggcgtggttaggcacatgtacttttccctgtttctactttctattctccgtgtttttatcacacctgctccccagattcccaccccctcaatgttcctctcacacgaaacccccatcagtccctttggttaattcttacttcctgttcatctctaaagtgttaaattataaaaatgatttttaaatattcaaagaaaaatatcacaaatcctactactcagaaataggtggtcacattacatcagacatctctttatgcatgtgcattcaaaaggaagagtagatagaattttgtaaaacagatgttgtatgtaatttataataaaaagtattagagg

SEQ ID NO: 1752 - DNA, 4023 bp, Homo sapiens
  source 1..4023: mol_type = unassigned DNA
gtccttcccacccttagtcccaggcatctgactaccgggaacctcagccagagtccgggagccccccaccccgtccaggagccaacagagcccccgtcttgctggcgtgagaatacattgctctcctttggttgaatcagctgtccctcttcgtgggaaaatgaaccagaagacaatcctcgtgctcctcattctggccgtcatcaccatctttgccttggtttgtgtcctgctggtgggcaggggtggagatgggggtgaacccagccagcttccccattgcccctctgtatctcccagtgcccagccttggacacaccctggccagagccagctgtttgcagacctgagccgagaggagctgacggctgtgatgcgctttctgacccagcggctggggccagggctggtggatgcagcccaggcccggccctcggacaactgtgtcttctcagtggagttgcagctgcctcccaaggctgcagccctggctcacttggacagggggagccccccacctgcccgggaggcactggccatcgtcttctttggcaggcaaccccagcccaacgtgagtgagctggtggtggggccactgcctcacccctcctacatgcgggacgtgactgtggagcgtcatggaggccccctgccctatcaccgacgccccgtgctgttccaagagtacctggacatagaccagatgatcttcaacagagagctgccccaggcttctgggcttctccaccactgttgcttctacaagcaccggggacggaacctggtgacaatgaccacggctccccgtggtctgcaatcaggggaccgggccacctggtttggcctctactacaacatctcgggcgctgggttcttcctgcaccacgtgggcttggagctgctagtgaaccacaaggcccttgaccctgcccgctggactatccagaaggtgttctatcaaggccgctactacgacagcctggcccagctggaggcccagtttgaggccggcctggtgaatgtggtgctgatcccagacaatggcacaggtgggtcctggtccctgaagtcccctgtgcccccgggtccagctccccctctacagttctatccccaaggcccccgcttcagtgtccagggaagtcgagtggcctcctcactgtggactttctcctttggcctcggagcattcagtggcccaaggatctttgacgttcgcttccaaggagaaagactagtttatgagataagcctccaagaggccttggccatctatggtggaaattccccagcagcaatgacgacccgctatgtggatggaggctttggcatgggcaagtacaccacgcccctgacccgtggggtggactgcccctacttggccacctacgtggactggcacttccttttggagtcccaggcccccaagacaatacgtgatgccttttgtgtgtttgaacagaaccagggcctccccctgcggcgacaccactcagatctctactcgcactactttgggggtcttgcggaaacggtgctggtcgtcagatctatgtccaccttgctcaactatgactatgtgtgggatacggtcttccaccccagtggggccatagaaatacgattctatgccacgggctacatcagctcggcattcctctttggtgctactgggaagtacgggaaccaagtgtcagagcacaccctgggcacggtccacacccacagcgcccacttcaaggtggatctggatgtagcaggactggagaactgggtctgggccgaggatatggtctttgtccccatggctgtgccctggagccctgagcaccagctgcagaggctgcaggtgacccggaagctgctggagatggaggagcaggccgccttcctcgtgggaagcgccacccctcgctacctgtacctggccagcaaccacagcaacaagtggggtcacccccggggctaccgcatccagatgctcagctttgctggagagccgctgccccaaaacagctccatggcgagaggcttcagctgggagaggtaccagctggctgtgacccagcggaaggaggaggagcccagtagcagcagcgttttcaatcagaatgacccttgggcccccactgtggatttcagtgacttcatcaacaatgagaccattgctggaaaggatttggtggcctgggtgacagctggttttctgcatatcccacatgcagaggacattcctaacacagtgactgtggggaacggcgtgggcttcttcctccgaccctataacttctttgacgaagacccctccttctactctgccgactccatctacttccgaggggaccaggatgctggggcctgcgaggtcaaccccctagcttgcctgccccaggctgctgcctgtgcccccgacctccctgccttctcccacgggggcttctctcacaactaggcggtcctgggatggggcatgtggccaagggctccagggccagggtgtgagggatggggagcagctgggcactgggccggcagcctggttccctctttcctgtgccaggactctctttcttccactaccctccctcgcatccgcctctgagccaggagcctcctgaccctgtgatgcctgacacaggggacactgaaccttgttgatgccagctgtactgagttctcatccacagaggccaggcatggcccagcctggagccgtggccgagggcttccctagatggttccctttgttgctgtctggctttcccgaatctttttaggccacctccaaggactctaaaagggggctattccctggagaccccagagtagggttgccagtcctgcaagtccatagctgagctggaaaggatgcttctgctcacattccctctcatccaggtcctttccttctcgtcttcctctctctcacctacttcctcctcctcctcctgttcctgccttctcttctatcctgcaatttctcccgaatcctgaggggatatccctatgtcccagcccctggtactcccccagccctcagttttcagtcaagttccgtctcctctccagccctatggaagtctcaaggtcacgggacccctaatcagagtggccaatccctgtgtgtcgttcccttgtgtctgttgcttattgggagtaggagttgctcctacccctgtcctggggctgggtgtgtttcaggacagctgcttctgtgcatttgtgtctgcctgcctcatgctctctatagaggaggatggtcatcgtgacagcagcagctcaagttagcatttcaagtgatttgggggtgcaatgataatgaagaatggccattttgtaccagggctctgtattctgcaacagcctgtttgggaggctggagtggaaacaaagggtgggcatcaaagatgagaagccaaagcccctacaactccagccacccagccaggaggggctgtccaatcacattcaggcatgcgaatgagctgggccctgggtgaggtgggggtctggcctagtggggaggggcctggcctgggtggggcagggcctggcctggtccaggcttgggctccattcccatcactgctgtccctcctgaggtctggattggggatggggacaaagaaatagcaagagatgagaaacaacagaaacttttttctctaaaggactggttaaatcaattctgatacagccttacaatacaatagtatgcagctaaaaaataattgtatgtctttatatactaatatgtaataatcttcaggtgaaaaaggcaagccacagaaatgtgtatagcgcacttcccatttgtgtttcagaaaggagtagaatataaacacataattgcttatgtatgcctattcagaataaatgggtaacactgattacttttgggaggggaaccagtaggttgaggacaggagagggaagggtcttaacacttacacccttttgtacattttgaattttgaaccatgtgactgtattacctattcaaaataaacaataaatgggccc

SEQ ID NO: 1753 - DNA, 2412 bp, Homo sapiens
  source 1..2412: mol_type = unassigned DNA
agtgacagagcgattactaagcctacggttcccaaacgactcaggtgaacctgatttacaggaaaggcgggctgtagctagggatggagacagtacctatcagcaagcggctccacagctcggttctctatctattctgaagacatgcggggccactcactgctcctgatagtcctctacctcccacagaccccacccactacgacacggaaaactggattacccaaatacctgcctctgagtctggggacgcaggcaagcacaaagacaagggggatggagcttctacacagggccccagcgctgtcgctgtggctgctgctgccgctacggcttagtgcaccagacgctgcatttcaggtgctcctacaaaagaggccactcctggaacgccgggagctcagacgctgccctttgctcgcgagccaagtcagccaaggttaaccttcgcggaacccggcgaggagcgcaagcctggccttccccaaacacagatccgagcttttcaccctctaccctcccctcagcctggccttttcttccgccctcacagccaccgcgacccaacgctgaggaaagaccccgacttgtggtgtccttccccttgcccaaactggccacgaaaggacatatagcgagagagaaagaggattttctgccgtctcttggcaaaaatggcaaataatgatgctgttctgaagagactggagcagaagggtgcagaggcagatcaaatcattgaatatcttaagcagcaagtttctctacttaaggagaaagcaattttgcaggcaactttgagggaagagaagaaacttcgagttgaaaatgctaaactgaagaaagaaattgaagaactgaaacaagagctaattcaggcagaaattcaaaatggagtgaagcaaataccatttccatctggtactccactgcacgctaattctatggtttctgaaaatgtgatacagtctacagcagtaacaaccgtatcttctggtaccaaagaacagataaaaggaggaacaggagacgaaaagaaagcgaaagagaaaattgaaaagaaaggagagaagaaggagaaaaaacagcaatcaatagctggaagtgccgactctaagccaatagatgtttcccgtctggatcttcgaattggttgcatcataactgctagaaaacaccctgatgcagattctttgtatgtggaagaagtagatgtcggagaaatagccccaaggacagttgtcagtggcctggtgaatcatgttcctcttgaacagatgcaaaatcggatggtgattttactttgtaacctgaaacctgcaaagatgaggggagtattatctcaagcaatggtcatgtgtgctagttcaccagagaaaattgaaatcttggctcctccaaatgggtctgttcctggagacagaattacttttgatgctttcccaggagagcctgacaaggagctgaatcctaagaagaagatttgggagcagatccagcctgatcttcacactaatgatgagtgtgtggctacatacaaaggagttccctttgaggtgaaagggaagggagtatgtagggctcaaaccatgagcaacagtggaatcaaataaaatgcttccactaccaaaagacattagagaaaaccttaaaagtaataaagagaaatatatttgtcacttatacctaaaatatgagtggctcatttttgcattactctcttctagacttgactagtcatttacttggtatatattgttttcattgattggggaaacactagatttttacctcggtttttgatcatttataatggagagaggaagttgcctatgttttgtaataatttattttttagcaggaatattgattagcagcttttttttctttatacacatagataactaactagattaatgtttagtttcttatttgtaggcacaggatgcatgaaatttcaagctctgggattttttgtatattgtgtatctgtatcaaaaatatcctctccttttcaaaaatgacaggttggaaaatgtttgtcagacttattaactggtcatattataataatactgataatgaccaactgctcattctgaaagccaaacataaaagctaggagaagtggcatctgaacatttttgctttgctgccagagtaaccctgactaataatacaataacagcaatttttttaaaaaactgagatttcctactggcttgaagtttttctatttagcaaaataattagtaataagttttgactaggtctaaagaatgaacacattgtaaacagttgccacagtagtttctaataaattgatcataaaagcagctatcctttttttttttaattctagcttctttttaaagattatttgggtacctaataaaggataatttatatctt

SEQ ID NO: 1754 - DNA, 2586 bp, Homo sapiens
  source 1..2586: mol_type = unassigned DNA
gtcctttctcactgctatagtacgcgggtggctggacctacatgcttcctgctgtggctgtctcggaacccgtggtcctccgcttcatgattttctgccgtctcttggcaaaaatggcaaataatgatgctgttctgaagagactggagcagaagggtgcagaggcagatcaaatcattgaatatcttaagcagcaagtttctctacttaaggagaaagcaattttgcaggcaactttgagggaagagaagaaacttcgagttgaaaatgctaaactgaagaaagaaattgaagaactgaaacaagagctaattcaggcagaaattcaaaatggagtgaagcaaataccatttccatctggtactccactgcacgctaattctatggtttctgaaaatgtgatacagtctacagcagtaacaaccgtatcttctggtaccaaagaacagataaaaggaggaacaggagacgaaaagaaagcgaaagagaaaattgaaaagaaaggagagaagaaggagaaaaaacagcaatcaatagctggaagtgccgactctaagccaatagatgtttcccgtctggatcttcgaattggttgcatcataactgctagaaaacaccctgatgcagattctttgtatgtggaagaagtagatgtcggagaaatagccccaaggacagttgtcagtggcctggtgaatcatgttcctcttgaacagatgcaaaatcggatggtgattttactttgtaacctgaaacctgcaaagatgaggggagtattatctcaagcaatggtcatgtgtgctagttcaccagagaaaattgaaatcttggctcctccaaatgggtctgttcctggagacagaattacttttgatgctttcccaggagagcctgacaaggagctgaatcctaagaagaagatttgggagcagatccagcctgatcttcacactaatgatgagtgtgtggctacatacaaaggagttccctttgaggtgaaagggaagggagtatgtagggctcaaaccatgagcaacagtggaatcaaataaaatgcttccactaccaaaagacattagagaaaaccttaaaagtaataaagagaaatatatttgtcacttatacctaaaatatgagtggctcatttttgcattactctcttctagacttgactagtcatttacttggtatatattgttttcattgattggggaaacactagatttttacctcggtttttgatcatttataatggagagaggaagttgcctatgttttgtaataatttattttttagcaggaatattgattagcagcttttttttctttatacacatagataactaactagattaatgtttagtttcttatttgtaggcacaggatgcatgaaatttcaagctctgggattttttgtatattgtgtatctgtatcaaaaatatcctctccttttcaaaaatgacaggttggaaaatgtttgtcagacttattaactggtcatattataataatactgataatgaccaactgctcattctgaaagccaaacataaaagctaggagaagtggcatctgaacatttttgctttgctgccagagtaaccctgactaataatacaataacagcaatttttttaaaaaactgagatttcctactggcttgaagtttttctatttagcaaaataattagtaataagttttgactaggtctaaagaatgaacacattgtaaacagttgccacagtagtttctaataaattgatcataaaagcagctatcctttttttttttaattctagcttctttttaaagattatttgggtacctaataaaggataatttatatcttattacagactgatattttgctttttcatgtgtcatcatactgtcagtatattaaaagaaattacagcctaaaacttaacatataccatacatatatattaaggtgtcaaatagctattctcactcatcttacaaatattgtaagagcaataaaaattaattgaggaattataagcctacaggtcatcagccttgaggtgattactgatgatttgggcttacacacatgtcagcaagatagggagtgtggataggggagggctggtagctaacaaggggcctcacagagaaatattagtgactttaaccaggtttcagaatctgggccttacctttacaggttcaacaaaagaatggcatcaatagaggcagaagtatagacattgttttaaaaatacacacatgcacacacacacaaaacattttagcattatagctgtctgaatccttcaataagaaggagaggcacacacaaatacacacactcacacaaaactcaacaaccataaaacaaccctgcatgttataaaaggcagaattaaattttatttatttaaatccatggaactctggtaggccaggatatattatagtaccattatcaatgtgatattctgaaaatatgaactgagcgtcattaacaattgttggtacctaaacacaaaatgaatttcaaaagttactttgttctcaagatatgtcattcttttgggaataaatacttctggtgacaaag

SEQ ID NO: 1755 - DNA, 1129 bp, Homo sapiens
  source 1..1129: mol_type = unassigned DNA
aaagcaaaattctgcctccaaggattttctgccgtctcttggcaaaaatggcaaataatgatgctgttctgaagagactggagcagaagggtgcagaggcagatcaaatcattgaatatcttaagcagcaagtttctctacttaaggagaaagcaattttgcaggcaactttgagggaagagaagaaacttcgagttgaaaatgctaaactgaagaaagaaattgaagaactgaaacaagagctaattcaggcagaaattcaaaatggagtgaagcaaataccatttccatctggtactccactgcacgctaattctatggtttctgaaaatgtgatacagtctacagcagtaacaaccgtatcttctggtaccaaagaacagataaaaggaggaacaggagacgaaaagaaagcgaaagagaaaattgaaaagaaaggagagaagaaggagaaaaaacagcaatcaatagccccaaggacagttgtcagtggcctggtgaatcatgttcctcttgaacagatgcaaaatcggatggtgattttactttgtaacctgaaacctgcaaagatgaggggagtattatctcaagcaatggtcatgtgtgctagttcaccagagaaaattgaaatcttggctcctccaaatgggtctgttcctggagacagaattacttttgatgctttcccaggagagcctgacaaggagctgaatcctaagaagaagatttgggagcagatccagcctgatcttcacactaatgatgagtgtgtggctacatacaaaggagttccctttgaggtgaaagggaagggagtatgtagggctcaaaccatgagcaacagtggaatcaaataaaatgcttccactaccaaaagacattagagaaaaccttaaaagtaataaagagaaatatatttgtcacttatacctaaaatatgagtggctcatttttgcattactctcttctagacttgactagtcatttacttggtatatattgttttcattgattggggaaacactagatttttacctcggtttttgatcatttataatggagagaggaagttgcctatgttttgtaataatttattttttagcaggaatattgattagcagcttttttt

SEQ ID NO: 1756 - DNA, 2519 bp, Homo sapiens
  source 1..2519: mol_type = unassigned DNA
aaaccaaagcaaaattctgcctccaaggattttctgccgtctcttggcaaaaatggcaaataatgatgctgttctgaagagactggagcagaagggtgcagaggcagatcaaatcattgaatatcttaagcagcaagtttctctacttaaggagaaagcaattttgcaggcaactttgagggaagagaagaaacttcgagttgaaaatgctaaactgaagaaagaaattgaagaactgaaacaagagctaattcaggcagaaattcaaaatggagtgaagcaaataccatttccatctggtactccactgcacgctaattctatggtttctgaaaatgtgatacagtctacagcagtaacaaccgtatcttctggtaccaaagaacagataaaaggaggaacaggagacgaaaagaaagcgaaagagaaaattgaaaagaaaggagagaagaaggagaaaaaacagcaatcaatagctggaagtgccgactctaagccaatagatgtttcccgtctggatcttcgaattggttgcatcataactgctagaaaacaccctgatgcagattctttgtatgtggaagaagtagatgtcggagaaatagccccaaggacagttgtcagtggcctggtgaatcatgttcctcttgaacagatgcaaaatcggatggtgattttactttgtaacctgaaacctgcaaagatgaggggagtattatctcaagcaatggtcatgtgtgctagttcaccagagaaaattgaaatcttggctcctccaaatgggtctgttcctggagacagaattacttttgatgctttcccaggagagcctgacaaggagctgaatcctaagaagaagatttgggagcagatccagcctgatcttcacactaatgatgagtgtgtggctacatacaaaggagttccctttgaggtgaaagggaagggagtatgtagggctcaaaccatgagcaacagtggaatcaaataaaatgcttccactaccaaaagacattagagaaaaccttaaaagtaataaagagaaatatatttgtcacttatacctaaaatatgagtggctcatttttgcattactctcttctagacttgactagtcatttacttggtatatattgttttcattgattggggaaacactagatttttacctcggtttttgatcatttataatggagagaggaagttgcctatgttttgtaataatttattttttagcaggaatattgattagcagcttttttttctttatacacatagataactaactagattaatgtttagtttcttatttgtaggcacaggatgcatgaaatttcaagctctgggattttttgtatattgtgtatctgtatcaaaaatatcctctccttttcaaaaatgacaggttggaaaatgtttgtcagacttattaactggtcatattataataatactgataatgaccaactgctcattctgaaagccaaacataaaagctaggagaagtggcatctgaacatttttgctttgctgccagagtaaccctgactaataatacaataacagcaatttttttaaaaaactgagatttcctactggcttgaagtttttctatttagcaaaataattagtaataagttttgactaggtctaaagaatgaacacattgtaaacagttgccacagtagtttctaataaattgatcataaaagcagctatcctttttttttttaattctagcttctttttaaagattatttgggtacctaataaaggataatttatatcttattacagactgatattttgctttttcatgtgtcatcatactgtcagtatattaaaagaaattacagcctaaaacttaacatataccatacatatatattaaggtgtcaaatagctattctcactcatcttacaaatattgtaagagcaataaaaattaattgaggaattataagcctacaggtcatcagccttgaggtgattactgatgatttgggcttacacacatgtcagcaagatagggagtgtggataggggagggctggtagctaacaaggggcctcacagagaaatattagtgactttaaccaggtttcagaatctgggccttacctttacaggttcaacaaaagaatggcatcaatagaggcagaagtatagacattgttttaaaaatacacacatgcacacacacacaaaacattttagcattatagctgtctgaatccttcaataagaaggagaggcacacacaaatacacacactcacacaaaactcaacaaccataaaacaaccctgcatgttataaaaggcagaattaaattttatttatttaaatccatggaactctggtaggccaggatatattatagtaccattatcaatgtgatattctgaaaatatgaactgagcgtcattaacaattgttggtacctaaacacaaaatgaatttcaaaagttactttgttctcaagatatgtcattcttttgggaataaatacttctggtg

SEQ ID NO: 1757 - DNA, 568 bp, Homo sapiens
  source 1..568: mol_type = unassigned DNA
actttctcctactgctcaagggggtgttacactttgacgactgactaaacctcgagggccagaaacaaaccaaagcaaaattctgcctccaaggattttctgccgtctcttggcaaaaatggcaaataatgatgctgttctgaagagactggagcagaagggtgcagaggcagatcaaatcattgaatatcttaagcagcaagtttctctacttaaggagaaagcaattttgcaggcaactttgagggaagagaagaaacttcgagttgaaaatgctaaactgaagaaagaaattgaagaactgaaacaagagctaattcaggcagaaattcaaaatggagtgaagcaaataccatttccatctggtactccactgcacgctaattctatggtttctgaaaatgtgatacagtctacagcagtaacaaccgtatcttctggtaccaaagaacagataaaaggaggaacaggagacgaaaagaaagcgaaagagaaaattgaaaagaaaggagagaagaaggagaaaaaacagcaatcaatagctggaagtgccgactctaagccaata

SEQ ID NO: 1758 - DNA, 1444 bp, Homo sapiens
  source 1..1444: mol_type = unassigned DNA
cgtggtgggcggaccggggcggtcctgagcctgcgacctcgcaggcgacctcgctggaccctaagtccaggccacagtcagggaagggcgctgagaggcgagcgtgagcccagcgacaggagagtgagctcaccacgcgcagcgccatgaccagcaagggtcccgaggaggagcacccatcggtgacgctcttccgccagtacctgcgtatccgcactgtccagcccaagcctgactatggagctgctgtggctttctttgaggagacagcccgccagctgggcctgggctgtcagaaagtagaggtggcacctggctatgtggtgaccgtgttgacctggccaggcaccaaccctacactctcctccatcttgctcaactcccacacggatgtggtgcctgtcttcaaggaacattggagtcacgacccctttgaggccttcaaggattctgagggctacatctatgccaggggtgcccaggacatgaagtgcgtcagcatccagtacctggaagctgtgaggaggctgaaggtggagggccaccggttccccagaaccatccacatgacctttgtgcctgatgaggaggttgggggtcaccaaggcatggagctgttcgtgcagcggcctgagttccacgccctgagggcaggctttgccctggatgagggcatagccaatcccactgatgccttcactgtcttttatagtgagcggagtccctggtgggtgcgggttaccagcactgggaggccaggccatgcctcacgcttcatggaggacacagcagcagagaagctgcacaaggttgtaaactccatcctggcattccgggagaaggaatggcagaggctgcagtcaaacccccacctgaaagaggggtccgtgacctccgtgaacctgactaagctagagggtggcgtggcctataacgtgatacctgccaccatgagcgccagctttgacttccgtgtggcaccggatgtggacttcaaggcttttgaggagcagctgcagagctggtgccaggcagctggcgagggggtcaccctagagtttgctcagaagtggatgcacccccaagtgacacctactgatgactcaaacccttggtgggcagcttttagccgggtctgcaaggatatgaacctcactctggagcctgagatcatgcctgctgccactgacaaccgctatatccgcgcggtgggggtcccagctctaggcttctcacccatgaaccgcacacctgtgctgctgcacgaccacgatgaacggctgcatgaggctgtgttcctccgtggggtggacatatatacacgcctgctgcctgcccttgccagtgtgcctgccctgcccagtgacagctgagccctggaactcctaaacctttgcccctggggcttccatcccaaccagtgccaaggacctcctcttccccc

SEQ ID NO: 1759 - DNA, 1836 bp, Homo sapiens
  source 1..1836: mol_type = unassigned DNA
cggctgcggagtgcgcaggcgcgccgagatggccgcgctcctggccgcctagagccggagcggcccgcggagctgcggaggcagccatggtcggggcgctgtgcggctgctggttccgcctgggcggggcccgcccgctcatcccgttgggcccgactgtggtacagacctccatgagccggtcccaggtagccctgctgggcctgagtctgctgctcatgctcctactgtatgtggggctgccaggcccccctgagcagacttcctgcctctggggagaccccaatgtcacagtcctggctggtctcacccctggcaactcgcccatcttttaccgcgaggtgctcccactcaaccaggcacacagggtggaggtggtgctgcttcatggaaaggcctttaactctcacacgtgggagcagctgggcacactgcagctactgtcacagaggggctaccgggccgtggcccttgaccttccagctcaccacgcgcagcgccatgaccagcaagggtcccgaggaggagcacccatcggtgacgctcttccgccagtacctgcgtatccgcactgtccagcccaagcctgactatggagctgctgtggctttctttgaggagacagcccgccagctgggcctgggctgtcagaaagtagaggtggcacctggctatgtggtgaccgtgttgacctggccaggcaccaaccctacactctcctccatcttgctcaactcccacacggatgtggtgcctgtcttcaaggaacattggagtcacgacccctttgaggccttcaaggattctgagggctacatctatgccaggggtgcccaggacatgaagtgcgtcagcatccagtacctggaagctgtgaggaggctgaaggtggagggccaccggttccccagaaccatccacatgacctttgtgcctgatgaggaggttgggggtcaccaaggcatggagctgttcgtgcagcggcctgagttccacgccctgagggcaggctttgccctggatgagggcatagccaatcccactgatgccttcactgtcttttatagtgagcggagtccctggtgggtgcgggttaccagcactgggaggccaggccatgcctcacgcttcatggaggacacagcagcagagaagctgcacaaggttgtaaactccatcctggcattccgggagaaggaatggcagaggctgcagtcaaacccccacctgaaagaggggtccgtgacctccgtgaacctgactaagctagagggtggcgtggcctataacgtgatacctgccaccatgagcgccagctttgacttccgtgtggcaccggatgtggacttcaaggcttttgaggagcagctgcagagctggtgccaggcagctggcgagggggtcaccctagagtttgctcagaagtggatgcacccccaagtgacacctactgatgactcaaacccttggtgggcagcttttagccgggtctgcaaggatatgaacctcactctggagcctgagatcatgcctgctgccactgacaaccgctatatccgcgcggtgggggtcccagctctaggcttctcacccatgaaccgcacacctgtgctgctgcacgaccacgatgaacggctgcatgaggctgtgttcctccgtggggtggacatatatacacgcctgctgcctgcccttgccagtgtgcctgccctgcccagtgacagctgagccctggaactcctaaacctttgcccctggggcttccatcccaaccagtgccaaggacctcctcttcccccttccaaataataaagtctatggacagggctgtctctg

SEQ ID NO: 1760 - DNA, 1409 bp, Homo sapiens
  source 1..1409: mol_type = unassigned DNA
cgacatccggcctcggccacgtggtgggcggaccggggcggtcctgagcctgcgacctcgcaggcgacctcgctggaccctaagtccaggccacagtcagggaagggcgctgagaggcgagcgtgagcccagcgacaggagagtgagctcaccacgcgcagcgccatgaccagcaagggtcccgaggaggagcacccatcggtgacgctcttccgccagtacctgcgtatccgcactgtccagcccaagcctgactatggcaccaaccctacactctcctccatcttgctcaactcccacacggatgtggtgcctgtcttcaaggaacattggagtcacgacccctttgaggccttcaaggattctgagggctacatctatgccaggggtgcccaggacatgaagtgcgtcagcatccagtacctggaagctgtgaggaggctgaaggtggagggccaccggttccccagaaccatccacatgacctttgtgcctgatgaggaggttgggggtcaccaaggcatggagctgttcgtgcagcggcctgagttccacgccctgagggcaggctttgccctggatgagggcatagccaatcccactgatgccttcactgtcttttatagtgagcggagtccctggtgggtgcgggttaccagcactgggaggccaggccatgcctcacgcttcatggaggacacagcagcagagaagctgcacaaggttgtaaactccatcctggcattccgggagaaggaatggcagaggctgcagtcaaacccccacctgaaagaggggtccgtgacctccgtgaacctgactaagctagagggtggcgtggcctataacgtgatacctgccaccatgagcgccagctttgacttccgtgtggcaccggatgtggacttcaaggcttttgaggagcagctgcagagctggtgccaggcagctggcgagggggtcaccctagagtttgctcagaagtggatgcacccccaagtgacacctactgatgactcaaacccttggtgggcagcttttagccgggtctgcaaggatatgaacctcactctggagcctgagatcatgcctgctgccactgacaaccgctatatccgcgcggtgggggtcccagctctaggcttctcacccatgaaccgcacacctgtgctgctgcacgaccacgatgaacggctgcatgaggctgtgttcctccgtggggtggacatatatacacgcctgctgcctgcccttgccagtgtgcctgccctgcccagtgacagctgagccctggaactcctaaacctttgcccctggggcttccatcccaaccagtgccaaggacctcctcttcccccttccaaataataaagtctatggacagggctgtctctgaagtactaacacaa

SEQ ID NO: 1761 - DNA, 1319 bp, Homo sapiens
  source 1..1319: mol_type = unassigned DNA
cgacatccggcctcggccacgtggtgggcggaccggggcggtcctgagcctgcgacctcgcaggcgacctcgctggaccctaagtccaggccacagtcagggaagggcgctgagaggcgagcgtgagcccagcgacaggagagtgagctcaccacgcgcagcgccatgaccagcaagggtcccgaggaggagcacccatcggtgacgctcttccgccagtacctgcgtatccgcactgtccagcccaagcctgactatggagctgctgtggctttctttgaggagacagcccgccagctgggcctgggctgtcagaaagtagaggtggcacctggctatgtggtgaccgtgttgacctggccaggcaccaaccctacactctcctccatcttgctcaactcccacacggatgtggtgcctgtcttcaaggaacattggagtcacgacccctttgaggccttcaaggattctgagggctacatctatgccaggggtgcccaggacatgaagtgcgtcagcatccagtacctggaagctgtgaggaggctgaaggtggagggccaccggttccccagaaccatccacatgacctttgtgcctgatgaggaggttgggggtcaccaaggcatggagctgttcgtgcagcggcctgagttccacgccctgagggcaggctttgccctggatgagggcatagccaatcccactgatgccttcactgtcttttatagtgagcggagtccctggtgggtgcgggttaccagcactgggaggccaggccatgcctcacgcttcatggaggacacagcagcagagaagctggcttttgaggagcagctgcagagctggtgccaggcagctggcgagggggtcaccctagagtttgctcagaagtggatgcacccccaagtgacacctactgatgactcaaacccttggtgggcagcttttagccgggtctgcaaggatatgaacctcactctggagcctgagatcatgcctgctgccactgacaaccgctatatccgcgcggtgggggtcccagctctaggcttctcacccatgaaccgcacacctgtgctgctgcacgaccacgatgaacggctgcatgaggctgtgttcctccgtggggtggacatatatacacgcctgctgcctgcccttgccagtgtgcctgccctgcccagtgacagctgagccctggaactcctaaacctttgcccctggggcttccatcccaaccagtgccaaggacctcctcttcccccttccaaataataaagtctatggacagggctgtctctgaagtactaacacaa

SEQ ID NO: 1762 - DNA, 1298 bp, Homo sapiens
  source 1..1298: mol_type = unassigned DNA
cgacatccggcctcggccacgtggtgggcggaccggggcggtcctgagcctgcgacctcgcaggcgacctcgctggaccctaagtccaggccacagtcagggaagggcgctgagaggcgagcgtgagcccagcgacaggagagtgagctcaccacgcgcagcgccatgaccagcaagggtcccgaggaggagcacccatcggtgacgctcttccgccagtacctgcgtatccgcactgtccagcccaagcctgactatggagctgctgtggctttctttgaggagacagcccgccagctgggcctgggctgtcagaaagtagaggtggcacctggctatgtggtgaccgtgttgacctggccaggcaccaaccctacactctcctccatcttgctcaactcccacacggatgtggtgcctgtcttcaaggaacattggagtcacgacccctttgaggccttcaaggattctgagggcatagccaatcccactgatgccttcactgtcttttatagtgagcggagtccctggtgggtgcgggttaccagcactgggaggccaggccatgcctcacgcttcatggaggacacagcagcagagaagctgcacaaggttgtaaactccatcctggcattccgggagaaggaatggcagaggctgcagtcaaacccccacctgaaagaggggtccgtgacctccgtgaacctgactaagctagagggtggcgtggcctataacgtgatacctgccaccatgagcgccagctttgacttccgtgtggcaccggatgtggacttcaaggcttttgaggagcagctgcagagctggtgccaggcagctggcgagggggtcaccctagagtttgctcagaagtggatgcacccccaagtgacacctactgatgactcaaacccttggtgggcagcttttagccgggtctgcaaggatatgaacctcactctggagcctgagatcatgcctgctgccactgacaaccgctatatccgcgcggtgggggtcccagctctaggcttctcacccatgaaccgcacacctgtgctgctgcacgaccacgatgaacggctgcatgaggctgtgttcctccgtggggtggacatatatacacgcctgctgcctgcccttgccagtgtgcctgccctgcccagtgacagctgagccctggaactcctaaacctttgcccctggggcttccatcccaaccagtgccaaggacctcctcttcccccttccaaataataaagtctatggacagggctgtctctgaagtactaacacaa

SEQ ID NO: 1763 - DNA, 2261 bp, Homo sapiens
  source 1..2261: mol_type = unassigned DNA
ctggcggccgcaggagcgcgtgcggcgtggactttgccgggctcgccacacagccccagacccgtttaggaccgggagaccgaacgcagcgtccagccggggagtttcggcggcgttctccgggcaccgcgcgcgggaagccagacgcagcggggggacacatctcgcggtggcgttgccagagtgaggagttagcaggcaggacttgacgaggctctttggtttttctagtcctcaaccactgaagaagaagcttgatgcttggctgtcagaagacatgaattacgcacggttcatcacggcagcgagcgcagccagaaacccttctcccatccggaccatgactgacatattgagcagaggaccaaaatcgatgatctccttggctggtggcttaccaaatccaaacatgtttccttttaagactgccgtaatcactgtagaaaatggaaagaccatccaatttggagaagagatgatgaagagagcacttcagtattctccgagtgctggaattccagagcttttgtcctggctaaaacagttacaaataaaattgcataatcctcctaccatccattacccacccagtcaaggacaaatggatctatgtgtcacatctggcagccaacaaggtctttgtaaggtgtttgaaatgatcattaatcctggagataatgtcctcctagatgaacctgcttattcaggaactcttcaaagtctgcacccactgggctgcaacattattaatgttgccagtgatgaaagtgggattgttccagattccctaagagacatactttccagatggaaaccagaagatgcaaagaatccccagaaaaacacccccaaatttctttatactgttccaaatggcaacaaccctactggaaactcattaaccagtgaacgcaaaaaggaaatctatgagcttgcaagaaaatatgatttcctcataatagaagatgatccttactattttctccagtttaacaagttcagggtaccaacatttctttccatggatgttgatggacgtgtcatcagagctgactctttttcaaaaatcatttcctctgggttgagaataggatttttaactggtccaaaacccttaatagagagagttattttacacatacaagtttcaacattgcaccccagcacttttaaccagctcatgatatcacagcttctacacgaatggggagaagaaggtttcatggctcatgtagacagggttattgatttctatagtaaccagaaggatgcaatactggcagctgcagacaagtggttaactggtttggcagaatggcatgttcctgctgctggaatgtttttatggattaaagttaaaggcattaatgatgtaaaagaactgattgaagaaaaggccgttaagatgggggtattaatgctccctggaaatgctttctacgtcgatagctcagctcctagcccttacttgagagcatccttctcttcagcttctccagaacagatggatgtggccttccaggtattagcacaacttataaaagaatctttatgaagaaattaaactaggttgggcatggtggctcacacctataatcccagcactttgggaggcagaggagggaggatcacttgaacccaggaattcaaggctgcagtaagctacgatcacaccactgcactctggcctgcatgcactctggcctgcatggcagaacaagaccctgtctctaaaaaaagagaaagaaatcaaactaatcatgctgctcatggatttttccaataaatttcttgttttggcaggaagaaatgaacactggtattagacttaaagattaaatttcctcaaacatgtcctatctgtagtagttcaactagacaccttttaaagtgcctctaaattcatcagatggccaaactgtatttataatccacttaggcattttgaaaaactttcaacctgtaaaaagttacttttatcttggatttattatgaagaactttgtagttgctttgtaatttcccataaattgtctttgaaactaacattttacactgaattattttgagattttaaagaagtaattaagtgcaaaatggtatataatgtgtactttttctacttttaggaaaatttaatgagagcttattgcaaaaattgttataatttggtcattataagtgacttttagtaaaagtaccataaaccttatgttatgccacagaaattcctttaaaataaaattcttaaactaaacata

SEQ ID NO: 1764 - DNA, 2101 bp, Homo sapiens
  source 1..2101: mol_type = unassigned DNA
agcccctgggctagcctctgggccggcgcctaggccggccaacgcggacgccgggttgcggtgattcccagcggcgagtcctcaaccactgaagaagaagcttgatgcttggctgtcagaagacatgaattacgcacggttcatcacggcagcgagcgcagccagaaacccttctcccatccggaccatgactgacatattgagcagaggaccaaaatcgatgatctccttggctggtggcttaccaaatccaaacatgtttccttttaagactgccgtaatcactgtagaaaatggaaagaccatccaatttggagaagagatgatgaagagagcacttcagtattctccgagtgctggaattccagagcttttgtcctggctaaaacagttacaaataaaattgcataatcctcctaccatccattacccacccagtcaaggacaaatggatctatgtgtcacatctggcagccaacaaggtctttgtaaggtgtttgaaatgatcattaatcctggagataatgtcctcctagatgaacctgcttattcaggaactcttcaaagtctgcacccactgggctgcaacattattaatgttgccagtgatgaaagtgggattgttccagattccctaagagacatactttccagatggaaaccagaagatgcaaagaatccccagaaaaacacccccaaatttctttatactgttccaaatggcaacaaccctactggaaactcattaaccagtgaacgcaaaaaggaaatctatgagcttgcaagaaaatatgatttcctcataatagaagatgatccttactattttctccagtttaacaagttcagggtaccaacatttctttccatggatgttgatggacgtgtcatcagagctgactctttttcaaaaatcatttcctctgggttgagaataggatttttaactggtccaaaacccttaatagagagagttattttacacatacaagtttcaacattgcaccccagcacttttaaccagctcatgatatcacagcttctacacgaatggggagaagaaggtttcatggctcatgtagacagggttattgatttctatagtaaccagaaggatgcaatactggcagctgcagacaagtggttaactggtttggcagaatggcatgttcctgctgctggaatgtttttatggattaaagttaaaggcattaatgatgtaaaagaactgattgaagaaaaggccgttaagatgggggtattaatgctccctggaaatgctttctacgtcgatagctcagctcctagcccttacttgagagcatccttctcttcagcttctccagaacagatggatgtggccttccaggtattagcacaacttataaaagaatctttatgaagaaattaaactaggttgggcatggtggctcacacctataatcccagcactttgggaggcagaggagggaggatcacttgaacccaggaattcaaggctgcagtaagctacgatcacaccactgcactctggcctgcatgcactctggcctgcatggcagaacaagaccctgtctctaaaaaaagagaaagaaatcaaactaatcatgctgctcatggatttttccaataaatttcttgttttggcaggaagaaatgaacactggtattagacttaaagattaaatttcctcaaacatgtcctatctgtagtagttcaactagacaccttttaaagtgcctctaaattcatcagatggccaaactgtatttataatccacttaggcattttgaaaaactttcaacctgtaaaaagttacttttatcttggatttattatgaagaactttgtagttgctttgtaatttcccataaattgtctttgaaactaacattttacactgaattattttgagattttaaagaagtaattaagtgcaaaatggtatataatgtgtactttttctacttttaggaaaatttaatgagagcttattgcaaaaattgttataatttggtcattataagtgacttttagtaaaagtaccataaaccttatgttatgccacagaaattcctttaaaataaaattcttaaact

SEQ ID NO: 1765 - DNA, 806 bp, Homo sapiens
  source 1..806: mol_type = unassigned DNA
actcaggagcccagctggcttcccccagtggagccggcactggggccacaggtggagctgcctgccagtcccgggctgtgagcccgcactcctcagcccttgggcgaactccatcgtcactccaaaatgctgagatcttcgagaaagtgatgttgaaattcgtcttggtcgccgggatgcttcccaggagagtgcccagagtttcactaacgaaagatggtcctcaaccactgaagaagaagcttgatgcttggctgtcagaagacatgaattacgcacggttcatcacggcagcgagcgcagccagaaacccttctcccatccggaccatgactgacatattgagcagaggaccaaaatcgatgatctccttggctggtggcttaccaaatccaaacatgtttccttttaagactgccgtaatcactgtagaaaatggaaagaccatccaatttggagaagagatgatgaagagagcacttcagtattctccgagtgctggaattccagagcttttgtcctggctaaaacagttacaaataaaattgcataatcctcctaccatccattacccacccagtcaaggacaaatggatctatgtgtcacatctggcagccaacaaggtctttgtaaggtgtttgaaatgatcattaatcctggagataatgtcctcctagatgaacctgcttattcaggaactcttcaaagtctgcacccactgggctgcaacattattaatgttgccagtgatgaaagtgggattgttccagattccctaagagacatactttccagatggaaacca

SEQ ID NO: 1766 - DNA, 810 bp, Homo sapiens
  source 1..810: mol_type = unassigned DNA
ccctgcagtggacccaagtcgccgccagatggttcccgaggattaggatcacgggcacttccggtcccctcggtcagcccctgggctagcctctgggccggcgcctaggccggccaacgcggacgccgggttgcgtcctcaaccactgaagaagaagcttgatgcttggctgtcagaagacatgaattacgcacggttcatcacggcagcgagcgcagccagaaacccttctcccatccggaccatgactgacatattgagcagaggaccaaaatcgatgatctccttggctggtggcttaccaaatccaaacatgtttccttttaagactgccgtaatcactgtagaaaatggaaagaccatccaatttggagaagagatgatgaagagagcacttcagtattctccgagtgctggaattccagagcttttgtcctggctaaaacagttacaaataaaattgcataatcctcctaccatccattacccacccagtcaaggacaaatggatctatgtgtcacatctggcagccaacaaggtctttgtaaggtgtttgaaatgatcattaatcctggagataatgtcctcctagatgaacctgcttattcaggaactcttcaaagtctgcacccactgggctgcaacattattaatgttgccagtgatgaaagtgggattgttccagattccctaagagacatactttccagatggaaaccagaagatgcaaagaatccccagaaaaacacccccaaatttctttatactgttccaaatggcaacaaccctactggaaactcattaaccag

SEQ ID NO: 1767 - DNA, 2113 bp, Homo sapiens
  source 1..2113: mol_type = unassigned DNA
gggctagcctctgggccggcgcctaggccggccaacgcggacgccgggttgcggtgattcccagcggcgagtcctcaaccactgaagaagaagcttgatgcttggctgtcagaagacatgaattacgcacggttcatcacggcagcgagcgcagccagaaacccttctcccatccggaccatgagtgagaaacgggctgacatattgagcagaggaccaaaatcgatgatctccttggctggtggcttaccaaatccaaacatgtttccttttaagactgccgtaatcactgtagaaaatggaaagaccatccaatttggagaagagatgatgaagagagcacttcagtattctccgagtgctggaattccagagcttttgtcctggctaaaacagttacaaataaaattgcataatcctcctaccatccattacccacccagtcaaggacaaatggatctatgtgtcacatctggcagccaacaaggtctttgtaaggtgtttgaaatgatcattaatcctggagataatgtcctcctagatgaacctgcttattcaggaactcttcaaagtctgcacccactgggctgcaacattattaatgttgccagtgatgaaagtgggattgttccagattccctaagagacatactttccagatggaaaccagaagatgcaaagaatccccagaaaaacacccccaaatttctttatactgttccaaatggcaacaaccctactggaaactcattaaccagtgaacgcaaaaaggaaatctatgagcttgcaagaaaatatgatttcctcataatagaagatgatccttactattttctccagtttaacaagttcagggtaccaacatttctttccatggatgttgatggacgtgtcatcagagctgactctttttcaaaaatcatttcctctgggttgagaataggatttttaactggtccaaaacccttaatagagagagttattttacacatacaagtttcaacattgcaccccagcacttttaaccagctcatgatatcacagcttctacacgaatggggagaagaaggtttcatggctcatgtagacagggttattgatttctatagtaaccagaaggatgcaatactggcagctgcagacaagtggttaactggtttggcagaatggcatgttcctgctgctggaatgtttttatggattaaagttaaaggcattaatgatgtaaaagaactgattgaagaaaaggccgttaagatgggggtattaatgctccctggaaatgctttctacgtcgatagctcagctcctagcccttacttgagagcatccttctcttcagcttctccagaacagatggatgtggccttccaggtattagcacaacttataaaagaatctttatgaagaaattaaactaggttgggcatggtggctcacacctataatcccagcactttgggaggcagaggagggaggatcacttgaacccaggaattcaaggctgcagtaagctacgatcacaccactgcactctggcctgcatgcactctggcctgcatggcagaacaagaccctgtctctaaaaaaagagaaagaaatcaaactaatcatgctgctcatggatttttccaataaatttcttgttttggcaggaagaaatgaacactggtattagacttaaagattaaatttcctcaaacatgtcctatctgtagtagttcaactagacaccttttaaagtgcctctaaattcatcagatggccaaactgtatttataatccacttaggcattttgaaaaactttcaacctgtaaaaagttacttttatcttggatttattatgaagaactttgtagttgctttgtaatttcccataaattgtctttgaaactaacattttacactgaattattttgagattttaaagaagtaattaagtgcaaaatggtatataatgtgtactttttctacttttaggaaaatttaatgagagcttattgcaaaaattgttataatttggtcattataagtgacttttagtaaaagtaccataaaccttatgttatgccacagaaattcctttaaaataaaattcttaaactaaacata

SEQ ID NO: 1768 - DNA, 2193 bp, Homo sapiens
  source 1..2193: mol_type = unassigned DNA
aaaatgcacagtcccagtgactgagaggaggccagcggagcgcgcgggaacgagggtggggccgctcccggctgggcgcagctcgggagccccctgcagtggacccaagtcgccgccagatggttcccgaggattaggatcacgggcacttccggtcccctcgtcctcaaccactgaagaagaagcttgatgcttggctgtcagaagacatgaattacgcacggttcatcacggcagcgagcgcagccagaaacccttctcccatccggaccatgactgacatattgagcagaggaccaaaatcgatgatctccttggctggtggcttaccaaatccaaacatgtttccttttaagactgccgtaatcactgtagaaaatggaaagaccatccaatttggagaagagatgatgaagagagcacttcagtattctccgagtgctggaattccagagcttttgtcctggctaaaacagttacaaataaaattgcataatcctcctaccatccattacccacccagtcaaggacaaatggatctatgtgtcacatctggcagccaacaaggtctttgtaaggtgtttgaaatgatcattaatcctggagataatgtcctcctagatgaacctgcttattcaggaactcttcaaagtctgcacccactgggctgcaacattattaatgttgccagtgatgaaagtgggattgttccagattccctaagagacatactttccagatggaaaccagaagatgcaaagaatccccagaaaaacacccccaaatttctttatactgttccaaatggcaacaaccctactggaaactcattaaccagtgaacgcaaaaaggaaatctatgagcttgcaagaaaatatgatttcctcataatagaagatgatccttactattttctccagtttaacaagttcagggtaccaacatttctttccatggatgttgatggacgtgtcatcagagctgactctttttcaaaaatcatttcctctgggttgagaataggatttttaactggtccaaaacccttaatagagagagttattttacacatacaagtttcaacattgcaccccagcacttttaaccagctcatgatatcacagcttctacacgaatggggagaagaaggtttcatggctcatgtagacagggttattgatttctatagtaaccagaaggatgcaatactggcagctgcagacaagtggttaactggtttggcagaatggcatgttcctgctgctggaatgtttttatggattaaagttaaaggcattaatgatgtaaaagaactgattgaagaaaaggccgttaagatgggggtattaatgctccctggaaatgctttctacgtcgatagctcagctcctagcccttacttgagagcatccttctcttcagcttctccagaacagatggatgtggccttccaggtattagcacaacttataaaagaatctttatgaagaaattaaactaggttgggcatggtggctcacacctataatcccagcactttgggaggcagaggagggaggatcacttgaacccaggaattcaaggctgcagtaagctacgatcacaccactgcactctggcctgcatgcactctggcctgcatggcagaacaagaccctgtctctaaaaaaagagaaagaaatcaaactaatcatgctgctcatggatttttccaataaatttcttgttttggcaggaagaaatgaacactggtattagacttaaagattaaatttcctcaaacatgtcctatctgtagtagttcaactagacaccttttaaagtgcctctaaattcatcagatggccaaactgtatttataatccacttaggcattttgaaaaactttcaacctgtaaaaagttacttttatcttggatttattatgaagaactttgtagttgctttgtaatttcccataaattgtctttgaaactaacattttacactgaattattttgagattttaaagaagtaattaagtgcaaaatggtatataatgtgtactttttctacttttaggaaaatttaatgagagcttattgcaaaaattgttataatttggtcattataagtgacttttagtaaaagtaccataaaccttatgttatgccacagaaattcctttaaaataaaattcttaaactaaacata

SEQ ID NO: 1769 - DNA, 3590 bp, Homo sapiens
  source 1..3590: mol_type = unassigned DNA
ggaagatttacgtatggtgcctcgctctgggatagctttacggcttctgggagctgctgcttcgctgtgagaagtatccgcgacgagctatccgggaaagggccgaatgcgatcaaacctaatccgcgagacttgctaaggttctgtgctacaaattgatgtttagataaacttcagtgaaatgactcttcaggaattggtgcataaggctgcctcctgttatatggacagagtagctgtatgttttgatgaatgcaacaaccagcttccagtttactacacctacaagactgtggttaatgctgcttctgaattatcaaattttctgctgttacactgtgactttcaaggaattcgggaaattggtctctactgccaacctgggatagacttaccctcttggattttaggaattctccaagtcccggctgcttatgtacctatcgagccagattcaccaccgtcattatcaactcattttatgaaaaaatgtaatctaaagtatatccttgttgaaaaaaaacaaattaataaatttaaatcttttcatgaaacattattgaactatgatacatttacagtggaacataatgacctagtgctcttcagacttcactggaaaaatactgaggtgaacttgatgctaaatgatggaaaagagaaatatgaaaaagaaaaaataaaaagcataagttctgagcatgtcaatgaagaaaaagcagaagaacacatggatctgaggctaaagcattgcttagcctatgttctacatacatcagggactacagggataccgaagattgtcagagtgcctcataagtgtatagtaccaaatatccagcattttcgggtactttttgacatcacacaagaagatgttttgtttctggcttcacctctgaccttcgatccttctgttgtggaaatatttcttgctctatcaagtggtgcctctctgcttattgtaccaacttccgtcaagttgctcccatcaaaattagccagcgttctcttttcccatcatagagtgactgttttgcaggcaacaccaacattgcttagaagatttggatctcagcttatcaagtcaactgttttgtcagccactacttctcttcgagtattagcccttggtggtgaagcgtttccatcattgacagttctcagaagctggagaggagaaggcaataaaacacaaatatttaatgtttatggtatcacagaggtatcaagttgggcgaccatttataggattccagagaagactcttaactctactctcaaatgtgaattgcctgtacaactgggatttccacttcttggaacagtagttgaagtcagagatactaatggcttcacaattcaggaaggcagtggccaagtatttttaggtggcagaaacagagtgtgttttcttgatgatgaagtgacagtaccacttggcacaatgcgagctacaggagactttgtgactgtgaaagatggagagattttttttttgggacgaaaagacagtcagatcaaacgtcatggcaaacgtcttaacattgaacttgtgcaacaggttgctgaagagcttcagcaagtggagtcttgtgcagttacatggtataatcaggaaaaattaattctcttcatggtgtctaaagatgcttcagtaaaagaatacatctttaaagaactgcagaaatatcttccaagtcatgcagtcccggatgagcttgtattgatcgactctctaccatttacatcccacggcaaaattgatgtttctgagttaaacaagatatatttaaactacataaacttgaagtctgagaataagctcagtgggaaagaggacctttgggaaaaattacagtatttgtggaagtctactctgaatctcccagaagatcttttgagggttcctgatgagtcactcttcttaaatagtggtggagattccttaaagtccatccggctcctcagtgagattgaaaaacttgttggtacatcagtacctgggcttctggaaattattctcagcagttccattttagagatttataatcacatccttcaaacagtggttccagatgaagatgtgacattcaggaagagttgtgccacaaaaaggaaactcagcgacattaatcaagaggaagccagtggaacatctttacatcagaaagccatcatgactttcacttgccacaatgagattaatgcttttgttgtactgagcagagggagtcaaattttgtctctgaattccactaggtttttaacaaagttaggacattgctcttcagcctgtccttctgactcagtttcacagaccaacattcaaaatttgaaaggcttaaattctccagttcttattgggaagtcaaaagatccatcctgtgttgcaaaagtttctgaagaggggaaacctgcgatagggactcagaaaatggagttacatgtgaggtggaggtcagacacaggcaaatgtgtagatgcttcaccgctggttgtaatacccacttttgataagtcatctacaactgtgtacattggttcccattctcatagaatgaaggcagttgacttttactctgggaaggtaaaatgggaacagattttgggagatcgaattgaatcctcagcatgtgtatctaagtgtggaaactttattgtggtgggctgttataatggattagtttatgttctgaaaagtaatagtggagaaaaatactggatgtttactactgaagatgctgtcaaaagctcggcaaccatggatccaaccacaggactcatttacattggatctcatgaccagcacgcatatgctttagatatttatagaaagaagtgtgtttggaagtcaaaatgtggaggaactgtcttttcctctccgtgtttgaacctgattccacatcatttgtattttgctacattgggaggacttttactggctgtaaatcctgctactgggaacgttatttggaaacattcctgtggaaaaccactcttctcttccccacaatgttgctcacagtatatttgtattggctgtgtagatgggaatttactctgctttactcactttggagaacaggtttggcagttctctaccagtggaccaatcttttcatccccgtgtacctcaccatcagagcaaaaaatattttttggttcccatgattgctttatctactgttgtaacatgaaaggtcacctgcagtggaaatttgaaactacttcaagggtctatgcaacaccgtttgctttccataactacaatggcagcaatgaaatgttgctggcagcagcatctactgatgggaaagtgtggatcttggaatctcagagtggacaattgcaaagtgtttatgaacttcctggagaagtcttctcttctcctgtggtcctggaatcaatgctcattattgggtgtagagataattatgtttattgtctggatttattgggtggcaatcaaaaataatcaaatacagtccttatttgtataacaaatgtgagatatttgaaaatattttaccattatacatcatgtggacttattttatattaaagaagattatattttggctaagaaa

SEQ ID NO: 1770 - DNA, 2959 bp, Homo sapiens
  source 1..2959: mol_type = unassigned DNA
atagctttacggcttctgggagctgctgcttcgctgtgagaagtatccgcgacgagctatccgggaaagggccgaatgcgatcaaacctaatccgcgagacttgctaaggttctgtgctacaaattgatgtttagataaacttcagtgaaatgactcttcaggaattggtgcataaggctgcctcctgttatatggacagagtagctgtatgttttgatgaatgcaacaaccagcttccagtttactacacctacaagactgtggttaatgctgcttctgaattatcaaattttctgctgttacactgtgactttcaaggaattcgggaaattggtctctactgccaacctgggatagacttaccctcttggattttaggaattctccaagtcccggctgcttatgtacctatcgagccagattcaccaccgtcattatcaactcattttatgaaaaaatgtaatctaaagtatatccttgttgaaaaaaaacaaattaatggtactttttgacatcacacaagaagatgttttgtttctggcttcacctctgaccttcgatccttctgttgtggaaatatttcttgctctatcaagtggtgcctctctgcttattgtaccaacttccgtcaagttgctcccatcaaaattagccagcgttctcttttcccatcatagagtgactgttttgcaggcaacaccaacattgcttagaagatttggatctcagcttatcaagtcaactgttttgtcagccactacttctcttcgagtattagcccttggtggtgaagcgtttccatcattgacagttctcagaagctggagaggagaaggcaataaaacacaaatatttaatgtttatggtatcacagaggtatcaagttgggcgaccatttataggattccagagaagactcttaactctactctcaagttgctgaagagcttcagcaagtggagtcttgtgcagttacatggtataatcaggaaaaattaattctcttcatggtgtctaaagatgcttcagtaaaagaatacatctttaaagaactgcagaaatatcttccaagtcatgcagtcccggatgagcttgtattgatcgactctctaccatttacatcccacggcaaaattgatgtttctgagttaaacaagatatatttaaactacataaacttgaagtctgagaataagctcagtgggaaagaggacctttgggaaaaattacagtatttgtggaagtctactctgaatctcccagaagatcttttgagggttcctgatgagtcactcttcttaaatagtggtggagattccttaaagtccatccggctcctcagtgagattgaaaaacttgttggtacatcagtacctgggcttctggaaattattctcagcagttccattttagagatttataatcacatccttcaaacagtggttccagatgaagatgtgacattcaggaagagttgtgccacaaaaaggaaactcagcgacattaatcaagaggaagccagtggaacatctttacatcagaaagccatcatgactttcacttgccacaatgagattaatgcttttgttgtactgagcagagggagtcaaattttgtctctgaattccactaggtttttaacaaagttaggacattgctcttcagcctgtccttctgactcagtttcacagaccaacattcaaaatttgaaaggcttaaattctccagttcttattgggaagtcaaaagatccatcctgtgttgcaaaagtttctgaagaggggaaacctgcgatagggactcagaaaatggagttacatgtgaggtggaggtcagacacaggcaaatgtgtagatgcttcaccgctggttgtaatacccacttttgataagtcatctacaactgtgtacattggttcccattctcatagaatgaaggcagttgacttttactctgggaaggtaaaatgggaacagattttgggagatcgaattgaatcctcagcatgtgtatctaagtgtggaaactttattgtggtgggctgttataatggattagtttatgttctgaaaagtaatagtggagaaaaatactggatgtttactactgaagatgctgtcaaaagctcggcaaccatggatccaaccacaggactcatttacattggatctcatgaccagcacgcatatgctttagatatttatagaaagaagtgtgtttggaagtcaaaatgtggaggaactgtcttttcctctccgtgtttgaacctgattccacatcatttgtattttgctacattgggaggacttttactggctgtaaatcctgctactgggaacgttatttggaaacattcctgtggaaaaccactcttctcttccccacaatgttgctcacagtatatttgtattggctgtgtagatgggaatttactctgctttactcactttggagaacaggtttggcagttctctaccagtggaccaatcttttcatccccgtgtacctcaccatcagagcaaaaaatattttttggttcccatgattgctttatctactgttgtaacatgaaaggtcacctgcagtggaaatttgaaactacttcaagggtctatgcaacaccgtttgctttccataactacaatggcagcaatgaaatgttgctggcagcagcatctactgatgggaaagtgtggatcttggaatctcagagtggacaattgcaaagtgtttatgaacttcctggagaagtcttctcttctcctgtggtcctggaatcaatgctcattattgggtgtagagataattatgtttattgtctggatttattgggtggcaatcaaaaataatcaaatacagtccttatttgtataacaaatgtgagatatttgaaaatattttaccattatacatcatgtggacttattttatattaaagaagattatattttggctaag

SEQ ID NO: 1771 - DNA, 3157 bp, Homo sapiens
  source 1..3157: mol_type = unassigned DNA
gtatggtgcctcgctctgggatagctttacggcttctgggagctgctgcttcgctgtgagaagtatccgcgacgagctatccgggaaagggccgaatgcgatcaaacctaatccgcgagacttgctaaggttctgtgctacaaattgatgtttagataaacttcagtgaaatgactcttcaggaattggtgcataaggctgcctcctgttatatggacagagtagctgtatgttttgatgaatgcaacaaccagcttccagtttactacacctacaagactgtggttaatgctgcttctgaattatcaaattttctgctgttacactgtgactttcaaggaattcgggaaattggtctctactgccaacctgggatagacttaccctcttggattttaggaattctccaagtcccggctgcttatgtacctatcgagccagattcaccaccgtcattatcaactcattttatgaaaaaatgtaatctaaagtatatccttgttgaaaaaaaacaaattaataaatttaaatcttttcatgaaacattattgaactatgatacatttacagtggaacataatgacctagtgctcttcagacttcactggaaaaatactgaggtgaacttgatgctaaatgatggaaaagagaaatatgaaaaagaaaaaataaaaagcataagttctgagcatgtcaatgaagaaaaagcagaagaacacatggatctgaggctaaagcattgcttagcctatgttctacatacatcagggactacagggataccgaagattgtcagagtgcctcataagtgtatagtaccaaatatccagcattttcgggtactttttgacatcacacaagaagatgttttgtttctggcttcacctctgaccttcgatccttctgttgtggaaatatttcttgctctatcaagtggtgcctctctgcttattgtaccaacttccgtcaagttgctcccatcaaaattagccagcgttctcttttcccatcatagagtgactgttttgcaggcaacaccaacattgcttagaagatttggatctcagcttatcaagtcaactgttttgtcagccactacttctcttcgagtattagcccttggtggtgaagcgtttccatcattgacagttctcagaagctggagaggagaaggcaataaaacacaaatatttaatgtttatggtatcacagaggtatcaagttgggcgaccatttataggattccagagaagactcttaactctactctcaaatgtgaattgcctgtacaactgggatttccacttcttggaacagtagttgaagtcagagatactaatggcttcacaattcaggaaggcagtggccaagtatttttaggtggcagaaacagagtgtgttttcttgatgatgaagtgacagtaccacttggcacaatgcgagctacaggagactttgtgactgtgaaagatggagagattttttttttgggacgaaaagacagtcagatcaaacgtcatggcaaacgtcttaacattgaacttgtgcaacaggttgctgaagagcttcagcaagtggagtcttgtgcagttacatggtataatcaggaaaaattaattctcttcatggtgtctaaagatgcttcagtaaaagaatacatctttaaagaactgcagaaatatcttccaagtcatgcagtcccggatgagcttgtattgatcgactctctaccatttacatcccacggcaaaattgatgtttctgagttaaacaagatatatttaaactacataaacttgaagtctgagaataagctcagtgggaaagaggacctttgggaaaaattacagtatttgtggaagtctactctgaatctcccagaagatcttttgagggttcctgatgagtcactcttcttaaatagtggtggagattccttaaagtccatccggctcctcagtgagattgaaaaacttgttggtacatcagtacctgggcttctggaaattattctcagcagttccattttagagatttataatcacatccttcaaacagtggttccagatgaagatgtgacattcaggaagagttgtgccacaaaaaggaaactcagcgacattaatcaagaggaagccagtggaacatctttacatcagaaagccatcatgactttcacttgccacaatgagattaatgcttttgttgtactgagcagagggagtcaaattttgtctctgaattccactaggtttttaacaaagttaggacattgctcttcagcctgtccttctgactcagtttcacagaccaacattcaaaatttgaaaggcttaaattctccagttcttattgggaagtcaaaagatccatcctgtgttgcaaaagtttctgaagaggggaaacctgcgatagggactcagaaaatggagttacatgtgaggtggaggtcagacacaggcaaatgtgtagatgcttcaccgctggttgtaatacccacttttgataagtcatctacaactgtgtacattggttcccattctcatagaatgaaggcagttgacttttactctgggaaggtaaaatgggaacagattttgggagatcgaattgaatcctcagcatgtgtatctaagtgtggaaactttattgtggtgggtttggcagttctctaccagtggaccaatcttttcatccccgtgtacctcaccatcagagcaaaaaatattttttggttcccatgattgctttatctactgttgtaacatgaaaggtcacctgcagtggaaatttgaaactacttcaagggtctatgcaacaccgtttgctttccataactacaatggcagcaatgaaatgttgctggcagcagcatctactgatgggaaagtgtggatcttggaatctcagagtggacaattgcaaagtgtttatgaacttcctggagaagtcttctcttctcctgtggtcctggaatcaatgctcattattgggtgtagagataattatgtttattgtctggatttattgggtggcaatcaaaaataatcaaatacagtccttatttgtataacaaatgtgagatatttgaaaatattttaccattatacatcatgtggacttattttatattaaagaagattatattttggctaag

SEQ ID NO: 1772 - DNA, 3004 bp, Homo sapiens
  source 1..3004: mol_type = unassigned DNA
ggaagatttacgtatggtgcctcgctctgggatagctttacggcttctgggagctgctgcttcgctgtgagaagtatccgcgacgagctatccgggaaagggccgaatgcgatcaaacctaatccgcgagacttgctaaggttctgtgctacaaattgatgtttagataaacttcagtgaaatgactcttcaggaattggtgcataaggctgcctcctgttatatggacagagtagctgtatgttttgatgaatgcaacaaccagcttccagtttactacacctacaagactgtggttaatgctgcttctgaattatcaaattttctgctgttacactgtgactttcaaggaattcgggaaattggtctctactgccaacctgggatagacttaccctcttggattttaggaattctccaagtcccggctgcttatgtacctatcgagccagattcaccaccgtcattatcaactcattttatgaaaaaatgtaatctaaagtatatccttgttgaaaaaaaacaaattaataaatttaaatcttttcatgaaacattattgaactatgatacatttacagtggaacataatgacctagtgctcttcagacttcactggaaaaatactgaggtgaacttgatgctaaatgatggaaaagagaaatatgaaaaagaaaaaataaaaagcataagttctgagcatgtcaatgaagaaaaagcagaagaacacatggatctgaggctaaagcattgcttagcctatgttctacatacatcagggactacagggataccgaagattgtcagagtgcctcataagtgtatagtaccaaatatccagcattttcgggtactttttgacatcacacaagaagatgttttgtttctggcttcacctctgaccttcgatccttctgttgtggaaatatttcttgctctatcaagtggtgcctctctgcttattgtaccaacttccgtcaagttgctcccatcaaaattagccagcgttctcttttcccatcatagagtgactgttttgcaggcaacaccaacattgcttagaagatttggatctcagcttatcaagtcaactgttttgtcagccactacttctcttcgagtattagcccttggtggtgaagcgtttccatcattgacagttctcagaagctggagaggagaaggcaataaaacacaaatatttaatgtttatggtatcacagaggtatcaagttgggcgaccatttataggattccagagaagactcttaactctactctcaaatgtgaattgcctgtacaactgggatttccacttcttggaacagtagttgaagtcagagatactaatggcttcacaattcaggaaggcagtggccaagtatttttaggtggcagaaacagagtgtgttttcttgatgatgaagtgacagtaccacttggcacaatgcgagctacaggagactttgtgactgtgaaagatggagagattttttttttgggacgaaaagacagtcagatcaaacgtcatggcaaacgtcttaacattgaacttgtgcaacaggttgctgaagagcttcagcaagtggagtcttgtgcagttacatggtataatcaggaaaaattaattctcttcatggtgtctaaagatgcttcagtaaaagaatacatctttaaagaactgcagaaatatcttccaagtcatgcagtcccggatgagcttgtattgatcgactctctaccatttacatcccacggcaaaattgatgtttctgagttaaacaagatatatttaaactacataaacttgaagtctgagaataagctcagtgggaaagaggacctttgggaaaaattacagtatttgtggaagtctactctgaatctcccagaagatcttttgagggttcctgatgagtcactcttcttaaatagtggtggagattccttaaagtccatccggctcctcagtgagattgaaaaacttgttggtacatcagtacctgggcttctggaaattattctcagcagttccattttagagatttataatcacatccttcaaacagtggttccagatgaagatgtgacattcaggaagagttgtgccacaaaaaggaaactcagcgacattaatcaagaggaagccagtggaacatctttacatcagaaagccatcatgactttcacttgccacaatgagattaatgcttttgttgtactgagcagagggagtcaaattttgtctctgaattccactaggtttttaacaaagttaggacattgctcttcagcctgtccttctgactcagtttcacagaccaacattcaaaatttgaaaggcttaaattctccagttcttattgggaagtcaaaagatccatcctgtgttgcaaaagtttctgaagaggggaaacctgcgatagggactcagaaaatggagttacatgtgaggtggaggtcagacacaggcaaatgtgtagatgcttcaccgctggttgtaatacccacttttgataagtcatctacaactgtgtacattggttcccattctcatagaatgaaggcagttgacttttactctgggaaggtaaaatgggaacagattttgggagatcgaattgaatcctcagcatgtgtatctaagtgtggaaactttattgtggtgggtaagtttttgaatttgaggtttgtggagttaaattgaattaccatacaataatcttcataggcccaagttaaattttttaaaaatctaaatatgatgggtttggttgctgtccaaaaattatagttaaccctgtgctgattaatattgtgggccttggggtcaagagtccctggatttgaacctacctgtatagctattatgaactctgtgacctttggcaagttactgaacctcttagaatttcactttccttgtgggtaaaatgggaataataataaaatgtgttgctgtatcacaaataccccaaaactcaacaacctagaacaacacaaa

SEQ ID NO: 1773 - DNA, 3241 bp, Homo sapiens
  source 1..3241: mol_type = unassigned DNA
ccgcgacgagctatccgggaaagggccgaatgcgatcaaacctaatccgcgagacttgctaaaattctccaagtcccggctgcttatgtacctatcgagccagattcaccaccgtcattatcaactcattttatgaaaaaatgtaatctaaagtatatccttgttgaaaaaaaacaaattaataaatttaaatcttttcatgaaacattattgaactatgatacatttacagtggaacataatgacctagtgctcttcagacttcactggaaaaatactgaggtgaacttgatgctaaatgatggaaaagagaaatatgaaaaagaaaaaataaaaagcataagttctgagcatgtcaatgaagaaaaagcagaagaacacatggatctgaggctaaagcattgcttagcctatgttctacatacatcagggactacagggataccgaagattgtcagagtgcctcataagtgtatagtaccaaatatccagcattttcgggtactttttgacatcacacaagaagatgttttgtttctggcttcacctctgaccttcgatccttctgttgtggaaatatttcttgctctatcaagtggtgcctctctgcttattgtaccaacttccgtcaagttgctcccatcaaaattagccagcgttctcttttcccatcatagagtgactgttttgcaggcaacaccaacattgcttagaagatttggatctcagcttatcaagtcaactgttttgtcagccactacttctcttcgagtattagcccttggtggtgaagcgtttccatcattgacagttctcagaagctggagaggagaaggcaataaaacacaaatatttaatgtttatggtatcacagaggtatcaagttgggcgaccatttataggattccagagaagactcttaactctactctcaaatgtgaattgcctgtacaactgggatttccacttcttggaacagtagttgaagtcagagatactaatggcttcacaattcaggaaggcagtggccaagtatttttaggtggcagaaacagagtgtgttttcttgatgatgaagtgacagtaccacttggcacaatgcgagctacaggagactttgtgactgtgaaagatggagagattttttttttgggacgaaaagacagtcagatcaaacgtcatggcaaacgtcttaacattgaacttgtgcaacaggttgctgaagagcttcagcaagtggagtcttgtgcagttacatggtataatcaggaaaaattaattctcttcatggtgtctaaagatgcttcagtaaaagaatacatctttaaagaactgcagaaatatcttccaagtcatgcagtcccggatgagcttgtattgatcgactctctaccatttacatcccacggcaaaattgatgtttctgagttaaacaagatatatttaaactacataaacttgaagtctgagaataagctcagtgggaaagaggacctttgggaaaaattacagtatttgtggaagtctactctgaatctcccagaagatcttttgagggttcctgatgagtcactcttcttaaatagtggtggagattccttaaagtccatccggctcctcagtgagattgaaaaacttgttggtacatcagtacctgggcttctggaaattattctcagcagttccattttagagatttataatcacatccttcaaacagtggttccagatgaagatgtgacattcaggaagagttgtgccacaaaaaggaaactcagcgacattaatcaagaggaagccagtggaacatctttacatcagaaagccatcatgactttcacttgccacaatgagattaatgcttttgttgtactgagcagagggagtcaaattttgtctctgaattccactaggtttttaacaaagttaggacattgctcttcagcctgtccttctgactcagtttcacagaccaacattcaaaatttgaaaggcttaaattctccagttcttattgggaagtcaaaagatccatcctgtgttgcaaaagtttctgaagaggggaaacctgcgatagggactcagaaaatggagttacatgtgaggtggaggtcagacacaggcaaatgtgtagatgcttcaccgctggttgtaatacccacttttgataagtcatctacaactgtgtacattggttcccattctcatagaatgaaggcagttgacttttactctgggaaggtaaaatgggaacagattttgggagatcgaattgaatcctcagcatgtgtatctaagtgtggaaactttattgtggtgggctgttataatggattagtttatgttctgaaaagtaatagtggagaaaaatactggatgtttactactgaagatgctgtcaaaagctcggcaaccatggatccaaccacaggactcatttacattggatctcatgaccagcacgcatatgctttagatatttatagaaagaagtgtgtttggaagtcaaaatgtggaggaactgtcttttcctctccgtgtttgaacctgattccacatcatttgtattttgctacattgggaggacttttactggctgtaaatcctgctactgggaacgttatttggaaacattcctgtggaaaaccactcttctcttccccacaatgttgctcacagtatatttgtattggctgtgtagatgggaatttactctgctttactcactttggagaacaggtttggcagttctctaccagtggaccaatcttttcatccccgtgtacctcaccatcagagcaaaaaatattttttggttcccatgattgctttatctactgttgtaacatgaaaggtcacctgcagtggaaatttgaaactacttcaagggtctatgcaacaccgtttgctttccataactacaatggcagcaatgaaatgttgctggcagcagcatctactgatgggaaagtgtggatcttggaatctcagagtggacaattgcaaagtgtttatgaacttcctggagaagtcttctcttctcctgtggtcctggaatcaatgctcattattgggtgtagagataattatgtttattgtctggatttattgggtggcaatcaaaaataatcaaatacagtccttatttgtataacaaatgtgagatatttgaaaatattttaccattatacatcatgtggacttattttatattaaagaagattatattttggctaagaaa

SEQ ID NO: 1774 - DNA, 3233 bp, Homo sapiens
  source 1..3233: mol_type = unassigned DNA
cctcagatttctcaggagaccagaactgatctgccagccttgctgccttttgttgctctgctctttacattgtctttacagtcaccaggtgtcaagatgctgcaagtacataggactggactgggcaggctgggggtcagcctctccaagggtcttcaccacaaagctgtgttggccgtccggagggaggatgtgaacgcctgggagagaagggccccgctagctcccaagcacatcaaaggcatcaccaatctgggatacaaggtcttgatacagccttcgaatcggcgggccattcatgataaggactatgtcaaagctggtggcattcttcaggaggatatttctgaagcttgtctaattttaggagttaaaagacctccagaggaaaaattaatgtccaggaagacttatgcatttttctcccacacaataaaagctcaggaggccaatatgggcttgttggatgagattctaaaacaggaaattcgccttattgattatgagaaaatggtggatcatagaggagtacgggtagtggcatttggacagtgggctggtgtggcaggaatgatcaacattttacatggaatgggtttaaggctccttgctttgggacatcacacaccttttatgcacattggcatggctcataactacaggaatagcagtcaggctgtgcaagctgtccgtgatgctggctatgaaatatctttgggtttgatgcctaagtcaataggacccttaacatttgtgttcacaggaactggtaatgtttctaagggagcccaagcaatctttaatgagctaccttgtgaatatgtggagccccatgaattaaaagaagtttcccaaactggagacctcagaaaagtgtatgggacggtgttaagtcgtcatcatcatcttgtcaggaaaacagatgctgtgtatgatcctgcagagtatgacaaacatccggagcgctacataagtcgttttaatactgatattgcaccctatacaacttgcttaattaatggaatctactgggaacaaaacactcctcgcctcctaacccgccaagatgctcagagtctcctggctccgggcaagttctcacctgctggtgtggaaggctgccctgcattaccacacaaactcgtggcaatatgtgacatttcagctgacacaggagggtctatagagtttatgactgagtgtacaacaatagagcatcccttttgcatgtatgatgcagaccagcatattattcatgacagtgttgaaggctcggggatcctgatgtgttccattgacaatttgccggcacagctcccaattgaagctacagaatgctttggagacatgctttacccttatgttgaagaaatgatattatcagacgcgacacagcctcttgaaagtcagaatttttctcctgtggtgagagatgcagtgattacatccaacggtacattacctgataaatataaatatatccagacactccgggagagcagggaacgtgctcagtcactttcaatgggcaccaggagaaaggttttggttcttggatctggctacatatctgagcctgtattagaatatttatcaagagatggcaatatagaaataacagtaggatctgacatgaagaatcaaattgaacagttaggcaagaaatataatattaatcctgttagcatggacatttgtaaacaagaagagaagctgggcttcttggtggcaaaacaggatcttgtcatcagcttgttgccttatgtattgcaccctcttgtggccaaggcctgcatcacaaacaaagttaacatggtcactgcaagctacatcacaccagcactaaaagaattggaaaagagtgtggaagatgctggcatcacaatcattggtgaattgggattggaccctggtctggatcacatgttagcaatggaaacaatagataaagccaaggaagtgggagccacgattgaatcatatatttcctactgtggtgggcttccagcccctgaacattcaaacaatccattgagatataaatttagctggagtccagtgggagttttgatgaatgtaatgcagtctgccacctatctgctcgatggaaaggttgtgaatgttgcaggaggcatctcctttcttgatgccgttacgtccatggatttttttccaggattaaatttggaaggctatcctaacagagacagtacgaaatatgctgagatttatggcatttcttctgctcacactttgttgcgggggacactgagatataagggatatatgaaagctttgaatggatttgtaaaattaggtcttataaacagagaagcgcttcctgcctttagacctgaggccaaccctctcacctggaaacaactcctctgtgacctagttgggatttcaccctcctctgagcatgatgtgttgaaggaagctgttcttaagaaactaggaggagacaatacccagttggaggctgctgaatggttgggcttacttggggatgaacaagttcctcaggcagagtccattctggatgccctctccaagcatttggtcatgaagctttcctatggtcctgaagaaaaagatatgattgtgatgagagacagctttggaatcagacatccttctggacatttagaacataaaacgattgatcttgtggcttatggggacatcaatggcttttcagccatggctaaaaccgtggggttacccaccgccatggcagccaaaatgttgcttgatggtgaaattggagccaaaggcctaatggggcccttttcaaaggagatctatggaccaatattggagcgaattaaagcagaaggcattatatatactacacagagtacaattaaaccataattgggaattatattttgtttttttcttcccaggcaatacacctctgaacatgtgtgtgataaatgggtttgctaatgtgctgttttaaagtataaagcataatatgttttggttaacacaatgtactttttgaactataaatctttattttaatatggaaatgtttggaacaggagatgcaagccactaacagagaactttaataattctaccctgtattttataaatacgtatgtgaaagtgatgatcatgctatttgttaatttattgtgccactttttttcttttgttttttttttgttgttgttgttttttgagatggagtctcgctctgtcacccaggctggagtgcagtg

SEQ ID NO: 1775 - DNA, 3163 bp, Homo sapiens
  source 1..3163: mol_type = unassigned DNA
aaacacctcctacttcccggccttccatcccagtttcttctaggaattcggagcctcccctgcagcgactcggaagattcgaggcggcgggggacaagtcggcgccccagagcggacgagtcaccaggtgtcaagatgctgcaagtacataggactggactgggcaggctgggggtcagcctctccaagggtcttcaccacaaagctgtgttggccgtccggagggaggatgtgaacgcctgggagagaagggccccgctagctcccaagcacatcaaaggcatcaccaatctgggatacaaggtcttgatacagccttcgaatcggcgggccattcatgataaggactatgtcaaagctggtggcattcttcaggaggatatttctgaagcttgtctaattttaggagttaaaagacctccagaggaaaaattaatgtccaggaagacttatgcatttttctcccacacaataaaagctcaggaggccaatatgggcttgttggatgagattctaaaacaggaaattcgccttattgattatgagaaaatggtggatcatagaggagtacgggtagtggcatttggacagtgggctggtgtggcaggaatgatcaacattttacatggaatgggtttaaggctccttgctttgggacatcacacaccttttatgcacattggcatggctcataactacaggaatagcagtcaggctgtgcaagctgtccgtgatgctggctatgaaatatctttgggtttgatgcctaagtcaataggacccttaacatttgtgttcacaggaactggtaatgtttctaagggagcccaagcaatctttaatgagctaccttgtgaatatgtggagccccatgaattaaaagaagtttcccaaactggagacctcagaaaagtgtatgggacggtgttaagtcgtcatcatcatcttgtcaggaaaacagatgctgtgtatgatcctgcagagtatgacaaacatccggagcgctacataagtcgttttaatactgatattgcaccctatacaacttgcttaattaatggaatctactgggaacaaaacactcctcgcctcctaacccgccaagatgctcagagtctcctggctccgggcaagttctcacctgctggtgtggaaggctgccctgcattaccacacaaactcgtggcaatatgtgacatttcagctgacacaggagggtctatagagtttatgactgagtgtacaacaatagagcatcccttttgcatgtatgatgcagaccagcatattattcatgacagtgttgaaggctcggggatcctgatgtgttccattgacaatttgccggcacagctcccaattgaagctacagaatgctttggagacatgctttacccttatgttgaagaaatgatattatcagacgcgacacagcctcttgaaagtcagaatttttctcctgtggtgagagatgcagtgattacatccaacggtacattacctgataaatataaatatatccagacactccgggagagcagggaacgtgctcagtcactttcaatgggcaccaggagaaaggttttggttcttggatctggctacatatctgagcctgtattagaatatttatcaagagatggcaatatagaaataacagtaggatctgacatgaagaatcaaattgaacagttaggcaagaaatataatattaatcctgttagcatggacatttgtaaacaagaagagaagctgggcttcttggtggcaaaacaggatcttgtcatcagcttgttgccttatgtattgcaccctcttgtggccaaggcctgcatcacaaacaaagttaacatggtcactgcaagctacatcacaccagcactaaaagaattggaaaagagtgtggaagatgctggcatcacaatcattggtgaattgggattggaccctggtctggatcacatgttagcaatggaaacaatagataaagccaaggaagtgggagccacgattgaatcatatatttcctactgtggtgggcttccagcccctgaacattcaaacaatccattgagatataaatttagctggagtccagtgggagttttgatgaatgtaatgcagtctgccacctatctgctcgatggaaaggttgtgaatgttgcaggaggcatctcctttcttgatgccgttacgtccatggatttttttccaggattaaatttggaaggctatcctaacagagacagtacgaaatatgctgagatttatggcatttcttctgctcacactttgttgcgggggacactgagatataagggatatatgaaagctttgaatggatttgtaaaattaggtcttataaacagagaagcgcttcctgcctttagacctgaggccaaccctctcacctggaaacaactcctctgtgacctagttgggatttcaccctcctctgagcatgatgtgttgaaggaagctgttcttaagaaactaggaggagacaatacccagttggaggctgctgaatggttgggcttacttggggatgaacaagttcctcaggcagagtccattctggatgccctctccaagcatttggtcatgaagctttcctatggtcctgaagaaaaagatatgattgtgatgagagacagctttggaatcagacatccttctggacatttagaacataaaacgattgatcttgtggcttatggggacatcaatggcttttcagccatggctaaaaccgtggggttacccaccgccatggcagccaaaatgttgcttgatggtgaaattggagccaaaggcctaatggggcccttttcaaaggagatctatggaccaatattggagcgaattaaagcagaaggcattatatatactacacagagtacaattaaaccataattgggaattatattttgtttttttcttcccaggcaatacacctctgaacatgtgtgtgataaatgggtttgctaatgtgctgttttaaagtataaagcataatatgttttggttaacacaatgtactttttgaactataaatctttattttaatatggaaatgtttggaacaggagatgcaagccactaacagagaactttaataattctaccctgtattttataaatacgtatgtgaaagtgatga

SEQ ID NO: 1776 - DNA, 1329 bp, Homo sapiens
  source 1..1329: mol_type = unassigned DNA
agattgtgctgtgcgcctgaagccctggcggtgcagccgtgcacggagtcccgtggagcgtttgtttgggctggattatcccgctgcagccgaggttgggggcccgggttcggggctccgcacctcttctctggggttcaccctctcggataccgcctgggcagactccatcgatgcagaacccgagacagagcctgcagccaatgccccaggagccctcggttccaaccaactgatgcccctgtgcccactggcccacgccatgcagccccagtccgttctgcacagcggctacttccacccactacttcgggcctggcagacagccaccaccaccctcaatgcctccaacctcatctaccccatctttgtcacgtatggtgtgaagcggctggaagagatgctgaggcccttggtggaagagggcctacgctgtgtcttgatctttggcgtccccagcagagttcccaaggacgagcggggttccgcagctgactccgaggagtccccagctattgaggcaatccatctgttgaggaagaccttccccaacctcctggtggcctgtgatgtctgcctgtgtccctacacctcccatggtcactgcgggctcctgagtgaaaacggagcattccgggctgaggagagccgccagcggctggctgaggtggcattggcgtatgccaaggcaggatgtcaggtggtagccccgtcggacatgatggatggacgcgtggaagccatcaaagaggccctgatggcacatggacttggcaacagggtatcggtgatgagctacagtgccaaatttgcttcctgtttctatggccctttccgggatgcagctaagtcaagcccagcttttggggaccgccgctgctaccagctgccccctggagcacgaggcctggctctccgagctgtggaccgggatgtacgggaaggagctgacatgctcatggtgaagccgggaatgccctacctggacatcgtgcgggaggtaaaggacaagcaccctgacctccctctcgccgtgtaccacgtctctggagagtttgccatgctgtggcatggagcccaggccggggcatttgatctcaaggctgccgtactggaggccatgactgccttccgcagagcaggtgctgacatcatcatcacctactacacaccgcagctgctgcagtggctgaaggaggaatgatggagacagtgccaggcccaagaactagaactttaaaacgttcccggggcctcagacaagtgaaaaccaaagtaaatgctgcttttagaactgtgccctcatgccctcttcctgctcacatgcta

SEQ ID NO: 1777 - DNA, 3173 bp, Homo sapiens
  source 1..3173: mol_type = unassigned DNA
gggggcggaccgtggggaagctgcttccgggtgagccccccccgctcttacgcggtctgtgggagaccggagcgggagacagcggtgacaggagcagcggccgggagcccttagggaggcagacagagcctgcagccaatgccccaggagccctcggttccaaccaactgatgcccctgtgcccactggcccacgccatgcagccccagtccgttctgcacagcggctacttccacccactacttcgggcctggcagacagccaccaccaccctcaatgcctccaacctcatctaccccatctttgtcacggatgttcctgatgacatacagcctatcaccagcctcccaggagtggccaggtatggtgtgaagcggctggaagagatgctgaggcccttggtggaagagggcctacgctgtgtcttgatctttggcgtccccagcagagttcccaaggacgagcggggttccgcagctgactccgaggagtccccagctattgaggcaatccatctgttgaggaagaccttccccaacctcctggtggcctgtgatgtctgcctgtgtccctacacctcccatggtcactgcgggctcctgagtgaaaacggagcattccgggctgaggagagccgccagcggctggctgaggtggcattggcgtatgccaaggcaggatgtcaggtggtagccccgtcggacatgatggatggacgcgtggaagccatcaaagaggccctgatggcacatggacttggcaacagggtatcggtgatgagctacagtgccaaatttgcttcctgtttctatggccctttccgggatgcagctaagtcaagcccagcttttggggaccgccgctgctaccagctgccccctggagcacgaggcctggctctccgagctgtggaccgggatgtacgggaaggagctgacatgctcatggtgaagccgggaatgccctacctggacatcgtgcgggaggtaaaggacaagcaccctgacctccctctcgccgtgtaccacgtctctggagagtttgccatgctgtggcatggagcccaggccggggcatttgatctcaaggctgccgtactggaggccatgactgccttccgcagagcaggtgctgacatcatcatcacctactacacaccgcagctgctgcagtggctgaaggaggaatgatggagacagtgccaggcccaagaactagaactttaaaacgttcccggggcctcagacaagtgaaaaccaaagtaaatgctgcttttagaactgtgccctcatgccctcttcctgctcacatgctagcggggcccagcagccctgggtggttttgccagcatgctaactcttgtaactcgcagctgcatcctatgagctctcccaagcttccccgcccctcccctgggtcagccgtgaggcccacctttgccaccctcagctctttcctctggtgtggcttcagcttgaaagcaacctggagtcgggggcacagcctttggggcctggctgggagagggtcttggagcattaggggaagaagagagcagtgggatcttggggcctgagaagccttggaacgcttctggcagcagagctgggtgtgggaatgaggcctagatcgatatccctgggttagagttgaaatttgccgcaattccactggaaggcatttcccacgaggccagaggttgccaggctgcctgaggtctcctattctactctgaaccataaacccagagaagaattactcattaaccagcataaatactgcctgaggatcaaaactcagaggcaaagagggagttcctgactgctagaggtgccaccaccacaaacactttttattcaggagatactttttgagaatctctgctctgttcctaggttcagtgctgggtcctgggaatacagcaggacagacctcagcttatctcttcatagaaattatacaaagagaattggggagacagctaagaagaaaacaaagaaataaagcagttacaaattgtgataagtgctttgaaggaaagaaggggtctgagacaacaacagggaaggggcctctcttgaaacagtagttgggaaggaggcagacatgcaccagtgatgtggtgacaggtgctctgaaggaggtcaccaggacctgacctctttgaaggatcagaaaatacttccctgaaggactgacatttgagcctagacctgaagggtgagccatcaagctaagacaattggggaagagcattccagggagagggaggagttgtgcaaaggccctggggctccttctagctggaggaatgcaaggctagcttgtctggagcactgagaggatggcctgaactgagtggagagagacagaccaggaccaaaccatgcagaggtcaagggccacattcaccttttcagagtgactcaatcaaatttgtagtttgtaaaagtattttaacagctctgcggcaaagtgcaaatgaaaagtcttgatggcatggactggagcggggacagtggggatggagaaaggggaatggattgtggatgtgtttagaaggtagattcgatgtgaaggatgaatctggcttgaccttctgggtggctgatgggccatttactgagatggggcagcctggaagaggaacagaagcagggtcggggtggagggagaatactaaacttagcttgagacattttgcaataaggaagctatatctagagtgcttatgtgactcacctaaggccactcaacaagtttgtggcagaactggattagaactgcacagaaaacagccaagctgggatttgaacccatgtagtccaactccaaggcctctgcccctaaccactgtgccataccacctcccaataatcaacagcaaaattataggtctaacaatgttttatagacacccctccatttatgtgatgggtttgcatcctgataaacccatcataagttgaaaatatgatcataagttgaaaatatgatcataagtcaaaaatgtatttaatatacctaacctaccaaacatcatagcttagcctagcctgccttaaacatgctcagaacacttacattagcctacagtgggcaaaactatccaacacaaaatctatattgtaataaagttgtaaagaattttgaataaaaattcaatatttgaa

SEQ ID NO: 1778 - DNA, 703 bp, Homo sapiens
  source 1..703: mol_type = unassigned DNA
acctcctctccaagcccagctccccactgccctcttcctgccctgtccctgtctccgctgccctttagatcaggcaggcaggcaggcctagagcatccgccctgagacactgcctgttggctgccttaagacgccccttccttctctgcccgcagcctccccagcctctgcattcctctgcttcctgtctgctctgctcagcctgcaggattgatcttcccaaagccaggtgtcaaccaggccactaaccctacccactgctcagaaatcttcccacagcctcagcctggccccctcttatccatcccctccatacacacttgcctcagctcctcaaaacagtccacagccatcctccttccccacctttgcccctttcttcccttcctaaggaaatattggcccccttctctccaccaggctgaacccactcatcctgcaaaaccaagttcaacgccctgtcattttcttttttttttttttttttgagatggagtctcacactgtcgcccaggctagagtgcaatgggtgcactctcggctcactgcaacctctgcctcctaggttcaatcgattcttctgcctcagcctccagaggaactctgactacagacagagcctgcagccaatgccccaggagccctcggttccaaccaactgatgcccctgtgcccactggcccacgccatgcagccccagtcc

SEQ ID NO: 1779 - DNA, 536 bp, Homo sapiens
  source 1..536: mol_type = unassigned DNA
gctcttacgcggtctgtgggagaccggagcgggagacagcggtgacaggagcagcggccgggagcccttagggaggcagcacccaaagcagaaacagtatgggcagagagacgcctactgaatcagacagagcctgcagccaatgccccaggagccctcggttccaaccaactgatgcccctgtgcccactggcccacgccatgcagccccagtccgttctgcacagcggctacttccacccactacttcgggcctggcagacagccaccaccaccctcaatgcctccaacctcatctaccccatctttgtcacggatgttcctgatgacatacagcctatcaccagcctcccaggagtggccaggtatggtgtgaagcggctggaagagatgctgaggcccttggtggaagagggcctacgctgtgtcttgatctttggcgtccccagcagagttcccaaggacgagcggggttccgcagctgactccgaggagtccccagctattgaggcaatccatctgttgaggaagacctt

SEQ ID NO: 1780 - DNA, 583 bp, Homo sapiens
  source 1..583: mol_type = unassigned DNA
aggaagactggataaaatgggcccctgagatggctgaaggcagctaaaggggcctaagagactatggggagaagggcagccagttcctaggcagccctgccccactgtttctgataagcaggaggcagttgttccctcagcctcctgaaagcaatgaggagttgaggccacgggaatgcagctttggattccagaagccaaggacctgttacaaaggtggttttctgggaagcaaattagagggattagacctggcttcgacatctgacttgactccaacctaccaaaggatctcccagttcacctgggagttaacacaccagggttctagtccttttgctcgctgtgtggctttggacagagcctgcagccaatgccccaggagccctcggttccaaccaactgatgcccctgtgcccactggcccacgccatgcagccccagtccgttctgcacagcggctacttccacccactacttcgggcctggcagacagccaccaccaccctcaatgcctccaacctcatctaccccatctttgtcacggatgttcctgatgacatacagcctatcaccagcctcc

SEQ ID NO: 1781 - DNA, 2212 bp, Homo sapiens
  source 1..2212: mol_type = unassigned DNA
atattaaggcgccggcgatcgcggcctgaggctgctcccggacaagggcaacgagcgtttcgtttggacttctcgacttgagtgcccgcctccttcgccgccgcctctgcagtcctcagcgcaggagccagcatacttcctgaacatggagagtgttgttcgccgctgcccattcttatcccgagtcccccaggcctttctgcagaaagcaggcaaatctctgttgttctatgcccaaaactgccccaagatgatggaagttggggccaagccagcccctcgggcattgtccactgcagcagtacactaccaacagatcaaagaaacccctccggccagtgagaaagacaaaactgctaaggccaaggtccaacagactcctgatggatcccagcagagtccagatggcacacagcttccgtctggacaccccttgcctgccacaagccagggcactgcaagcaaatgccctttcctggcagcacagatgaatcagagaggcagcagtgtcttctgcaaagccagtcttgagcttcaggaggatgtgcaggaaatgaatgccgtgaggaaagaggttgctgaaacctcagcaggccccagtgtggttagtgtgaaaaccgatggaggggatcccagtggactgctgaagaacttccaggacatcatgcaaaagcaaagaccagaaagagtgtctcatcttcttcaagataacttgccaaaatctgtttccacttttcagtatgatcgtttctttgagaaaaaaattgatgagaaaaagaatgaccacacctatcgagtttttaaaactgtgaaccggcgagcacacatcttccccatggcagatgactattcagactccctcatcaccaaaaagcaagtgtcagtctggtgcagtaatgactacctaggaatgagtcgccacccacgggtgtgtggggcagttatggacactttgaaacaacatggtgctggggcaggtggtactagaaatatttctggaactagtaaattccatgtggacttagagcgggagctggcagacctccatgggaaagatgccgcactcttgttttcctcgtgctttgtggccaatgactcaaccctcttcaccctggctaagatgatgccaggctgtgagatttactctgattctgggaaccatgcctccatgatccaagggattcgaaacagccgagtgccaaagtacatcttccgccacaatgatgtcagccacctcagagaactgctgcaaagatctgacccctcagtccccaagattgtggcatttgaaactgtccattcaatggatggggcggtgtgcccactggaagagctgtgtgatgtggcccatgagtttggagcaatcaccttcgtggatgaggtccacgcagtggggctttatggggctcgaggcggagggattggggatcgggatggagtcatgccaaaaatggacatcatttctggaacacttggcaaagcctttggttgtgttggagggtacatcgccagcacgagttctctgattgacaccgtacggtcctatgctgctggcttcatcttcaccacctctctgccacccatgctgctggctggagccctggagtctgtgcggatcctgaagagcgctgagggacgggtgcttcgccgccagcaccagcgcaacgtcaaactcatgagacagatgctaatggatgccggcctccctgttgtccactgccccagccacatcatccctgtgcgggttgcagatgctgctaaaaacacagaagtctgtgatgaactaatgagcagacataacatctacgtgcaagcaatcaattaccctacggtgccccggggagaagagctcctacggattgcccccacccctcaccacacaccccagatgatgaactacttccttgagaatctgctagtcacatggaagcaagtggggctggaactgaagcctcattcctcagctgagtgcaacttctgcaggaggccactgcattttgaagtgatgagtgaaagagagaagtcctatttctcaggcttgagcaagttggtatctgctcaggcctgagcatgacctcaattatttcacttaaccccaggccattatcatatccagatggtcttcagagttgtctttatatgtgaattaagttatattaaattttaatctatagtaaaaacatagtcctggaaataaattcttgcttaaatg

SEQ ID NO: 1782 - DNA, 2430 bp, Homo sapiens
  source 1..2430: mol_type = unassigned DNA
agcgcccaaggcgcatgcgcagcggtcactcccgctgtatattaaggcgccggcgatcgcggcctgaggctgctcccggacaagggcaacgagcgtttcgtttggacttctcgacttgagtgcccgcctccttcgccgccgcctctgcagtcctcagcgcagttatgcccagttcttcccgctgtggggacacgaccacggaggaatccttgcttcagggactcgggaccctgctggaccccttcctcgggtttaggggatgtggggaccaggagaaagtcaggatccctaagagtcttccctgcctggatggatgagtggcttcttctccacctagatgagccagcatacttcctgaacatggagagtgttgttcgccgctgcccattcttatcccgagtcccccaggcctttctgcagaaagcaggcaaatctctgttgttctatgcccaaaactgccccaagatgatggaagttggggccaagccagcccctcgggcattgtccactgcagcagtacactaccaacagatcaaagaaacccctccggccagtgagaaagacaaaactgctaaggccaaggtccaacagactcctgatggatcccagcagagtccagatggcacacagcttccgtctggacaccccttgcctgccacaagccagggcactgcaagcaaatgccctttcctggcagcacagatgaatcagagaggcagcagtgtcttctgcaaagccagtcttgagcttcaggaggatgtgcaggaaatgaatgccgtgaggaaagaggttgctgaaacctcagcaggccccagtgtggttagtgtgaaaaccgatggaggggatcccagtggactgctgaagaacttccaggacatcatgcaaaagcaaagaccagaaagagtgtctcatcttcttcaagataacttgccaaaatctgtttccacttttcagtatgatcgtttctttgagaaaaaaattgatgagaaaaagaatgaccacacctatcgagtttttaaaactgtgaaccggcgagcacacatcttccccatggcagatgactattcagactccctcatcaccaaaaagcaagtgtcagtctggtgcagtaatgactacctaggaatgagtcgccacccacgggtgtgtggggcagttatggacactttgaaacaacatggtgctggggcaggtggtactagaaatatttctggaactagtaaattccatgtggacttagagcgggagctggcagacctccatgggaaagatgccgcactcttgttttcctcgtgctttgtggccaatgactcaaccctcttcaccctggctaagatgatgccaggctgtgagatttactctgattctgggaaccatgcctccatgatccaagggattcgaaacagccgagtgccaaagtacatcttccgccacaatgatgtcagccacctcagagaactgctgcaaagatctgacccctcagtccccaagattgtggcatttgaaactgtccattcaatggatggggcggtgtgcccactggaagagctgtgtgatgtggcccatgagtttggagcaatcaccttcgtggatgaggtccacgcagtggggctttatggggctcgaggcggagggattggggatcgggatggagtcatgccaaaaatggacatcatttctggaacacttggcaaagcctttggttgtgttggagggtacatcgccagcacgagttctctgattgacaccgtacggtcctatgctgctggcttcatcttcaccacctctctgccacccatgctgctggctggagccctggagtctgtgcggatcctgaagagcgctgagggacgggtgcttcgccgccagcaccagcgcaacgtcaaactcatgagacagatgctaatggatgccggcctccctgttgtccactgccccagccacatcatccctgtgcgggttgcagatgctgctaaaaacacagaagtctgtgatgaactaatgagcagacataacatctacgtgcaagcaatcaattaccctacggtgccccggggagaagagctcctacggattgcccccacccctcaccacacaccccagatgatgaactacttccttgagaatctgctagtcacatggaagcaagtggggctggaactgaagcctcattcctcagctgagtgcaacttctgcaggaggccactgcattttgaagtgatgagtgaaagagagaagtcctatttctcaggcttgagcaagttggtatctgctcaggcctgagcatgacctcaattatttcacttaaccccaggccattatcatatccagatggtcttcagagttgtctttatatgtgaattaagttatattaaattttaatctatagtaaaaacatagtcctggaaataaattcttgcttaaatggtg

SEQ ID NO: 1783 - DNA, 2406 bp, Homo sapiens
  source 1..2406: mol_type = unassigned DNA
ctgtatattaaggcgccggcgatcgcggcctgaggctgctcccggacaagggcaacgagcgtttcgtttggacttctcgacttgagtgcccgcctccttcgccgccgcctctgcagtcctcagcgcagttatgcccagttcttcccgctgtggggacacgaccacggaggaatccttgcttcagggactcgggaccctgctggaccccttcctcgggtttaggggatgtggggaccaggagaaagtcaggatccctaagagtcttccctgcctggatggatgagtggcttcttctccacctagattctttccacaggagccagcatacttcctgaacatggagagtgttgttcgccgctgcccattcttatcccgagtcccccaggcctttctgcagaaagcaggcaaatctctgttgttctatgcccaaaactgccccaagatgatggaagttggggccaagccagcccctcgggcattgtccactgcagcagtacactaccaacagatcaaagaaacccctccggccagtgagaaagacaaaactgctaaggccaaggtccaacagactcctgatggatcccagcagagtccagatggcacacagttccgtctggacaccccttgcctgccacaagccagggcactgcaagcaaatgccctttcctggcagcacagatgaatcagagaggcagcagtgtcttctgcaaagccagtcttgagcttcaggaggatgtgcaggaaatgaatgccgtgaggaaagaggttgctgaaacctcagcaggccccagtgtggttagtgtgaaaaccgatggaggggatcccagtggactgctgaagaacttccaggacatcatgcaaaagcaaagaccagaaagagtgtctcatcttcttcaagataacttgccaaaatctgtttccacttttcagtatgatcgtttctttgagaaaaaaattgatgagaaaaagaatgaccacacctatcgagtttttaaaactgtgaaccggcgagcacacatcttccccatggcagatgactattcagactccctcatcaccaaaaagcaagtgtcagtctggtgcagtaatgactacctaggaatgagtcgccacccacgggtgtgtggggcagttatggacactttgaaacaacatggtgctggggcaggtggtactagaaatatttctggaactagtaaattccatgtggacttagagcgggagctggcagacctccatgggaaagatgccgcactcttgttttcctcgtgctttgtggccaatgactcaaccctcttcaccctggctaagatgatgccaggctgtgagatttactctgattctgggaaccatgcctccatgatccaagggattcgaaacagccgagtgccaaagtacatcttccgccacaatgatgtcagccacctcagagaactgctgcaaagatctgacccctcagtccccaagattgtggcatttgaaactgtccattcaatggatggggcggtgtgcccactggaagagctgtgtgatgtggcccatgagtttggagcaatcaccttcgtggatgaggtccacgcagtggggctttatggggctcgaggcggagggattggggatcgggatggagtcatgccaaaaatggacatcatttctggaacacttggcaaagcctttggttgtgttggagggtacatcgccagcacgagttctctgattgacaccgtacggtcctatgctgctggcttcatcttcaccacctctctgccacccatgctgctggctggagccctggagtctgtgcggatcctgaagagcgctgagggacgggtgcttcgccgccagcaccagcgcaacgtcaaactcatgagacagatgctaatggatgccggcctccctgttgtccactgccccagccacatcatccctgtgcgggttgcagatgctgctaaaaacacagaagtctgtgatgaactaatgagcagacataacatctacgtgcaagcaatcaattaccctacggtgccccggggagaagagctcctacggattgcccccacccctcaccacacaccccagatgatgaactacttccttgagaatctgctagtcacatggaagcaagtggggctggaactgaagcctcattcctcagctgagtgcaacttctgcaggaggccactgcattttgaagtgatgagtgaaagagagaagtcctatttctcaggcttgagcaagttggtatctgctcaggcctgagcatgacctcaattatttcacttaaccccaggccattatcatatccagatggtcttcagagttgtctttatatgtgaattaagttatattaaattttaatctatagtaaaaacatagtcctggaaataaattcttgcttaaatggtg

SEQ ID NO: 1784 - DNA, 2125 bp, Homo sapiens
  source 1..2125: mol_type = unassigned DNA
aagaaggcagcgcccaaggcgcatgcgcagcggtcactcccgctgtatattaaggcgccggcgatcgcggcctgaggctgctcccggacaagggcaacgagcgtttcgtttggacttctcgacttgagtgcccgcctccttcgccgccgcctctgcagtcctcagcgcagtctttccacaggagccagcatacttcctgaacatggagagtgttgttcgccgctgcccattcttatcccgagtcccccaggcctttctgcagaaagcaggcaaatctctgttgttctatgcccaaaactgccccaagatgatggaagttggggccaagccagcccctcgggcattgtccactgcagcagtacactaccaacagatcaaagaaacccctccggccagtgagaaagacaaaactgctaaggccaaggtccaacagactcctgatggatcccagcagagtccagatggcacacagcttccgtctggacaccccttgcctgccacaagccagggcactgcaagcaaatgccctttcctggcagcacagatgaatcagagaggcagcagtgtcttctgcaaagccagtcttgagcttcaggaggatgtgcaggaaatgaatgccgtgaggaaagaggttgctgaaacctcagcaggccccagtgtggttagtgtgaaaaccgatggaggggatcccagtggactgctgaagaacttccaggacatcatgcaaaagcaaagaccagaaagagtgtctcatcttcttcaagataacttgccaaaatctgtttccacttttcagtatgatcgtttctttgagaaaaaaattgatgagaaaaagaatgaccacacctatcgagtttttaaaactgtgaaccggcgagcacacatcttccccatggcagatgactattcagactccctcatcaccaaaaagcaagtgtcagtctggtgcagtaatgactacctaggaatgagtcgccacccacgggtgtgtggggcagttatggacactttgaaacaacatggtgctggggcaggtggtactagaaatatttctggaactagtaaattccatgtggacttagagcgggagctggcagacctccatgggaaagatgccgcactcttgttttcctcgtgctttgtggccaatgactcaaccctcttcaccctggctaagatgatgccaggctgtgagatttactctgattctgggaaccatgcctccatgatccaagggattcgaaacagccgagtgccaaagtacatcttccgccacaatgatgtcagccacctcagagaactgctgcaaagatctgacccctcagtccccaagattgtggcatttgaaactgtccattcaatggatggggcggtgtgcccactggaagagctgtgtgatgtggcccatgagtttggagcaatcaccttcgtggatgaggtccacgcagtggggctttatggggctcgaggcggagggattggggatcgggatggagtcatgccaaaaatggacatcatttctggaacacttggcaaagcctttggttgtgttggagggtacatcgccagcacgagttctctgattgacaccgtacggtcctatgctgctggcttcatcttcaccacctctctgccacccatgctgctggctggagccctggagtctgtgcggatcctgaagagcgctgagggacgggtgcttcgccgccagcaccagcgcaacgtcaaactcatgagacagatgctaatggatgccggcctccctgttgtccactgccccagccacatcatccctgtgcgggttgcagatgctgctaaaaacacagaagtctgtgatgaactaatgagcagacataacatctacgtgcaagcaatcaattaccctacggtgccccggggagaagagctcctacggattgcccccacccctcaccacacaccccagatgatgaactacttccttgagaatctgctagtcacatggaagcaagtggggctggaactgaagcctcattcctcagctgagtgcaacttctgcaggaggccactgcattttgaagtgatgagtgaaagagagaagtcctatttctcaggcttgagcaagttggtatctgctcaggcctga

SEQ ID NO: 1785 - DNA, 2356 bp, Homo sapiens
  source 1..2356: mol_type = unassigned DNA
cggcgatcgcggcctgaggctgctcccggacaagggcaacgagcgtttcgtttggacttctcgacttgagtgcccgcctccttcgccgccgcctctgcagtcctcagcgcagttatgcccagttcttcccgctgtggggacacgaccacggaggaatccttgcttcagggactcgggaccctgctggaccccttcctcgggtttaggggatgtggggaccaggagaaagtcaggatccctaagagtcttccctgcctggatggatgagtggcttcttctccacctagattctttccacaggagccagcatacttcctgaacatggagagtgttgttcgccgctgcccattcttatcccgagtcccccaggcctttctgcagaaagcaggcaaatctctgttgttctatgcccaaaactgccccaagatgatggaagttggggccaagccagcccctcgggcattgtccactgcagcagtacactaccaacagatcaaagaaacccctccggccagtgagaaagacaaaactgctaaggccaaggtccaacagactcctgatggatcccagcagagtccagatggcacacagcttccgtctggacaccccttgcctgccacaagccagggcactgcaagcaaatgccctttcctggcagcacagatgaatcagagaggcagcagtgtcttctgcaaagccagtcttgagcttcaggaggatgtgcaggaaatgaatgccgtgaggaaagaggttgctgaaacctcagcaggccccagtgtggttagtgtgaaaaccgatggaggggatcccagtggactgctgaagaacttccaggacatcatgcaaaagcaaagaccagaaagagtgtctcatcttcttcaagataacttgccaaaatctgtttccacttttcagtatgatcgtttctttgagaaaaaaattgatgagaaaaagaatgaccacacctatcgagtttttaaaactgtgaaccggcgagcacacatcttccccatggcagatgactattcagactccctcatcaccaaaaagcaagtgtcagtctggtgcagtaatgactacctaggaatgagtcgccacccacgggtgtgtggggcagttatggacactttgaaacaacatggtgctggggcaggtggtactagaaatatttctggaactagtaaattccatgtggacttagagcgggagctggcagacctccatgggaaagatgccgcactcttgttttcctcgtgctttgtggccaatgactcaaccctcttcaccctggctaagatgatgccaggctgtgagatttactctgattctgggaaccatgcctccatgatccaagggattcgaaacagccgagtgccaaagtacatcttccgccacaatgatgtcagccacctcagagaactgctgcaaagatctgacccctcagtccccaagattgtggcatttgaaactgtccattcaatggatggggcggtgtgcccactggaagagctgtgtgatgtggcccatgagtttggagcaatcaccttcgtggatgaggtccacgcagtggggctttatggggctcgaggcggagggattggggatcgggatggagtcatgccaaaaatggacatcatttctggaacacttggcaaagcctttggttgtgttggagggtacatcgccagcacgagttctctgattgacaccgtacggtcctatgctgctggcttcatcttcaccacctctctgccacccatgctgctggctggagccctggagtctgtgcggatcctgaagagcgctgagggacgggtgcttcgccgccagcaccagcgcaacgtcaaactcatgagacagatgctaatggatgccggcctccctgttgtccactgccccagccacatcatccctgtgcgggttgcagatgctgctaaaaacacagaagtctgtgatgaactaatgagcagacataacatctacgtgcaagcaatcaattaccctacggtgccccggggagaagagctcctacggattgcccccacccctcaccacacaccccagatgatgaactacttccttgagaatctgctagtcacatggaagcaagtggggctggaactgaagcctcattcctcagctgagtgcaacttctgcaggaggccactgcattttgaagtgatgagtgaaagagagaagtcctatttctcaggcttgagcaagttggtatctgctcaggcctgagcatgacctcaattatttcacttaaccccaggccattatcatatccagatggtcttcagagttgtctttatatgtgaattaagttatattaaattttaatctatagtaaaaa

SEQ ID NO: 1786 - DNA, 2027 bp, Homo sapiens
  source 1..2027: mol_type = unassigned DNA
aatgcagggccaggccggcagaaggcagggtgggtggggctgagtcagaggagaagggataaatgccaggtcctaacccaagtacccacctgtcattcgttcgtcctcagtgcagggcaacaggactttaggttcaagatggtgactgcagccatgctgctacagtgctgcccagtgcttgcccggggccccacaagcctcctaggcaaggtggttaagactcaccagttcctgtttggtattggacgctgtcccatcctggctacccaaggaccaaactgttctcaaatccaccttaaggcaacaaaggctggaggagattctccatcttgggcgaagggccactgtcccttcatgctgtcggaactccaggatgggaagagcaagattgtgcagaaggcagccccagaagtccaggaagatgtgaaggctttcaagacagatctgcctagctccctggtctcagtcagcctaaggaagccattttccggtccccaggagcaggagcagatctctgggaaggtcacacacctgattcagaacaatatgcctggaaactatgtcttcagttatgaccagtttttcagggacaagatcatggagaagaaacaggatcacacctaccgtgtgttcaagactgtgaaccgctgggctgatgcatatccctttgcccaacatttctctgaggcatctgtggcctcaaaggatgtgtccgtctggtgtagtaatgattacctgggcatgagccgacaccctcaggtcttgcaagccacacaggagaccctgcagcgtcatggtgctggagctggtggcacccgcaacatctcaggcaccagtaagtttcatgtggagcttgagcaggagctggctgagctgcaccagaaggactcagccctgctcttctcctcctgctttgttgccaatgactctactctcttcaccttggccaagatcctgccagggtgcgagatttactcagacgcaggcaaccatgcttccatgatccaaggtatccgtaacagtggagcagccaagtttgtcttcaggcacaatgaccctgaccacctaaagaaacttctagagaagtctaaccctaagatacccaaaattgtggcctttgagactgtccactccatggatggtgccatctgtcccctcgaggagttgtgtgatgtgtcccaccagtatggggccctgaccttcgtggatgaggtccatgctgtaggactgtatgggtcccggggcgctgggattggggagcgtgatggaattatgcataagattgacatcatctctggaactcttggcaaggcctttggctgtgtgggcggctacattgccagcacccgtgacttggtggacatggtgcgctcctatgctgcaggcttcatctttaccacttctctgccccccatggtgctctctggagctctagaatctgtgcggctgctcaagggagaggagggccaagccctgaggcgagcccaccagcgcaatgtcaagcacatgcgccagctactcatggacaggggccttcctgtcatcccctgccccagccacatcatccccatccgggtgggcaatgcagcactcaacagcaagctctgtgatctcctgctctccaagcatggcatctatgtgcaggccatcaactacccaactgtcccccggggtgaagagctcctgcgcttggcaccctccccccaccacagccctcagatgatggaagattttgtggagaagctgctgctggcttggactgcggtggggctgcccctccaggatgtgtctgtggctgcctgcaatttctgtcgccgtcctgtacactttgagctcatgagtgagtgggaacgttcctacttcgggaacatggggccccagtatgtcaccacctatgcctgagaagccagctgcctaggattcacaccccacctgcgcttcacttgggtccaggcctactcctgtcttctgctttgttgtgtgcctctagctgaattgagcctaaaaataaagcacaaaccacagca

SEQ ID NO: 1787 - DNA, 1795 bp, Homo sapiens
  source 1..1795: mol_type = unassigned DNA
acctgtcattcgttcgtcctcagtgcagggcaacaggactttaggttcaagatggtgactgcagccatgctgctacagtgctgcccagtgcttgcccggggccccacaagcctcctaggcaaggtggttaagactcaccagttcctgtttggtattggacgctgtcccatcctggctacccaaggaccaaactgttctcaaatccaccttaaggcaacaaaggctggaggagattctccatcttgggcgaagggccactgtcccttcatgctgtcggaactccaggatgggaagagcaagattgtgcagaaggcagccccagaagtccaggaagatgtgaaggctttcaagacaggaaactatgtcttcagttatgaccagtttttcagggacaagatcatggagaagaaacaggatcacacctaccgtgtgttcaagactgtgaaccgctgggctgatgcatatccctttgcccaacatttctctgaggcatctgtggcctcaaaggatgtgtccgtctggtgtagtaatgattacctgggcatgagccgacaccctcaggtcttgcaagccacacaggagaccctgcagcgtcatggtgctggagctggtggcacccgcaacatctcaggcaccagtaagtttcatgtggagcttgagcaggagctggctgagctgcaccagaaggactcagccctgctcttctcctcctgctttgttgccaatgactctactctcttcaccttggccaagatcctgccagggtgcgagatttactcagacgcaggcaaccatgcttccatgatccaaggtatccgtaacagtggagcagccaagtttgtcttcaggcacaatgaccctgaccacctaaagaaacttctagagaagtctaaccctaagatacccaaaattgtggcctttgagactgtccactccatggatggtgccatctgtcccctcgaggagttgtgtgatgtgtcccaccagtatggggccctgaccttcgtggatgaggtccatgctgtaggactgtatgggtcccggggcgctgggattggggagcgtgatggaattatgcataagattgacatcatctctggaactcttggcaaggcctttggctgtgtgggcggctacattgccagcacccgtgacttggtggacatggtgcgctcctatgctgcaggcttcatctttaccacttctctgccccccatggtgctctctggagctctagaatctgtgcggctgctcaagggagaggagggccaagccctgaggcgagcccaccagcgcaatgtcaagcacatgcgccagctactcatggacaggggccttcctgtcatcccctgccccagccacatcatccccatccgggtgggcaatgcagcactcaacagcaagctctgtgatctcctgctctccaagcatggcatctatgtgcaggccatcaactacccaactgtcccccggggtgaagagctcctgcgcttggcaccctccccccaccacagccctcagatgatggaagattttgtggagaagctgctgctggcttggactgcggtggggctgcccctccaggatgtgtctgtggctgcctgcaatttctgtcgccgtcctgtacactttgagctcatgagtgagtgggaacgttcctacttcgggaacatggggccccagtatgtcaccacctatgcctgagaagccagctgcctaggattcacaccccacctgcgcttcacttgggtccaggcctactcctgtcttctgctttgttgtgtgcctctagctg

SEQ ID NO: 1788 - DNA, 1936 bp, Homo sapiens
  source 1..1936: mol_type = unassigned DNA
acctgtcattcgttcgtcctcagtgcagggcaacagggcccacatgccttggccccacataccaacccaggctgctgtgacagcccatgagagggggagaggttgctctgggatggaacaagaaaaagaggttgttttgtgaggactttaggttcaagatggtgactgcagccatgctgctacagtgctgcccagtgcttgcccggggccccacaagcctcctaggcaaggtggttaagactcaccagttcctgtttggtattggacgctgtcccatcctggctacccaaggaccaaactgttctcaaatccaccttaaggcaacaaaggctggaggagattctccatcttgggcgaagggccactgtcccttcatgctgtcggaactccaggatgggaagagcaagattgtgcagaaggcagccccagaagtccaggaagatgtgaaggctttcaagacaggaaactatgtcttcagttatgaccagtttttcagggacaagatcatggagaagaaacaggatcacacctaccgtgtgttcaagactgtgaaccgctgggctgatgcatatccctttgcccaacatttctctgaggcatctgtggcctcaaaggatgtgtccgtctggtgtagtaatgattacctgggcatgagccgacaccctcaggtcttgcaagccacacaggagaccctgcagcgtcatggtgctggagctggtggcacccgcaacatctcaggcaccagtaagtttcatgtggagcttgagcaggagctggctgagctgcaccagaaggactcagccctgctcttctcctcctgctttgttgccaatgactctactctcttcaccttggccaagatcctgccagggtgcgagatttactcagacgcaggcaaccatgcttccatgatccaaggtatccgtaacagtggagcagccaagtttgtcttcaggcacaatgaccctgaccacctaaagaaacttctagagaagtctaaccctaagatacccaaaattgtggcctttgagactgtccactccatggatggtgccatctgtcccctcgaggagttgtgtgatgtgtcccaccagtatggggccctgaccttcgtggatgaggtccatgctgtaggactgtatgggtcccggggcgctgggattggggagcgtgatggaattatgcataagattgacatcatctctggaactcttggcaaggcctttggctgtgtgggcggctacattgccagcacccgtgacttggtggacatggtgcgctcctatgctgcaggcttcatctttaccacttctctgccccccatggtgctctctggagctctagaatctgtgcggctgctcaagggagaggagggccaagccctgaggcgagcccaccagcgcaatgtcaagcacatgcgccagctactcatggacaggggccttcctgtcatcccctgccccagccacatcatccccatccgggtgggcaatgcagcactcaacagcaagctctgtgatctcctgctctccaagcatggcatctatgtgcaggccatcaactacccaactgtcccccggggtgaagagctcctgcgcttggcaccctccccccaccacagccctcagatgatggaagattttgtggagaagctgctgctggcttggactgcggtggggctgcccctccaggatgtgtctgtggctgcctgcaatttctgtcgccgtcctgtacactttgagctcatgagtgagtgggaacgttcctacttcgggaacatggggccccagtatgtcaccacctatgcctgagaagccagctgcctaggattcacaccccacctgcgcttcacttgggtccaggcctactcctgtcttctgctttgttgtgtgcctctagctgaattgagcctaaaaataaagcacaaaccacagca

SEQ ID NO: 1789 - DNA, 664 bp, Homo sapiens
  source 1..664: mol_type = unassigned DNA
acctgtcattcgttcgtcctcagtgcagggcaacagattctccatcttgggcgaagggccactgtcccttcatgctgtcggaactccaggatgggaagagcaagattgtgcagaaggcagccccagaagtccaggaagatgtgaaggctttcaagacagatctgcctagctccctggtctcagtcagcctaaggaagccattttccggtccccaggagcaggagcagatctctgggaaggtcacacacctgattcagaacaatatgcctggaaactatgtcttcagttatgaccagtttttcagggacaagatcatggagaagaaacaggatcacacctaccgtgtgttcaagactgtgaaccgctgggctgatgcatatccctttgcccaacatttctctgaggcatctgtggcctcaaaggatgtgtccgtctggtgtagtaatgattacctgggcatgagccgacaccctcaggtcttgcaagccacacaggagaccctgcagcgtcatggtgctggagctggtggcacccgcaacatctcaggcaccagtaagtttcatgtggagcttgagcaggagctggctgagctgcaccagaaggactcagccctgctcttctcctcctgctttgttgccaatgactctactctcttcaccttggc

SEQ ID NO: 1790 - DNA, 2276 bp, Homo sapiens
  source 1..2276: mol_type = unassigned DNA
agacagggcggttctgcagggggcggtctagcccctagctttgttctgggcagcccaatcagctctggattgcccgagctgccctgaagagtcagccgaaagagctggaggcttcttccctgtggttgcgggttcctgcattctctgctctaaatcccagcctgcccttggggctgcccacgcccccttcagatcctttgctccggagagagacctgtccgagcagaggcctggactacatctcccggcgtgcctggcagtgtggtggcctctgtgcgccgtctgcactcgttgcaggcgacgatgcagagggctgtaagtgtggtggcccgtctgggctttcgcctgcaggcattccccccggccttgtgtcgtccacttagttgcgcacaggaggtgctccgcaggacaccgctctatgacttccacctggcccacggcgggaaaatggtggcgtttgcgggttggagtctgccagtgcagtaccgggacagtcacactgactcgcacctgcacacacgccagcactgctcgctctttgacgtgtctcatatgctgcagaccaagatacttggtagtgaccgggtgaagctgatggagagtctagtggttggagacattgcagagctaagaccaaaccaggggacactgtcgctgtttaccaacgaggctggaggcatcttagatgacttgattgtaaccaatacttctgagggccacctgtatgtggtgtccaacgctggctgctgggagaaagatttggccctcatgcaggacaaggtcagggagcttcagaaccagggcagagatgtgggcctggaggtgttggataatgccctgctagctctgcaaggccccactgcagcccaggtactacaggccggcgtggcagatgacctgaggaaactgcccttcatgaccagtgctgtgatggaggtgtttggcgtgtctggctgccgcgtgacccgctgtggctacacaggagaggatggtgtggagatctcggtgccggtagcgggggcagttcacctggcaacagctattctgaaaaacccagaggtgaagctggcagggctggcagccagggacagcctgcgcctggaggcaggcctctgcctgtatgggaatgacattgatgaacacactacacctgtggagggcagcctcagttggacactggggaagcgccgccgagctgctatggacttccctggagccaaggtcattgttccccagctgaagggcagggtgcagcggaggcgtgtggggttgatgtgtgagggggcccccatgcgggcacacagtcccatcctgaacatggagggtaccaagattggtactgtgactagtggctgcccctccccctctctgaagaagaatgtggcgatgggttatgtgccctgcgagtacagtcgtccagggacaatgctgctggtagaggtgcggcggaagcagcagatggctgtagtcagcaagatgccctttgtgcccacaaactactataccctcaagtgaagctggctcagggtggggctgtcccttccaggagttttgcccctacaaggggttagtcaagaagctgaggcagaactcactgggggtgggcagttaaggtggaggctgattctaattgtctggttgaggggccacaccacctattccccccacctaactcatgccattccagcttccttcaggaccctgcttctgagtgacggaccagctcacacaatgtcttgtttcagtccatgatcccactgacctactcttgcctgctggagggtaatgagaagctttggttctgccatctctcccactctgccaggtgctggctgtggagcaaaggctcacctttgtggagaggataaaacctgcccaacctacctcaccatggtttttcacattgcaaagggtaataacatgggcagtgcggacttaggctaccccctccagtttgctttccgtaaatgcaaattgtccttactgcaagtcaggaatgattgctgactcacagtagggctgctatgcctgtgtgtaaacttggggatggctgagggaacatagactcactcttccacattcccaagttggtctagtgtgctgcccagtagcaaaccatggcagactcaccacctattctgagttccagggctgctgtagggcagggtgggcttcctcccagacttgccttaccctgggctgatctttgcccctggtatgcattaatggactccactgaatcctgaaaaaaaaattaaacttccttcttacttgcc

SEQ ID NO: 1791 - DNA, 1955 bp, Homo sapiens
  source 1..1955: mol_type = unassigned DNA
gagctgccctgaagagtcagccgaaagagctggaggcttcttccctgtggttgcgggttcctgcattctctgctctaaatcccagcctgcccttggggctgcccacgcccccttcagatcctttgctccggagagagacctgtccgagcagaggcctggactacatctcccggcgtgcctggcagtgtggtggcctctgtgcgccgtctgcactcgttgcaggcgacgatgcagagggctgtaagtgtggtggcccgtctgggctttcgcctgcaggcattccccccggccttgtgtcgtccacttagttgcgcacaggaggtgctccgcaggacaccgctctatgacttccacctggcccacggcgggaaaatggtggcgtttgcgggttggagtctgccagtgcagtaccgggacagtcacactgactcgcacctgcacacacgccagcactgctcgctctttgacgtgtctcatatgctgcagaccaagatacttggtagtgaccgggtgaagctgatggagagtctagtggttggagacattgcagagctaagaccaaaccaggggacactgtcgctgtttaccaacgaggctggaggcatcttagatgacttgattgtaaccaatacttctgagggccacctgtatgtggtgtccaacgctggctgctgggagaaagatttggccctcatgcaggacaaggtcagggagcttcagaaccagggcagagatgtgggcctggaggtgttggataatgccctgctagctctgcaaggccccactgcagcccaggtactacaggccggcgtggcagatgacctgaggaaactgcccttcatgaccagtgctgtgatggaggtgtttggcgtgtctggctgccgcgtgacccgctgtggctacacaggagaggatggtgtggagatctcggtgccggtagcgggggcagttcacctggcaacagctattctgaaaaacccagaggtgaagctggcagggctggcagccagggacagcctgcgcctggaggcaggcctctgcctgtatgggaatgacattgatgaacacactacacctgtggagggcagcctcagttggacactggggaagcgccgccgagctgctatggacttccctggagccaaggtcattgttccccagctgaagggcagggtgcagcggaggcgtgtggggttgatgtgtgagggggcccccatgcgggcacacagtcccatcctgaacatggagggtaccaagattggtactgtgactagtggctgcccctccccctctctgaagaagaatgtggcgatgggttatgtgccctgcgagtacagtcgtccagggacaatgctgctggtagagcttccttcaggaccctgcttctgagtgacggaccagctcacacaatgtcttgtttcagtccatgatcccactgacctactcttgcctgctggagggtaatgagaagctttggttctgccatctctcccactctgccaggtgctggctgtggagcaaaggctcacctttgtggagaggataaaacctgcccaacctacctcaccatggtttttcacattgcaaagggtaataacatgggcagtgcggacttaggctaccccctccagtttgctttccgtaaatgcaaattgtccttactgcaagtcaggaatgattgctgactcacagtagggctgctatgcctgtgtgtaaacttggggatggctgagggaacatagactcactcttccacattcccaagttggtctagtgtgctgcccagtagcaaaccatggcagactcaccacctattctgagttccagggctgctgtagggcagggtgggcttcctcccagacttgccttaccctgggctgatctttgcccctggtatgcattaatggactccactgaatcctgaaaaaaaaattaaacttccttcttacttgcca

SEQ ID NO: 1792 - DNA, 1719 bp, Homo sapiens
  source 1..1719: mol_type = unassigned DNA
ggctgtaagtgtggtggcccgtctgggctttcgcctgcaggcattccccccggccttgtgtcgtccacttagttgcgcacaggaggtgctccgcaggacaccgctctatgacttccacctggcccacggcgggaaaatggtggcgtttgcgggttggagtctgccagtgcagtaccgggacagtcacactgactcgcacctgcacacacgccagcactgctcgctctttgacgtgtctcatatgctgcagaccaagatacttggtagtgaccgggtgaagctgatggagagtctagtggttggagacattgcagagctaagaccaaaccaggggacactgtcgctgtttaccaacgaggctggaggcatcttagatgacttgattgtaaccaatacttctgagggccacctgtatgtggtgtccaacgctggctgctgggagaaagatttggccctcatgcaggacaaggtcagggagcttcagaaccagggcagagatgtgggcctggaggtgttggataatgccctgctagctctgcaaggccccactgcagcccaggtactacaggccggcgtggcagatgacctgaggaaactgcccttcatgaccagtgctgtgatggaggtgtttggcgtgtctggctgccgcgtgacccgctgtggctacacaggagaggatggtgtggagatctcggtgccggtagcgggggcagttcacctggcaacagctattctgaaaaacccagaggtgaagctggcagggctggcagccagggacagcctgcgcctggaggcaggcctctgcctgtatgggaatgacattgatgaacacactacacctgtggagggcagcctcagttggacactggggaagcgccgccgagctgctatggacttccctggagccaaggtcattgttccccagctgaagggcagggtgcagcggaggcgtgtggggttgatgtgtgagggggcccccatgcgggcacacagtcccatcctgaacatggagggtaccaagattggtactgtgactagtggctgcccctccccctctctgaagaagaatgtggcgatgggttatgtgccctgcgagtacagtcgtccagggacaatgctgctggtagagcttccttcaggaccctgcttctgagtgacggaccagctcacacaatgtcttgtttcagtccatgatcccactgacctactcttgcctgctggagggtaatgagaagctttggttctgccatctctcccactctgccaggtgctggctgtggagcaaaggctcacctttgtggagaggataaaacctgcccaacctacctcaccatggtttttcacattgcaaagggtaataacatgggcagtgcggacttaggctaccccctccagtttgctttccgtaaatgcaaattgtccttactgcaagtcaggaatgattgctgactcacagtagggctgctatgcctgtgtgtaaacttggggatggctgagggaacatagactcactcttccacattcccaagttggtctagtgtgctgcccagtagcaaaccatggcagactcaccacctattctgagttccagggctgctgtagggcagggtgggcttcctcccagacttgccttaccctgggctgatctttgcccctggtatgcattaatggactccactgaatcctgaaaaaaaaattaaacttccttcttacttgcca

SEQ ID NO: 1793 - DNA, 1860 bp, Homo sapiens
  source 1..1860: mol_type = unassigned DNA
gcactcgttgcaggcgacgatgcagagggctgtaagtgtggtggcccgtctgggctttcgcctgcaggcattccccccggccttgtgtcgtccacttagttgcgcacaggaggtgctccgcaggacaccgctctatgacttccacctggcccacggcgggaaaatggtggcgtttgcgggttggagtctgccagtgcagtaccgggacagtcacactgactcgcacctgcacacacgccagcactgctcgctctttgacgtgtctcatatgctgcagaccaagatacttggtagtgaccgggtgaagctgatggagagtctagtggttggagacattgcagagctaagaccaaaccaggacaaggtcagggagcttcagaaccagggcagagatgtgggcctggaggtgttggataatgccctgctagctctgcaaggccccactgcagcccaggtactacaggccggcgtggcagatgacctgaggaaactgcccttcatgaccagtgctgtgatggaggtgtttggcgtgtctggctgccgcgtgacccgctgtggctacacaggagaggatggtgtggagatctcggtgccggtagcgggggcagttcacctggcaacagctattctgaaaaacccagaggtgaagctggcagggctggcagccagggacagcctgcgcctggaggcaggcctctgcctgtatgggaatgacattgatgaacacactacacctgtggagggcagcctcagttggacactggggaagcgccgccgagctgctatggacttccctggagccaaggtcattgttccccagctgaagggcagggtgcagcggaggcgtgtggggttgatgtgtgagggggcccccatgcgggcacacagtcccatcctgaacatggagggtaccaagattggtactgtgactagtggctgcccctccccctctctgaagaagaatgtggcgatgggttatgtgccctgcgagtacagtcgtccagggacaatgctgctggtagaggtgcggcggaagcagcagatggctgtagtcagcaagatgccctttgtgcccacaaactactataccctcaagtgaagctggctcagggtggggctgtcccttccaggagttttgcccctacaaggggttagtcaagaagctgaggcagaactcactgggggtgggcagttaaggtggaggctgattctaattgtctggttgaggggccacaccacctattccccccacctaactcatgccattccagcttccttcaggaccctgcttctgagtgacggaccagctcacacaatgtcttgtttcagtccatgatcccactgacctactcttgcctgctggagggtaatgagaagctttggttctgccatctctcccactctgccaggtgctggctgtggagcaaaggctcacctttgtggagaggataaaacctgcccaacctacctcaccatggtttttcacattgcaaagggtaataacatgggcagtgcggacttaggctaccccctccagtttgctttccgtaaatgcaaattgtccttactgcaagtcaggaatgattgctgactcacagtagggctgctatgcctgtgtgtaaacttggggatggctgagggaacatagactcactcttccacattcccaagttggtctagtgtgctgcccagtagcaaaccatggcagactcaccacctattctgagttccagggctgctgtagggcagggtgggcttcctcccagacttgccttaccctgggctgatctttgcccctggtatgcattaatggactccactgaatcctgaaaaaaaaattaaacttccttcttacttgcc

SEQ ID NO: 1794 - DNA, 2033 bp, Homo sapiens
  source 1..2033: mol_type = unassigned DNA
gagctgccctgaagagtcagccgaaagagctggaggcttcttccctgtggttgcgggttcctgcattctctgctctaaatcccagcctgcccttggggctgcccacgcccccttcagatcctttgctccggagagagacctgtccgagcagaggcctggactacatctcccggcgtgcctggcagtgtggtggcctctgtgcgccgtctgcactcgttgcaggcgacgatgcagagggctgtaagtgtggtggcccgtctgggctttcgcctgcaggcattccccccggccttgtgtcgtccacttagttgcgcacagaccaagatacttggtagtgaccgggtgaagctgatggagagtctagtggttggagacattgcagagctaagaccaaaccaggggacactgtcgctgtttaccaacgaggctggaggcatcttagatgacttgattgtaaccaatacttctgagggccacctgtatgtggtgtccaacgctggctgctgggagaaagatttggccctcatgcaggacaaggtcagggagcttcagaaccagggcagagatgtgggcctggaggtgttggataatgccctgctagctctgcaaggccccactgcagcccaggtactacaggccggcgtggcagatgacctgaggaaactgcccttcatgaccagtgctgtgatggaggtgtttggcgtgtctggctgccgcgtgacccgctgtggctacacaggagaggatggtgtggagatctcggtgccggtagcgggggcagttcacctggcaacagctattctgaaaaacccagaggtgaagctggcagggctggcagccagggacagcctgcgcctggaggcaggcctctgcctgtatgggaatgacattgatgaacacactacacctgtggagggcagcctcagttggacactggggaagcgccgccgagctgctatggacttccctggagccaaggtcattgttccccagctgaagggcagggtgcagcggaggcgtgtggggttgatgtgtgagggggcccccatgcgggcacacagtcccatcctgaacatggagggtaccaagattggtactgtgactagtggctgcccctccccctctctgaagaagaatgtggcgatgggttatgtgccctgcgagtacagtcgtccagggacaatgctgctggtagaggtgcggcggaagcagcagatggctgtagtcagcaagatgccctttgtgcccacaaactactataccctcaagtgaagctggctcagggtggggctgtcccttccaggagttttgcccctacaaggggttagtcaagaagctgaggcagaactcactgggggtgggcagttaaggtggaggctgattctaattgtctggttgaggggccacaccacctattccccccacctaactcatgccattccagcttccttcaggaccctgcttctgagtgacggaccagctcacacaatgtcttgtttcagtccatgatcccactgacctactcttgcctgctggagggtaatgagaagctttggttctgccatctctcccactctgccaggtgctggctgtggagcaaaggctcacctttgtggagaggataaaacctgcccaacctacctcaccatggtttttcacattgcaaagggtaataacatgggcagtgcggacttaggctaccccctccagtttgctttccgtaaatgcaaattgtccttactgcaagtcaggaatgattgctgactcacagtagggctgctatgcctgtgtgtaaacttggggatggctgagggaacatagactcactcttccacattcccaagttggtctagtgtgctgcccagtagcaaaccatggcagactcaccacctattctgagttccagggctgctgtagggcagggtgggcttcctcccagacttgccttaccctgggctgatctttgcccctggtatgcattaatggactccactgaatcctgaaaaaaaaattaaacttccttcttacttgcc

SEQ ID NO: 1795 - DNA, 1123 bp, Homo sapiens
  source 1..1123: mol_type = unassigned DNA
gatgcagagggctgtaagtgtggtggcccgtctgggctttcgcctgcaggcattccccccggccttgtgtcgtccacttagttgcgcacagtggtccactccttggctttgtttgctgtgaactggattccaaggacagccttctcagaagagctagagaccaagatacttggtagtgaccgggtgaagctgatggagagtctagtggttggagacattgcagagctaagaccaaaccaggggacactgtcgctgtttaccaacgaggctggaggcatcttagatgacttgattgtaaccaatacttctgagggccacctgtatgtggtgtccaacgctggctgctgggagaaagatttggccctcatgcaggacaaggtcagggagcttcagaaccagggcagagatgtgggcctggaggtgttggataatgccctgctagctctgcaaggccccactgcagcccaggtactacaggccggcgtggcagatgacctgaggaaactgcccttcatgaccagtgctgtgatggaggtgtttggcgtgtctggctgccgcgtgacccgctgtggctacacaggagaggatggtgtggagatctcggtgccggtagcgggggcagttcacctggcaacagctattctgaaaaacccagaggtgaagctggcagggctggcagccagggacagcctgcgcctggaggcaggcctctgcctgtatgggaatgacattgatgaacacactacacctgtggagggcagcctcagttggacactggggaagcgccgccgagctgctatggacttccctggagccaaggtcattgttccccagctgaagggcagggtgcagcggaggcgtgtggggttgatgtgtgagggggcccccatgcgggcacacagtcccatcctgaacatggagggtaccaagattggtactgtgactagtggctgcccctccccctctctgaagaagaatgtggcgatgggttatgtgccctgcgagtacagtcgtccagggacaatgctgctggtagaggtgcggcggaagcagcagatggctgtagtcagcaagatgccctttgtgcccacaaactactataccctcaagtgaagctggctca

SEQ ID NO: 1796 - DNA, 4353 bp, Homo sapiens
  source 1..4353: mol_type = unassigned DNA
gggcgcgcccggccggcggggccgcgcacgcagccgccgccaccacttccccctctccctccctccttgcgggccctcctccccttccctcccctccgcccccttccccgtaggcagcccgcccgccagtccgcccgcaccgcctccttcccagcccctagcgctccggctgggtctctcccccgccccccaggctcccccggtcgctctcctccggcggtcgcccgcgctcggtggatgtggctggcagctgccgccccctccctcgctcgccgcctgctcttcctcggccctccgcctcctcccctcctccttctcgtcttcagccgctcctctcgccgccgcctccacagcctgggcctcgccgcgatgccggagaagaggcccttcgagcggctgcctgccgatgtctcccccatcaactacagcctttgcctcaagcccgacttgctggacttcaccttcgagggcaagctggaggccgccgcccaggtgaggcaggcgactaatcagattgtgatgaattgtgctgatattgatattattacagcttcatatgcaccagaaggagatgaagaaatacatgctacaggatttaactatcagaatgaagatgaaaaagtcaccttgtctttccctagtactctgcaaacaggtacgggaaccttaaagatagattttgttggagagctgaatgacaaaatgaaaggtttctatagaagtaaatatactaccccttctggagaggtgcgctatgctgctgtaacacagtttgaggctactgatgcccgaagggcttttccttgctgggatgagcctgctatcaaagcaacttttgatatctcattggttgttcctaaagacagagtagctttatcaaacatgaatgtaattgaccggaaaccataccctgatgatgaaaatttagtggaagtgaagtttgcccgcacacctgttatgtctacatatctggtggcatttgttgtgggtgaatatgactttgtagaaacaaggtcaaaagatggtgtgtgtgtccgtgtttacactcctgttggcaaagcagagcaaggaaaatttgcgttagaggttgctgctaaaaccttgcctttttataaggactacttcaatgttccttatcctctacctaaaattgatctcattgctattgcagactttgcagctggtgccatggagaactggggccttgttacttatagggagactgcattgcttattgatccaaaaaattcctgttcttcatcccgccagtgggttgctctggttgtgggacatgaactcgcccatcaatggtttggaaatcttgttactatggaatggtggactcatctttggttaaatgaaggttttgcatcctggattgaatatctgtgtgtagaccactgcttcccagagtatgatatttggactcagtttgtttctgctgattacacccgtgcccaggagcttgacgccttagataacagccatcctattgaagtcagtgtgggccatccatctgaggttgatgagatatttgatgctatatcatatagcaaaggtgcatctgtcatccgaatgctgcatgactacattggggataaggactttaagaaaggaatgaacatgtatttaaccaagttccaacaaaagaatgctgccacagaggatctctgggaaagtttagaaaatgctagtggtaaacctatagcagctgtgatgaatacctggaccaaacaaatgggatttcccctcatttatgtggaagctgaacaggtagaagatgacagattattgaggttgtcccaaaagaagttctgtgctggtgggtcatatgttggtgaagattgtccccagtggatggtccctatcacaatctctactagtgaagaccccaaccaggccaaactaaaaattctaatggacaagccagagatgaatgtggttttgaaaaatgtcaaaccagaccaatgggtgaagttaaacttaggaacagttgggttttatcggacccagtacagctctgccatgctggaaagtttattaccaggcattcgtgacctttctctgccccctgtggatcgacttggattacagaatgacctcttctccttggctcgagctggaatcattagcactgtagaggttctaaaagtcatggaggcttttgtgaatgagcccaattatactgtatggagcgacctgagctgtaacctggggattctctcaactctcttgtcccacacagacttctatgaggaaatccaggagtttgtgaaagatgtcttttcacctataggggagagactgggctgggaccccaaacctggagaaggtcatctcgatgcactcctgaggggcttggttctgggaaaactaggaaaagcaggacataaggcaacgttagaagaagcccgtcgtcggtttaaggaccacgtggaaggaaaacagattctctccgctgatctgaggagtcctgtctatctgactgttttgaagcatggtgatggcactactttagatattatgttaaaacttcataaacaagcagatatgcaagaagagaaaaaccgaatcgaaagagtccttggcgctactcttttgcctgacctgattcaaaaagtcctcacgtttgcactttcagaagaggtacgtccacaggacactgtatcggtaattggtggagtagctggaggcagcaagcatggtaggaaagctgcttggaaattcataaaggacaactgggaagaactttataaccgataccagggaggattcttaatatccagactaataaagctatcagttgagggatttgcagttgataaaatggctggagaggttaaggctttcttcgagagtcacccagctccttcagctgagcgtaccatccagcagtgttgtgaaaatattctgctgaatgctgcctggctaaagcgagatgctgagagcatccaccagtacctccttcagcggaaggcctcaccacccacagtgtgaatcctgaggtgccgccattggcggttctgctgcttcgctgcagggataaggtggagctaccgaacagctgattcatatgccaagaatttggagtcttctttcaaaccagtgggggttggacaatgaatgtagttaactggttcctgctcacactccagaattaaattctattgaaaaaggaaaatcagcaattcagcaaaaaataaataaaaaataaaaatgtaaatatgatagtaataaaatagagcataacgaaactgtgaaactttctgaagccttgtcagtggttaaaagtatttaacactctactgttaatgacagatgttctgtttttataacctaccaaaaggaaactagaggcttcttggtgaagagcatttttgtgaagtgggttctgcaaggagcctataaagccaagggtggtgtccatttctgggaatggttaaacacaaaaggctgatagctggtatcacatagttggagtcagtgcataattccaagtggctttttttttttttggcacggggactgatcaggaagatatattcctgcataactcaatctgaaccaaggattgtagtttagttttcctccttgccttcccttctgtgtgaccgaccccttggccaaaaaaaaacaaaaagcaaaaaacaaaaacctaccctgttctggtttttttcctccctttagttccacccccaacccccattccctggtgtccttcttagagatgaagaaataataaggaaacatctttcatagccacattaaataagagaaactgatatacattatttttttctttttaaagatgacttataagaaccctgaaatttatataggtgagacaatagaaataaaaagatcttcagccaggcctttctgaaggagttattctgctaaaaatggtcttagttgtctgaaaagccagctcttgaacctcttcacaacagtatcaacactggcttctcccggttcattttatgcgtgcgagaagtcagtggtaactgctgcagggcttaatacattagtggtaactggtttaaaaaacaaagactgtaagcctgtgtgtgccactgtttgcttcaacagtatatcctaataagcctcacctatttaatccaatgagttttaaatctaaatctcattcccttcttctttccctaccttttttttctttttttcttaaaaaaatattttgtgttattaacagaaattcatatttggtgtggcttaacggtatttcagaaggtcatcagattgtgagactgcttccttgaaacatttttgtgctattgttttaaaaaaataattaaaaaacagttggcgttaataaaaatgtcaatgtgaaactga

SEQ ID NO: 1797 - DNA, 2238 bp, Homo sapiens
  source 1..2238: mol_type = unassigned DNA
tcctccggcggtcgcccgcgctcggtggatgtggctggcagctgccgccccctccctcgctcgccgcctgctcttcctcggccctccgcctcctcccctcctccttctcgtcttcagccgctcctctcgccgccgcctccacagcctgggcctcgccgatgtctcccccatcaactacagcctttgcctcaagcccgacttgctggacttcaccttcgagggcaagctggaggccgccgcccaggtgaggcaggcgactaatcagattgtgatgaattgtgctgatattgatattattacagcttcatatgcaccagaaggagatgaagaaatacatgctacaggatttaactatcagaatgaagatgaaaaagtcaccttgtctttccctagtactctgcaaacaggtacgggaaccttaaagatagattttgttggagagctgaatgacaaaatgaaaggtttctatagaagtaaatatactaccccttctggagaggtgcgctatgctgctgtaacacagtttgaggctactgatgcccgaagggcttttccttgctgggatgagcctgctatcaaagcaacttttgatatctcattggttgttcctaaagacagagtagctttatcaaacatgaatgtaattgaccggaaaccataccctgatgatgaaaatttagtggaagtgaagtttgcccgcacacctgttatgtctacatatctggtggcatttgttgtgggtgaatatgactttgtagaaacaaggtcaaaagatggtgtgtgtgtccgtgtttacactcctgttggcaaagcagagcaaggaaaatttgcgttagaggttgctgctaaaaccttgcctttttataaggactacttcaatgttccttatcctctacctaaaattgatctcattgctattgcagactttgcagctggtgccatggagaactggggccttgttacttatagggagactgcattgcttattgatccaaaaaattcctgttcttcatcccgccagtgggttgctctggttgtgggacatgaactcgcccatcaatggtttggaaatcttgttactatggaatggtggactcatctttggttaaatgaaggttttgcatcctggattgaatatctgtgtgtagaccactgcttcccagagtatgatatttggactcagtttgtttctgctgattacacccgtgcccaggagcttgacgccttagataacagccatcctattgaagtcagtgtgggccatccatctgaggttgatgagatatttgatgctatatcatatagcaaaggtgcatctgtcatccgaatgctgcatgactacattggggataaggactttaagaaaggaatgaacatgtatttaaccaagttccaacaaaagaatgctgccacagaggatctctgggaaagtttagaaaatgctagtggtaaacctatagcagctgtgatgaatacctggaccaaacaaatgggatttcccctcatttatgtggaagctgaacaggtagaagatgacagattattgaggttgtcccaaaagaagttctgtgctggtgggtcatatgttggtgaagattgtccccagtggatggtccctatcacaatctctactagtgaagaccccaaccaggccaaactaaaaattctaatggacaagccagagatgaatgtggttttgaaaaatgtcaaaccagaccaatgggtgaagttaaacttaggaacagttgggttttatcggacccagtacagctctgccatgctggaaagtttattaccaggcattcgtgacctttctctgccccctgtggatcgacttggattacagaatgacctcttctccttgttcattttatgcgtgcgagaagtcagtggtaactgctgcagggcttaatacattagtggtaactggtttaaaaaacaaagactgtaagcctgtgtgtgccactgtttgcttcaacagtatatcctaataagcctcacctatttaatccaatgagttttaaatctaaatctcattcccttcttctttccctaccttttttttctttttttcttaaaaaaatattttgtgttattaacagaaattcatatttggtgtggcttaacggtatttcagaaggtcatcagattgtgagactgcttccttgaaacatttttgtgctattgttttaaaaaaataattaaaaaacagttggcgttaataaaaatgtcaatgtg

SEQ ID NO: 1798 - DNA, 2823 bp, Homo sapiens
  source 1..2823: mol_type = unassigned DNA
cctcgctcgccgcctgctcttcctcggccctccgcctcctcccctcctccttctcgtcttcagccgctcctctcgccgccgcctccacagcctgggcctcgccgcgatgccggagaagaggcccttcgagcggctgcctgccgatgtctcccccatcaactacagcctttgcctcaagcccgacttgctggacttcaccttcgagggcaagctggaggccgccgcccaggtgaggcaggcgactaatcagattgtgatgaattgtgctgatattgatattattacagcttcatatgcaccagaaggagatgaagaaatacatgctacaggatttaactatcagaatgaagatgaaaaagtcaccttgtctttccctagtactctgcaaacaggtacgggaaccttaaagatagattttgttggagagctgaatgacaaaatgaaaggtttctatagaagtaaatatactaccccttctggagaggtgcgctatgctgctgtaacacagtttgagaatgtaattgaccggaaaccataccctgatgatgaaaatttagtggaagtgaagtttgcccgcacacctgttatgtctacatatctggtggcatttgttgtgggtgaatatgactttgtagaaacaaggtcaaaagatggtgtgtgtgtccgtgtttacactcctgttggcaaagcagagcaaggaaaatttgcgttagaggttgctgctaaaaccttgcctttttataaggactacttcaatgttccttatcctctacctaaaattgatctcattgctattgcagactttgcagctggtgccatggagaactggggccttgttacttatagggagactgcattgcttattgatccaaaaaattcctgttcttcatcccgccagtgggttgctctggttgtgggacatgaactcgcccatcaatggtttggaaatcttgttactatggaatggtggactcatctttggttaaatgaaggttttgcatcctggattgaatatctgtgtgtagaccactgcttcccagagtatgatatttggactcagtttgtttctgctgattacacccgtgcccaggagcttgacgccttagataacagccatcctattgaagtcagtgtgggccatccatctgaggttgatgagatatttgatgctatatcatatagcaaaggtgcatctgtcatccgaatgctgcatgactacattggggataaggactttaagaaaggaatgaacatgtatttaaccaagttccaacaaaagaatgctgccacagaggatctctgggaaagtttagaaaatgctagtggtaaacctatagcagctgtgatgaatacctggaccaaacaaatgggatttcccctcatttatgtggaagctgaacaggtagaagatgacagattattgaggttgtcccaaaagaagttctgtgctggtgggtcatatgttggtgaagattgtccccagtggatggtccctatcacaatctctactagtgaagaccccaaccaggccaaactaaaaattctaatggacaagccagagatgaatgtggttttgaaaaatgtcaaaccagaccaatgggtgaagttaaacttaggaacagttgggttttatcggacccagtacagctctgccatgctggaaagtttattaccaggcattcgtgacctttctctgccccctgtggatcgacttggattacagaatgacctcttctccttggctcgagctggaatcattagcactgtagaggttctaaaagtcatggaggcttttgtgaatgagcccaattatactgtatggagcgacctgagctgtaacctggggattctctcaactctcttgtcccacacagacttctatgaggaaatccaggagtttgtgaaagatgtcttttcacctataggggagagactgggctgggaccccaaacctggagaaggtcatctcgatgcactcctgaggggcttggttctgggaaaactaggaaaagcaggacataaggcaacgttagaagaagcccgtcgtcggtttaaggaccacgtggaaggaaaacagattctctccgctgatctgaggagtcctgtctatctgactgttttgaagcatggtgatggcactactttagatattatgttaaaacttcataaacaagcagatatgcaagaagagaaaaaccgaatcgaaagagtccttggcgctactcttttgcctgacctgattcaaaaagtcctcacgtttgcactttcagaagaggtacgtccacaggacactgtatcggtaattggtggagtagctggaggcagcaagcatggtaggaaagctgcttggaaattcataaaggacaactgggaagaactttataaccgataccagggaggattcttaatatccagactaataaagctatcagttgagggatttgcagttgataaaatggctggagaggttaaggctttcttcgagagtcacccagctccttcagctgagcgtaccatccagcagtgttgtgaaaatattctgctgaatgctgcctggctaaagcgagatgctgagagcatccaccagtacctccttcagcggaaggcctcaccacccacagtgtgaatcctgaggtgccgccattggcggttctgctgcttcgctgcagggataaggtggagctaccgaacagctgattcatatgccaagaatttggagtcttctttcaaaccagtgggggttggacaatgaatgtagttaactggttcctgctcacactccagaattaaattctattgaaaaaggaaaatcagcaattcagc

SEQ ID NO: 1799 - DNA, 1743 bp, Homo sapiens
  source 1..1743: mol_type = unassigned DNA
tggagcagcggggcctggcacacagtaggcgttctataaatgtgtcacaagaatggcttccctcaggaaggcggcattaccgctgcctttctgcagaaaaggaaactaaggctcagcaagaaccaccgcccagccagagccaaggtcacagagcacgtccgtggcacgcgtccaggtcgtgccacagcagggccggcggcttcgacgcgggcagccgggtcccttttctttgacagatggggaaaccgaggcccggccggctgccggggctcctcgcacctaccccagcaactcaaattcaccacctcggactcctgcgaccgcatcaaagacgaatttcagctactgcaagctcagtaccacagcctcaagctcgaatgtgacaagttggccagtgagaagtcagagatgcagcgtcactatgtgatgtactacgagatgtcctacggcttgaacatcgagatgcacaaacaggctgagatcgtcaaaaggctgaacgggatttgtgcccaggtcctgccctacctctcccaagagcaccagcagcaggtcttgggagccattgagagggccaagcaggtcaccgctcccgagctgaactctatcatccgacagcagctccaagcccaccagctgtcccagctgcaggccctggccctgcccttgaccccactacccgtggggctgcagccgccttcgctgccggcggtcagcgcaggcaccggcctcctctcgctgtccgcgctgggttcccaggcccacctctccaaggaagacaagaacgggcacgatggtgacacccaccaggaggatgatggcgagaagtcggattagcagggggccgggacagggaggttgggaggggggacagaggggagacagaggcacggagagaaaggaatgtttagcacaagacacagcggagctcgggattggctaaactcccatagtatttatggtggccgccggcgggggccccagcccagcttgcaggccacctctagctttcttcctaccccattcccggcttccctcctcctcccctgcagcctggttaggtggatacctgccctgacatgtgaggcaagctaaggcctggagggtcagatgggagaccaggtcccaagggagcaagacctcgcgaagcgcagcagccccggcccttcccccgttttgaacatgtgtaaccgacagtctgcctgggccacagccctctcaccctggtactgcatgcacgcaatgctagctgcccctttcccgtcctgggcaccccgagtctcccccgaccccgggtcccaggtatgctcccacctccacctgccccactcaccacctctgctagttccagacacctccacgcccacctggtcctctcccatcgcccacaaaagggggggcacgagggacgagcttagctgagctgggaggagcagggtgagggtgggcgacccaggattccccctccccttcccaaataaagatgagggtactaaagttgtcttggtttttattttattattatttttttctttttccagtatactagcttgtcttttaagaaaggggatattaaaaaaaaaaaaagacaaaagtgtttttaaaaaaaagcaacacccacacctgtgtctgtatatagtcagcttatctcgtgttcaatcgtctgatctctacagagagaagtggaaaatgctgtatcaagggtgggcttagctgtgcctttccaataaagatgtgagaagcttc

SEQ ID NO: 1800 - DNA, 1676 bp, Homo sapiens
  source 1..1676: mol_type = unassigned DNA
cgggcgcgcggggagggggcgcaggaagcgggcgaggccgggcgcgggaggcggcggcggccccgggagctgccgatcggcgccgggacaaaggcgcggccgcccggcgcccccagcagcccgagccggggcgcacagccggggcgcagcccgcgccccccgccgcgattgacatgatgtttccacaaagcaggcattcgggctcctcgcacctaccccagcaactcaaattcaccacctcggactcctgcgaccgcatcaaagacgaatttcagctactgcaagctcagtaccacagcctcaagctcgaatgtgacaagttggccagtgagaagtcagagatgcagcgtcactatgtgatgtactacgagatgtcctacggcttgaacatcgagatgcacaaacaggctgagatcgtcaaaaggctgaacgggatttgtgcccaggtcctgccctacctctcccaagagcaccagcagcaggtcttgggagccattgagagggccaagcaggtcaccgctcccgagctgaactctatcatccgacagcagctccaagcccaccagctgtcccagctgcaggccctggccctgcccttgaccccactacccgtggggctgcagccgccttcgctgccggcggtcagcgcaggcaccggcctcctctcgctgtccgcgctgggttcccaggcccacctctccaaggaagacaagaacgggcacgatggtgacacccaccaggaggatgatggcgagaagtcggattagcagggggccgggacagggaggttgggaggggggacagaggggagacagaggcacggagagaaaggaatgtttagcacaagacacagcggagctcgggattggctaaactcccatagtatttatggtggccgccggcgggggccccagcccagcttgcaggccacctctagctttcttcctaccccattcccggcttccctcctcctcccctgcagcctggttaggtggatacctgccctgacatgtgaggcaagctaaggcctggagggtcagatgggagaccaggtcccaagggagcaagacctcgcgaagcgcagcagccccggcccttcccccgttttgaacatgtgtaaccgacagtctgcctgggccacagccctctcaccctggtactgcatgcacgcaatgctagctgcccctttcccgtcctgggcaccccgagtctcccccgaccccgggtcccaggtatgctcccacctccacctgccccactcaccacctctgctagttccagacacctccacgcccacctggtcctctcccatcgcccacaaaagggggggcacgagggacgagcttagctgagctgggaggagcagggtgagggtgggcgacccaggattccccctccccttcccaaataaagatgagggtactaaagttgtcttggtttttattttattattatttttttctttttccagtatactagcttgtcttttaagaaaggggatattaaaaaaaaaaaaagacaaaagtgtttttaaaaaaaagcaacacccacacctgtgtctgtatatagtcagcttatctcgtgttcaatcgtctgatctctacagagagaagtggaaaatgctgtatcaagggtgggcttagctgtgcctttccaataaagatgtgagaagcttc

SEQ ID NO: 1801 - DNA, 1907 bp, Homo sapiens
  source 1..1907: mol_type = unassigned DNA
gtctcctggtggggtgcaaggagccgaggcgagatgggcgtcctgggccgggtcctgctgtggctgcagctctgcgcactgacccaggcggtctccaaactctgggtccccaacacggacttcgacgtcgcagccaactggagccagaaccggaccccgtgcgccggcggcgccgttgagttcccggcggacaagatggtgtcagtcctggtgcaagaaggtcacgccgtctcagacatgctcctgccgctggatggggaactcgtcctggcttcaggagccggattcggcgtctcagacgtgggctcgcacctggactgtggcgcgggcgaacctgccgtcttccgcgactctgaccgcttctcctggcatgacccgcacctgtggcgctctggggacgaggcacctggcctcttcttcgtggacgccgagcgcgtgccctgccgccacgacgacgtcttctttccgcctagtgcctccttccgcgtggggctcggccctggcgctagccccgtgcgtgtccgcagcatctcggctctgggccggacgttcacgcgcgacgaggacctggctgttttcctggcgtcccgcgcgggccgcctacgcttccacgggccgggcgcgctgagcgtgggccccgaggactgcgcggacccgtcgggctgcgtctgcggcaacgcggaggcgcagccgtggatctgcgcggccctgctccagcccctgggcggccgctgcccccaggccgcctgccacagcgccctccggccccaggggcagtgctgtgacctctgtggagccgttgtgttgctgacccacggccccgcatttgacctggagcggtaccgggcgcggatactggacaccttcctgggtctgcctcagtaccacgggctgcaggtggccgtgtccaaggtgccacgctcgtcccggctccgtgaggccgatacggagatccaggtggtgctggtggagaatgggcccgagacaggcggagcggggcggctggcccgggccctcctggcggacgtcgccgagaacggcgaggccctcggcgtcctggaggcgaccatgcgggagtcgggcgcacacgtctggggcagctccgcggctgggctggcgggcggcgtggcggctgccgtgctgctggcgctgctggtcctgctggtggcgccgccgctgctgcgccgcgcggggaggctcaggtggaggaggcacgaggcggcggccccggctggagcgcccctcggcttccgcaacccggtgttcgacgtgacggcctccgaggagctgcccctgccgcggcggctcagcctggttccgaaggcggccgcagacagcaccagccacagttacttcgtcaaccctctgttcgccggggccgaggccgaggcctgagcggccgcctgaccgtcgaccttggggctctccacccgctctggccccagtcgaactgggggctagccacctcctcgtccagcccccaaacctccccttcctttccccctcctccgggggccaaggacagggtggccttactcagtaaaggtgtttcctgcacctgctgtcagcctggctatgccgccaccggccccgcccatgaggactaggagcccagccttgcgccgcattcgcactgggggacatgggaggggtctagctggccactgctggaggcagcgctggtcgtcacctgggcggccagaggctgggatctgcgaagttgaacccagaactaggagtggggcttcccccgccttccggtgaggggagggtgaggagctggagggaggggcgggagagaggcaaggggtggacggagccaaaggccgtgcctggtggggcggacggaaaaggggtgggcatccctcctggtaccaagctgctgggtgcgaaggcagatcatatgg

SEQ ID NO: 1802 - DNA, 3145 bp, Homo sapiens
  source 1..3145: mol_type = unassigned DNA
cccgctcctccgcgccgccgccagccccgctgcgcgctctgctcttcgcagctccccggacccgcagccatggccgacatcaagacgggcatcttcgccaagaacgtccagaagcgactcaaccgcgcgcaggaaaaggtcctccaaaagctggggaaagctgatgagacaaaagacgaacagttcgaagaatatgtccagaacttcaaacggcaagaagcagagggtaccagacttcagcgagaactccgaggatatttagcagcaatcaaaggcatgcaggaggcctccatgaagctcacagagtcgctgcatgaagtctatgagcctgactggtatgggcgggaagatgtgaaaatggttggtgagaaatgtgatgtgctgtgggaagacttccatcaaaaactcgtggatgggtccttgctaacactggatacctacctggggcaatttcctgacataaagaatcgcatcgccaagcgcagcaggaagctagtggactatgacagtgcccgccaccatctggaagctctgcagagctccaagaggaaggatgagagtcgaatctctaaggcagaagaagaatttcagaaagcacagaaagtgtttgaagagtttaacgttgacttacaagaagagttaccatcattatggtcaagacgagttggattttatgttaatactttcaaaaacgtctccagccttgaagccaagtttcataaggaaattgcggtgctttgccacaaactgtatgaagtgatgacaaaactgggtgaccagcacgccgacaaggccttcaccatccaaggagcgcccagtgattcgggtcctctccgcattgcaaagacaccatcaccgcctgaggagccttcacccctcccgagcccgacagcaagtccaaatcatacattagcacctgcgtctcccgcaccagcacggcctcggtcaccttcacagacaaggaaagggcctcctgtcccacctctacctaaagtcaccccgacaaaggaactgcagcaggagaacatcatcagtttctttgaggacaactttgttccagaaatcagtgtgacaacaccttcccagaatgaagtccctgaggtgaagaaagaggagactttgctggatctggactttgatcctttcaagcccgaggtgacacctgcaggttctgctggagtgacccactcacccatgtctcagacattgccctgggacctatggacgacaagcactgatttggtacagccggcttctggtggttcatttaatggattcacacagccccaggatacttcattattcacaatgcagacagaccagagtatgatctgcaacttgatcatacctggagctgatgctgatgcagctgttggaaccttggtgtcagcagctgagggggccccaggagaggaagcagaggcggagaaggccactgtccctgccggggaaggagtaagtttagaggaggccaaaattggaactgaaaccactgagggtgcagagagtgcccaacctgaagcagaggagctcgaagcaacagtgcctcaggagaaggtcattccttcggtggtcatagagcctgcctccaaccatgaagaggaaggagaaaacgaaataactataggtgcagagcccaaggagaccaccgaggacgcggctcctccgggccccaccagcgagacaccggagctggctacggagcagaagcctatccaggaccctcagcccacgccttctgcaccagccatgggggctgctgaccagctagcatctgcaagggaggcctctcaggaattgcctcctggctttctctacaaggtggaaacactgcatgattttgaggcagcaaattctgatgaacttaccttacaaaggggtgatgtggtgctggtggtcccctcagattcagaagctgatcaggatgcaggctggctggtgggagtgaaggaatcagactggcttcagtacagagaccttgccacctacaaaggcctctttccagagaacttcacccgacgcttagattagggcaacaagtactgcaagaaggagctcagttacggggtttttaaaccttcatgaaaacctgaagagttcacttttgttattatgctcttaatgatttacagactgatgccagacaaaccttgggaagatgtatcaatggagcatgtgtgcaaaaaaatgtaagaggaaaaaaagtaaattaaggaaaaaatcctcactcattcccatgttgtcaataacaggtttgtttgtgctttgtccaagctgtggagactcttgtacttgatcccctcccaccaattctaaagtagctttctccagatcagactttaatttctctgcatcaggtgtatcgtattgagtggctgccctgcagaagatgtgatgaattatcctgtagtacaagattatcttattcccctgcccaggtgtgagcacgtgctctcgctccctttcaggtttactatgtttaaaactaaactgctgcaaaagttctcaatgttcttttccaacacatctatatatatatggacacacagtcacgcaagctagttcccatgactcctggatctatgtgtatgcagaaggctacatatacatagttgcttctttcctttccattgtagctctttgcctctcaattgtcattgatacatgcattgctcttattctgtctggcattacaattgcagttttgcctaatggcaaaaccagccatcccattggcaaaagagtcaacagtatctgtgtttgtactgtgcagttttcaggatgagatgacagatagcacgactacactgaggcaccctcagagaaggcagggcctgatttatctagctgtccagccgctgtggctggaggtaggctagttgggatgggcagctaagcagtcttctcttctgcctttatgagattgggtagaaagatggggcatattcatctacccccaaaagaacactataaaaacagctcctctatatttccacctctttctatttatgcaactcatcttcacagattgttctaaagtaaaatagatggtgtatgctgtatccacaaatcatctgtaacaattatgttttcagtgctgtgtcattccaaataaacctttggtaatcttcaacgattaccctaa

SEQ ID NO: 1803 - DNA, 3665 bp, Homo sapiens
  source 1..3665: mol_type = unassigned DNA
cccgctcctccgcgccgccgccagccccgctgcgcgctctgctcttcgcagctccccggacccgcagccatggccgacatcaagacgggcatcttcgccaagaacgtccagaagcgactcaaccgcgcgcaggaaaaggtcctccaaaagctggggaaagctgatgagacaaaagacgaacagttcgaagaatatgtccagaacttcaaacggcaagaagcagagggtaccagacttcagcgagaactccgaggatatttagcagcaatcaaaggcatgcaggaggcctccatgaagctcacagagtcgctgcatgaagtctatgagcctgactggtatgggcgggaagatgtgaaaatggttggtgagaaatgtgatgtgctgtgggaagacttccatcaaaaactcgtggatgggtccttgctaacactggatacctacctggggcaatttcctgacataaagaatcgcatcgccaagcgcagcaggaagctagtggactatgacagtgcccgccaccatctggaagctctgcagagctccaagaggaaggatgagagtcgaatctctaaggcagaagaagaatttcagaaagcacagaaagtgtttgaagagtttaacgttgacttacaagaagagttaccatcattatggtcaagacgagttggattttatgttaatactttcaaaaacgtctccagccttgaagccaagtttcataaggaaattgcggtgctttgccacaaactgtatgaagtgatgacaaaactgggtgaccagcacgccgacaaggccttcaccatccaaggagcgcccagtgattcgggtcctctccgcattgcaaagacaccatcaccgcctgaggagccttcacccctcccgagcccgacagcaagtccaaatcatacattagcacctgcgtctcccgcaccagcacggcctcggtcaccttcacagacaaggaaagggcctcctgtcccacctctacctaaagtcaccccgacaaaggaactgcagcaggagaacatcatcagtttctttgaggacaactttgttccagaaatcagtgtgacaacaccttcccagaatgaagtccctgaggtgaagaaagaggagactttgctggatctggactttgatcctttcaagcccgaggtgacacctgcaggttctgctggagtgacccactcacccatgtctcagacattgccctgggacctatggacgacacatacatttaatgatgatataactgactcttcagaaagtctttccttgtgtaacctgatcatggaggaaactccagacagtgggttggccgaagaaattcaaagatctcaaaatgatataggtgcatttacttggggccctgacgctagtacagacagggtcagccaagaagttacctcaggtgggtttggagaagactctgcatgtccctccgaaacagagcaagacataagattatccaccagcctgctttcgtctgctgactggcccactgtagctgaagagagtgagcatgccccggggccagcctttccaggtggaaatgaacaactgcccccaaagcctgcgccggaggctggagttgccattgctgcttgtgtggagatggagcagctgtatgacccacttgactcagacatgccagccatggacacagctggcctgttcaaagaaagtcatgaagatatgaagaagtcagatgaagaggaagagaaacagaagatggaagattctctgtgggcaggtgtggaggcgtgtcaaaaggcttctggtggttcatttaatggattcacacagccccaggatacttcattattcacaatgcagacagaccagagtatgatctgcaacttgatcatacctggagctgatgctgatgcagctgttggaaccttggtgtcagcagctgagggggccccaggagaggaagcagaggcggagaaggccactgtccctgccggggaaggagtaagtttagaggaggccaaaattggaactgaaaccactgagggtgcagagagtgcccaacctgaagcagaggagctcgaagcaacagtgcctcaggagaaggtcattccttcggtggtcatagagcctgcctccaaccatgaagaggaaggagaaaacgaaataactataggtgcagagcccaaggagaccaccgaggacgcggctcctccgggccccaccagcgagacaccggagctggctacggagcagaagcctatccaggaccctcagcccacgccttctgcaccagccatgggggctgctgaccagctagcatctgcaagggaggcctctcaggaattgcctcctggctttctctacaaggtggaaacactgcatgattttgaggcagcaaattctgatgaacttaccttacaaaggggtgatgtggtgctggtggtcccctcagattcagaagctgatcaggatgcaggctggctggtgggagtgaaggaatcagactggcttcagtacagagaccttgccacctacaaaggcctctttccagagaacttcacccgacgcttagattagggcaacaagtactgcaagaaggagctcagttacggggtttttaaaccttcatgaaaacctgaagagttcacttttgttattatgctcttaatgatttacagactgatgccagacaaaccttgggaagatgtatcaatggagcatgtgtgcaaaaaaatgtaagaggaaaaaaagtaaattaaggaaaaaatcctcactcattcccatgttgtcaataacaggtttgtttgtgctttgtccaagctgtggagactcttgtacttgatcccctcccaccaattctaaagtagctttctccagatcagactttaatttctctgcatcaggtgtatcgtattgagtggctgccctgcagaagatgtgatgaattatcctgtagtacaagattatcttattcccctgcccaggtgtgagcacgtgctctcgctccctttcaggtttactatgtttaaaactaaactgctgcaaaagttctcaatgttcttttccaacacatctatatatatatggacacacagtcacgcaagctagttcccatgactcctggatctatgtgtatgcagaaggctacatatacatagttgcttctttcctttccattgtagctctttgcctctcaattgtcattgatacatgcattgctcttattctgtctggcattacaattgcagttttgcctaatggcaaaaccagccatcccattggcaaaagagtcaacagtatctgtgtttgtactgtgcagttttcaggatgagatgacagatagcacgactacactgaggcaccctcagagaaggcagggcctgatttatctagctgtccagccgctgtggctggaggtaggctagttgggatgggcagctaagcagtcttctcttctgcctttatgagattgggtagaaagatggggcatattcatctacccccaaaagaacactataaaaacagctcctctatatttccacctctttctatttatgcaactcatcttcacagattgttctaaagtaaaatagatggtgtatgctgtatccacaaatcatctgtaacaattatgttttcagtgctgtgtcattccaaataaacctttggtaatcttcaacgattaccct

SEQ ID NO: 1804 - DNA, 3418 bp, Homo sapiens
  source 1..3418: mol_type = unassigned DNA
cagtcccgacgcatcccgcccccgctctgtcgctttaagctggtcccgccgccgcgccccgccctcacccctccgcgctccgcggctccccgccgcttctcccgctcctcccttgctcggccctctcctcctcctcccgctcctcctcccgctcctccgcgccgccgccagccccgctgcgcgctctgctcttcgcagctccccggacccgcagccatggccgacatcaagacgggcatcttcgccaagaacgtccagaagcgactcaaccgcgcgcaggaaaaggtcctccaaaagctggggaaagctgatgagacaaaagacgaacagttcgaagaatatgtccagaacttcaaacggcaagaagcagagggtaccagacttcagcgagaactccgaggatatttagcagcaatcaaaggcatgcaggaggcctccatgaagctcacagagtcgctgcatgaagtctatgagcctgactggtatgggcgggaagatgtgaaaatggttggtgagaaatgtgatgtgctgtgggaagacttccatcaaaaactcgtggatgggtccttgctaacactggatacctacctggggcaatttcctgacataaagaatcgcatcgccaagcgcagcaggaagctagtggactatgacagtgcccgccaccatctggaagctctgcagagctccaagaggaaggatgagagtcgaatctctaaggcagaagaagaatttcagaaagcacagaaagtgtttgaagagtttaacgttgacttacaagaagagttaccatcattatggtcaagacgagttggattttatgttaatactttcaaaaacgtctccagccttgaagccaagtttcataaggaaattgcggtgctttgccacaaactgtatgaagtgatgacaaaactgggtgaccagcacgccgacaaggccttcaccatccaaggagcgcccagtgattcgggtcctctccgcattgcaaagacaccatcaccgcctgaggagccttcacccctcccgagcccgacagcaagtccaaatcatacattagcacctgcgtctcccgcaccagcacggcctcggtcaccttcacagacaaggaaagggcctcctgtcccacctctacctaaagtcaccccgacaaaggaactgcagcaggagaacatcatcagtttctttgaggacaactttgttccagaaatcagtgtgacaacaccttcccagaatgaagtccctgaggtgaagaaagaggagactttgctggatctggactttgatcctttcaagcccgaggtgacacctgcaggttctgctggagtgacccactcacccatgtctcagacattgccctgggacctatggacgacaagcactgatttggtacagccggcttctggtggttcatttaatggattcacacagccccaggatacttcattattcacaatgcagacagaccagagtatgatctgcaacttggctgaatctgaacaggctccacccacagagccaaaagcagaggagcctctggctgctgtcacacctgccgttggtctggaccttggaatggacactcgggctgaggagccagtggaggaggcagtgatcatacctggagctgatgctgatgcagctgttggaaccttggtgtcagcagctgagggggccccaggagaggaagcagaggcggagaaggccactgtccctgccggggaaggagtaagtttagaggaggccaaaattggaactgaaaccactgagggtgcagagagtgcccaacctgaagcagaggagctcgaagcaacagtgcctcaggagaaggtcattccttcggtggtcatagagcctgcctccaaccatgaagaggaaggagaaaacgaaataactataggtgcagagcccaaggagaccaccgaggacgcggctcctccgggccccaccagcgagacaccggagctggctacggagcagaagcctatccaggaccctcagcccacgccttctgcaccagccatgggggctgctgaccagctagcatctgcaagggaggcctctcaggaattgcctcctggctttctctacaaggtggaaacactgcatgattttgaggcagcaaattctgatgaacttaccttacaaaggggtgatgtggtgctggtggtcccctcagattcagaagctgatcaggatgcaggctggctggtgggagtgaaggaatcagactggcttcagtacagagaccttgccacctacaaaggcctctttccagagaacttcacccgacgcttagattagggcaacaagtactgcaagaaggagctcagttacggggtttttaaaccttcatgaaaacctgaagagttcacttttgttattatgctcttaatgatttacagactgatgccagacaaaccttgggaagatgtatcaatggagcatgtgtgcaaaaaaatgtaagaggaaaaaaagtaaattaaggaaaaaatcctcactcattcccatgttgtcaataacaggtttgtttgtgctttgtccaagctgtggagactcttgtacttgatcccctcccaccaattctaaagtagctttctccagatcagactttaatttctctgcatcaggtgtatcgtattgagtggctgccctgcagaagatgtgatgaattatcctgtagtacaagattatcttattcccctgcccaggtgtgagcacgtgctctcgctccctttcaggtttactatgtttaaaactaaactgctgcaaaagttctcaatgttcttttccaacacatctatatatatatggacacacagtcacgcaagctagttcccatgactcctggatctatgtgtatgcagaaggctacatatacatagttgcttctttcctttccattgtagctctttgcctctcaattgtcattgatacatgcattgctcttattctgtctggcattacaattgcagttttgcctaatggcaaaaccagccatcccattggcaaaagagtcaacagtatctgtgtttgtactgtgcagttttcaggatgagatgacagatagcacgactacactgaggcaccctcagagaaggcagggcctgatttatctagctgtccagccgctgtggctggaggtaggctagttgggatgggcagctaagcagtcttctcttctgcctttatgagattgggtagaaagatggggcatattcatctacccccaaaagaacactataaaaacagctcctctatatttccacctctttctatttatgcaactcatcttcacagattgttctaaagtaaaatagatggtgtatgctgtatccacaaatcatctgtaacaattatgttttcagtgctgtgtcattccaaataaacctttggtaatcttcaacgattaccctaa

SEQ ID NO: 1805 - DNA, 1064 bp, Homo sapiens
  source 1..1064: mol_type = unassigned DNA
gtgattcgggtcctctccgcattgcaaagacaccatcaccgcctgaggagccttcacccctcccgagcccgacagcaagtccaaatcatacattagcacctgcgtctcccgcaccagcacggcctcggtcaccttcacagacaaggaaagggcctcctgtcccacctctacctaaagtcaccccgacaaaggaactgcagcaggagaacatcatcagtttctttgaggacaactttgttccagaaatcagtgtgacaacaccttcccagaatgaagtccctgaggtgaagaaagaggagactttgctggatctggactttgatcctttcaagcccgaggtgacacctgcaggttctgctggagtgacccactcacccatgtctcagacattgccctgggacctatggacgacaagcactgatttggtacagccgactgactcttcagaaagtctttccttgtgtaacctgatcatggaggaaactccagacagtgggttggccgaagaaattcaaagatctcaaaatgatataggtgcatttacttggggccctgacgctagtacagacagggtcagccaagaagttacctcaggtgggtttggagaagactctgcatgtccctccgaaacagagcaagacataagattatccaccagcctgctttcgtctgctgactggcccactgtagctgaagagagtgagcatgccccggggccagcctttccaggtggaaatgaacaactgcccccaaagcctgcgccggaggctggagttgccattgctgcttgtgtggagatggagcagctgtatgacccacttgactcagacatgccagccatggacacagctggcctgttcaaagaaagtcatgaagatatgaagaagtcagatgaagaggaagagaaacagaagatggaagattctctgtgggcaggtgtggaggcgtgtcaaaaggcttctggtggttcatttaatggattcacacagccccaggatacttcattattcacaatgcagacagaccagagtatgatctgcaacttggaaatcacagtgaactga

SEQ ID NO: 1806 - DNA, 3143 bp, Homo sapiens
  source 1..3143: mol_type = unassigned DNA
cccgctcctccgcgccgccgccagccccgctgcgcgctctgctcttcgcagctccccggacccgcagccatggccgacatcaagacgggcatcttcgccaagaacgtccagaagcgactcaaccgcgcgcaggaaaaggtcctccaaaagctggggaaagctgatgagacaaaagacgaacagttcgaagaatatgtccagaacttcaaacggcaagaagcagagggtaccagacttcagcgagaactccgaggatatttagcagcaatcaaaggcatgcaggaggcctccatgaagctcacagagtcgctgcatgaagtctatgagcctgactggtatgggcgggaagatgtgaaaatggttggtgagaaatgtgatgtgctgtgggaagacttccatcaaaaactcgtggatgggtccttgctaacactggatacctacctggggcaatttcctgacataaagaatcgcatcgccaagcgcagcaggaagctagtggactatgacagtgcccgccaccatctggaagctctgcagagctccaagaggaaggatgagagtcgaatctctaaggcagaagaagaatttcagaaagcacagaaagtgtttgaagagtttaacgttgacttacaagaagagttaccatcattatggtcaagacgagttggattttatgttaatactttcaaaaacgtctccagccttgaagccaagtttcataaggaaattgcggtgctttgccacaaactgtatgaagtgatgacaaaactgggtgaccagcacgccgacaaggccttcaccatccaaggagcgcccagtgattcgggtcctctccgcattgcaaagacaccatcaccgcctgaggagccttcacccctcccgagcccgacagcaagtccaaatcatacattagcacctgcgtctcccgcaccagcacggcctcggtcaccttcacagacaaggaaagggcctcctgtcccacctctacctaaagtcaccccgacaaaggaactgcagcaggagaacatcatcagtttctttgaggacaactttgttccagaaatcagtgtgacaacaccttcccagaatgaagtccctgaggtgaagaaagaggagactttgctggatctggactttgatcctttcaagcccgaggtgacacctgcaggttctgctggagtgacccactcacccatgtctcagacattgccctgggacctatggacggcaggtgtggaggcgtgtcaaaaggcttctggtggttcatttaatggattcacacagccccaggatacttcattattcacaatgcagacagaccagagtatgatctgcaacttgatcatacctggagctgatgctgatgcagctgttggaaccttggtgtcagcagctgagggggccccaggagaggaagcagaggcggagaaggccactgtccctgccggggaaggagtaagtttagaggaggccaaaattggaactgaaaccactgagggtgcagagagtgcccaacctgaagcagaggagctcgaagcaacagtgcctcaggagaaggtcattccttcggtggtcatagagcctgcctccaaccatgaagaggaaggagaaaacgaaataactataggtgcagagcccaaggagaccaccgaggacgcggctcctccgggccccaccagcgagacaccggagctggctacggagcagaagcctatccaggaccctcagcccacgccttctgcaccagccatgggggctgctgaccagctagcatctgcaagggaggcctctcaggaattgcctcctggctttctctacaaggtggaaacactgcatgattttgaggcagcaaattctgatgaacttaccttacaaaggggtgatgtggtgctggtggtcccctcagattcagaagctgatcaggatgcaggctggctggtgggagtgaaggaatcagactggcttcagtacagagaccttgccacctacaaaggcctctttccagagaacttcacccgacgcttagattagggcaacaagtactgcaagaaggagctcagttacggggtttttaaaccttcatgaaaacctgaagagttcacttttgttattatgctcttaatgatttacagactgatgccagacaaaccttgggaagatgtatcaatggagcatgtgtgcaaaaaaatgtaagaggaaaaaaagtaaattaaggaaaaaatcctcactcattcccatgttgtcaataacaggtttgtttgtgctttgtccaagctgtggagactcttgtacttgatcccctcccaccaattctaaagtagctttctccagatcagactttaatttctctgcatcaggtgtatcgtattgagtggctgccctgcagaagatgtgatgaattatcctgtagtacaagattatcttattcccctgcccaggtgtgagcacgtgctctcgctccctttcaggtttactatgtttaaaactaaactgctgcaaaagttctcaatgttcttttccaacacatctatatatatatggacacacagtcacgcaagctagttcccatgactcctggatctatgtgtatgcagaaggctacatatacatagttgcttctttcctttccattgtagctctttgcctctcaattgtcattgatacatgcattgctcttattctgtctggcattacaattgcagttttgcctaatggcaaaaccagccatcccattggcaaaagagtcaacagtatctgtgtttgtactgtgcagttttcaggatgagatgacagatagcacgactacactgaggcaccctcagagaaggcagggcctgatttatctagctgtccagccgctgtggctggaggtaggctagttgggatgggcagctaagcagtcttctcttctgcctttatgagattgggtagaaagatggggcatattcatctacccccaaaagaacactataaaaacagctcctctatatttccacctctttctatttatgcaactcatcttcacagattgttctaaagtaaaatagatggtgtatgctgtatccacaaatcatctgtaacaattatgttttcagtgctgtgtcattccaaataaacctttggtaatcttcaacgattaccct

SEQ ID NO: 1807 - DNA, 1224 bp, Homo sapiens
  source 1..1224: mol_type = unassigned DNA
cccgctcctccgcgccgccgccagccccgctgcgcgctctgctcttcgcagctccccggacccgcagccatggccgacatcaagacgggcatcttcgccaagaacgtccagaagcgactcaaccgcgcgcaggaaaaggtcctccaaaagctggggaaagctgatgagacaaaagacgaacagttcgaagaatatgtccagaacttcaaacggcaagaagcagagggtaccagacttcagcgagaactccgaggatatttagcagcaatcaaaggcatgcaggaggcctccatgaagctcacagagtcgctgcatgaagtctatgagcctgactggtatgggcgggaagatgtgaaaatggttggtgagaaatgtgatgtgctgtgggaagacttccatcaaaaactcgtggatgggtccttgctaacactggatacctacctggggcaatttcctgacataaagaatcgcatcgccaagcgcagcaggaagctagtggactatgacagtgcccgccaccatctggaagctctgcagagctccaagaggaaggatgagagtcgaatctctaaggcagaagaagaatttcagaaagcacagaaagtgtttgaagagtttaacgttgacttacaagaagagttaccatcattatggtcaagacgagttggattttatgttaatactttcaaaaacgtctccagccttgaagccaagtttcataaggaaattgcggtgctttgccacaaactgtatgaagtgatgacaaaactgggtgaccagcacgccgacaaggccttcaccatccaaggagcgcccagacagtaccttgattcgggtcctctccgcattgcaaagacaccatcaccgcctgaggagccttcacccctcccgagcccgacagcaagtccaaatcatacattagcacctgcgtctcccgcaccagcacggcctcggtcaccttcacagacaaggaaagggcctcctgtcccacctctacctaaagtcaccccgacaaaggaactgcagcaggagaacatcatcagtttctttgaggacaactttgttccagaaatcagtgtgacaacaccttcccagaatgaagtccctgaggtgaagaaagaggagactttgctggatctggactttgatcctttcaagcccgaggtgacacctgcaggttctgctggagtgacccactcacccatgtctcagacagtgggttgg

SEQ ID NO: 1808 - DNA, 969 bp, Homo sapiens
  source 1..969: mol_type = unassigned DNA
agacgttcgcacacctgggtgccagcgccccagaggtcccgggacagcccgaggcgccgcgcccgccgccccgagctccccaagccttcgagagcggcgcacactcccggtctccactcgctcttccaacacccgctcgttttggcggcagctcgtgtcccagagaccgagttgccccagagaccgagacgccgccgctgcgaaggaccaatgagagccccgctgctaccgccggcgccggtggtgctgtcgctcttgatactcggctcaggccattatgctgctggattggacctcaatgacacctactctgggaagcgtgaaccattttctggggaccacagtgctgatggatttgaggttacctcaagaagtgagatgtcttcagggagtgagatttcccctgtgagtgaaatgccttctagtagtgaaccgtcctcgggagccgactatgactactcagaagagtatgataacgaaccacaaatacctggctatattgtcgatgattcagtcagagttgaacaggtagttaagcccccccaaaacaagacggaaagtgaaaatacttcagataaacccaaaagaaagaaaaagggaggcaaaaatggaaaaaatagaagaaacagaaagaagaaaaatccatgtaatgcagaatttcaaaatttctgcattcacggagaatgcaaatatatagagcacctggaagcagtaacatgcaaatgtcagcaagaatatttcggtgaacggtgtggggaaaagtccatgaaaactcacagcatgattgacagtagtttatcaaaaattgcattagcagccatagctgcctttatgtctgctgtgatcctcacagctgttgctgttattacagtccagcttagaagacaatacgtcaggaaatatgaaggagaagctgaggaacgaaagaaacttcgacaagagaatggaaatgtacatgctatagcataa

SEQ ID NO: 1809 - DNA, 1240 bp, Homo sapiens
  source 1..1240: mol_type = unassigned DNA
acagacgttcgcacacctgggtgccagcgccccagaggtcccgggacagcccgaggcgccgcgcccgccgccccgagctccccaagccttcgagagcggcgcacactcccggtctccactcgctcttccaacacccgctcgttttggcggcagctcgtgtcccagagaccgagttgccccagagaccgagacgccgccgctgcgaaggaccaatgagagccccgctgctaccgccggcgccggtggtgctgtcgctcttgatactcggctcaggccattatgctgctggattggacctcaatgacacctactctgggaagcgtgaaccattttctggggaccacagtgctgatggatttgaggttacctcaagaagtgagatgtcttcagggagtgagatttcccctgtgagtgaaatgccttctagtagtgaaccgtcctcgggagccgactatgactactcagaagagtatgataacgaaccacaaatacctggctatattgtcgatgattcagtcagagttgaacaggtagttaagcccccccaaaacaagacggaaagtgaaaatacttcagataaacccaaaagaaagaaaaagggaggcaaaaatggaaaaaatagaagaaacagaaagaagaaaaatccatgtaatgcagaatttcaaaatttctgcattcacggagaatgcaaatatatagagcacctggaagcagtaacatgcaaatgtcagcaagaatatttcggtgaacggtgtggggaaaagtccatgaaaactcacagcatgattgacagtagtttatcaaaaattgcattagcagccatagctgcctttatgtctgctgtgatcctcacagctgttgctgttattacagtccagcttagaagacaatacgtcaggaaatatgaaggagaagctgaggaacgaaagaaacttcgacaagagaatggaaatgtacatgctatagcataactgaagataaaattacaggatatcacattggagtcactgccaagtcatagccataaatgatgagtcggtcctctttccagtggatcataagacaatggaccctttttgttatgatggttttaaactttcaattgtcactttttatgctatttctgtatataaaggtgcacgaaggtaaaaagtattttttcaagttgtaaataatttatttaatatttaatggaagtgtatttattttacagctcattaaacttttttaaccaaacaga

SEQ ID NO: 1810 - DNA, 1787 bp, Homo sapiens
  source 1..1787: mol_type = unassigned DNA
gatttatctagaggctgggaagggctcctgaaccagttgtttccgtcttgtcggtctgtcagggttggaaagtccaagccataggacccagtttcctttcttagcttacgttatctaccagagcaccgtgggctgttacttgccttgagttggaagcggttcgcatttataccggaatataaatagtttctggaaaggacactgacaacttcaaagcaaaatgaagctcttttggttgcttttcaccattgggttctgctgggctcagtattcctcaaatacacaacaaggacgaacatctattgttcatctgtttgaatggcgatgggttgatattgctcttgaatgtgagcgatatttagctcccaagggatttggaggggttcaggtctctccaccaaatgaaaatgttgccattcacaaccctttcagaccttggtgggaaagataccaaccagttagctataaattatgcacaagatctggaaatgaagatgaatttagaaacatggtgactagatgcaacaatgttggggttcgtatttatgtggatgctgtaattaatcatatgtgtggtaatgctgtgagtgcaggaacaagcagtacctgtggaagttacttcaaccctggaagtagggactttccagcagtcccatattctggatgggattttaatgatggtaaatgtaaaactggaagtggagatatcgagaactataatgatgctactcaggtcagagattgtcgtctgtctggtcttctcgatcttgcactggggaaggattatgtgcgttctaagattgccgaatatatgaaccatctcattgacattggtgttgcagggttcagaattgatgcttccaagcacatgtggcctggagacataaaggcaattttggacaaactgcataatctaaacagtaactggttcccggaaggtagtaaacctttcatttaccaggaggtaattgatctgggtggtgagccaattaaaagcagtgactactttggtaatggccgggtgacagaattcaagtatggtgcaaaactcggcacagttattcgcaagtggaatggagagaagatgtcttacttaaagaactggggagaaggttggggtttcatgccttctgacagagcgcttgtctttgtggataaccatgacaatcaacgaggacatggcgctggaggagcctctatacttaccttctgggatgctaggctgtacaaaatggcagttggatttatgcttgctcatccttatggatttacacgagtaatgtcaagctaccgttggccaagatattttgaaaatggaaaagatgttaatgattgggttgggccaccaaatgataatggagtaactaaagaagttactattaatccagacactacttgtggcaatgactgggtctgtgaacatcgatggcgccaaataaggaacatggttaatttccgcaatgtagtggatggccagccttttacaaactggtatgataatgggagcaaccaagtggcttttgggagaggaaacagaggattcattgttttcaacaatgatgactggacattttctttaactttgcaaactggtcttcctgctggcacatactgtgatgtcatttctggagataaaattaatggcaactgcacaggcattaaaatctacgtttctgatgatggcaaagctcatttttctattagtaactctgctgaagatccatttattgcaattcatgctgaatctaaattgtaaaatttaaaattaaatgcaaatccgcaaagca

SEQ ID NO: 1811 - DNA, 403 bp, Homo sapiens
  source 1..403: mol_type = unassigned DNA
gctgttatgtgagaacattaggccacagcaacatgtcattgtgaatataaatagtttctggaaaggacactgacaacttcaaagcaaaatgaagctcttttggttgcttttcaccattgggttctgctgggctcagtattcctcaaatacacaacaaggacgaacatctattgttcatctgtttgaatggcgatgggttgatattgctcttgaatgtgagcgatatttagctcccaagggatttggaggggttcaggtctctccaccaaatgaaaatgttgccattcacaaccctttcagaccttggtgggaaagataccaaccagttagctataaattatgcacaagatctggaaatgaagatgaatttagaaacatggtgactagatgcaacaatgttggg

SEQ ID NO: 1812 - DNA, 1363 bp, Homo sapiens
  source 1..1363: mol_type = unassigned DNA
atgcacccgtggtcagggagaaacagaatatggaagggagtttcacaatgttcttctatacaatgtctggaatctatgaataacatcggcttctaaatcataagttgatttgtaactactgggtttaggccaaccaggcccaggcctggttttgtgcctttgattttgcttccttgttgtttttactgaatagaaaacaatataaaacaagaggacagggtctttctctcttctcaatatcagcactggattgtagaacttgttgctgattttggcctggcattcaagttaactcttccccttggtatctgtacatacctttgatgtcagtgtttagtacacgtggcttggtcacttcatggctaaaaacgtgcttgtggaagacaagtctggcttggtgagtctgtgtggtcagcagtctctgatccgtgcagggtattaatgtgtcagggctgagtgttctgagatttatctagaggctgggaagggctcctgaaccagttgtttccgtcttgtcggtctgtcagggttggaaagtccaagccataggacccagtttcctttcttagcttacgttatctaccagagcaccgtgggctgttacttgccttgagttggaagcggttcgcatttataccggaatataaatagtttctggaaaggacactgacaacttcaaagcaaaatgaagctcttttggttgcttttcaccattgggttctgctgggctcagtattcctcaaatacacaacaaggacgaacatctattgttcatctgtttgaatggcgatgggttgatattgctcttgaatgtgagcgatatttagctcccaagggatttggaggggttcaggtctctccaccaaatgaaaatgttgccattcacaaccctttcagaccttggtgggaaagataccaaccagttagctataaattatgcacaagatctggaaatgaagatgaatttagaaacatggtgactagatgcaacaatgttggggttcgtatttatgtggatgctgtaattaatcatatgtgtggtaatgctgtgagtgcaggaacaagcagtacctgtggaagttacttcaaccctggaagtagggactttccagcagtcccatattctggatgggattttaatgatggtaaatgtaaaactggaagtggagatatcgagaactataatgatgctactcaggtcagagattgtcgtctgtctggtcttctcgatcttgcactggggaaggattatgtgcgttctaagattgccgaatatatgaaccatctcattgacattggtgttgcagggttcagaattgatgcttccaagcacatgtggcctggagacataaaggcaattttg

SEQ ID NO: 1813 - DNA, 1862 bp, Homo sapiens
  source 1..1862: mol_type = unassigned DNA
tggcttggtgagtctgtgtggtcagcagtctctgatccgtgcagggtattaatgtgtcagggctgagtgttctgagatttatctagaggctgggaagggctcctgaaccagttgtttccgtcttgtcggtctgtcagggttggaaagtccaagccataggacccagtttcctttcttagcttacgttatctaccagagcaccgtgggctgttacttgccttgagttggaagcggttcgcatttataccggaatataaatagtttctggaaaggacactgacaacttcaaagcaaaatgaagctcttttggttgcttttcaccattgggttctgctgggctcagtattcctcaaatacacaacaaggacgaacatctattgttcatctgtttgaatggcgatgggttgatattgctcttgaatgtgagcgatatttagctcccaagggatttggaggggttcaggtctctccaccaaatgaaaatgttgccattcacaaccctttcagaccttggtgggaaagataccaaccagttagctataaattatgcacaagatctggaaatgaagatgaatttagaaacatggtgactagatgcaacaatgttggggttcgtatttatgtggatgctgtaattaatcatatgtgtggtaatgctgtgagtgcaggaacaagcagtacctgtggaagttacttcaaccctggaagtagggactttccagcagtcccatattctggatgggattttaatgatggtaaatgtaaaactggaagtggagatatcgagaactataatgatgctactcaggtcagagattgtcgtctgtctggtcttctcgatcttgcactggggaaggattatgtgcgttctaagattgccgaatatatgaaccatctcattgacattggtgttgcagggttcagaattgatgcttccaagcacatgtggcctggagacataaaggcaattttggacaaactgcataatctaaacagtaactggttcccggaaggtagtaaacctttcatttaccaggaggtaattgatctgggtggtgagccaattaaaagcagtgactactttggtaatggccgggtgacagaattcaagtatggtgcaaaactcggcacagttattcgcaagtggaatggagagaagatgtcttacttaaagaactggggagaaggttggggtttcatgccttctgacagagcgcttgtctttgtggataaccatgacaatcaacgaggacatggcgctggaggagcctctatacttaccttctgggatgctaggctgtacaaaatggcagttggatttatgcttgctcatccttatggatttacacgagtaatgtcaagctaccgttggccaagatattttgaaaatggaaaagatgttaatgattgggttgggccaccaaatgataatggagtaactaaagaagttactattaatccagacactacttgtggcaatgactgggtctgtgaacatcgatggcgccaaataaggaacatggttaatttccgcaatgtagtggatggccagccttttacaaactggtatgataatgggagcaaccaagtggcttttgggagaggaaacagaggattcattgttttcaacaatgatgactggacattttctttaactttgcaaactggtcttcctgctggcacatactgtgatgtcatttctggagataaaattaatggcaactgcacaggcattaaaatctacgtttctgatgatggcaaagctcatttttctattagtaactctgctgaagatccatttattgcaattcatgctgaatctaaattgtaaaatttaaaattaaatgcaaatccgcaaagca

SEQ ID NO: 1814 - DNA, 1787 bp, Homo sapiens
  source 1..1787: mol_type = unassigned DNA
tctcttctcaatatcagcactggattgtagaacttgttgctgattttggcctggcattcaagttaactcttccccttggtatctgtacatacctttgatgtcagtgtttagtacacgtggcttggtcacttcatggctaaaaacgtgcttgtggaagacaagtctggcttggaatataaatagtttctggaaaggacactgacaacttcaaagcaaaatgaagctcttttggttgcttttcaccattgggttctgctgggctcagtattcctcaaatacacaacaaggacgaacatctattgttcatctgtttgaatggcgatgggttgatattgctcttgaatgtgagcgatatttagctcccaagggatttggaggggttcaggtctctccaccaaatgaaaatgttgccattcacaaccctttcagaccttggtgggaaagataccaaccagttagctataaattatgcacaagatctggaaatgaagatgaatttagaaacatggtgactagatgcaacaatgttggggttcgtatttatgtggatgctgtaattaatcatatgtgtggtaatgctgtgagtgcaggaacaagcagtacctgtggaagttacttcaaccctggaagtagggactttccagcagtcccatattctggatgggattttaatgatggtaaatgtaaaactggaagtggagatatcgagaactataatgatgctactcaggtcagagattgtcgtctgtctggtcttctcgatcttgcactggggaaggattatgtgcgttctaagattgccgaatatatgaaccatctcattgacattggtgttgcagggttcagaattgatgcttccaagcacatgtggcctggagacataaaggcaattttggacaaactgcataatctaaacagtaactggttcccggaaggtagtaaacctttcatttaccaggaggtaattgatctgggtggtgagccaattaaaagcagtgactactttggtaatggccgggtgacagaattcaagtatggtgcaaaactcggcacagttattcgcaagtggaatggagagaagatgtcttacttaaagaactggggagaaggttggggtttcatgccttctgacagagcgcttgtctttgtggataaccatgacaatcaacgaggacatggcgctggaggagcctctatacttaccttctgggatgctaggctgtacaaaatggcagttggatttatgcttgctcatccttatggatttacacgagtaatgtcaagctaccgttggccaagatattttgaaaatggaaaagatgttaatgattgggttgggccaccaaatgataatggagtaactaaagaagttactattaatccagacactacttgtggcaatgactgggtctgtgaacatcgatggcgccaaataaggaacatggttaatttccgcaatgtagtggatggccagccttttacaaactggtatgataatgggagcaaccaagtggcttttgggagaggaaacagaggattcattgttttcaacaatgatgactggacattttctttaactttgcaaactggtcttcctgctggcacatactgtgatgtcatttctggagataaaattaatggcaactgcacaggcattaaaatctacgtttctgatgatggcaaagctcatttttctattagtaactctgctgaagatccatttattgcaattcatgctgaatctaaattgtaaaatttaaaattaaatgcaaatccgcaaagcaata

SEQ ID NO: 1815 - DNA, 403 bp, Homo sapiens; identical to SEQ ID NO: 1811
  source 1..403: mol_type = unassigned DNA

SEQ ID NO: 1816 - DNA, 1363 bp, Homo sapiens
  source 1..1363: mol_type = unassigned DNA
atgcacccgtggtcagggagaaacagaatacggaagggagtttcacaatgttcttctatacaatgtctggaatctatgaataacatcggcttctaaatcataagttgatttgtaactactgggtttaggccaaccaggcccaggcctggttttgtgcctttgattttgcttccttgttgtttttactgaatagaaaacaatataaaacaagaggacagggtctttctctcttctcaatatcagcactggattgtagaacttgttgctgattttggcctggcattcaagttaactcttccccttggtatctgtacatacctttgatgtcagtgtttagtacacgtggcttggtcacttcatggctaaaaacgtgcttgtggaagacaagtctggcttggtgagtctgtgtggtcagcagtctctgatccgtgcagggtattaatgtgtcagggctgagtgttctgagatttatctagaggctgggaagggctcctgaaccagttgtttccgtcttgtcggtctgtcagggttggaaagtccaagccataggacccagtttcctttcttagcttacgttatctaccagagcaccgtgggctgttacttgccttgagttggaagcggttcgcatttataccggaatataaatagtttctggaaaggacactgacaacttcaaagcaaaatgaagctcttttggttgcttttcaccattgggttctgctgggctcagtattcctcaaatacacaacaaggacgaacatctattgttcatctgtttgaatggcgatgggttgatattgctcttgaatgtgagcgatatttagctcccaagggatttggaggggttcaggtctctccaccaaatgaaaatgttgccattcacaaccctttcagaccttggtgggaaagataccaaccagttagctataaattatgcacaagatctggaaatgaagatgaatttagaaacatggtgactagatgcaacaatgttggggttcgtatttatgtggatgctgtaattaatcatatgtgtggtaatgctgtgagtgcaggaacaagcagtacctgtggaagttacttcaaccctggaagtagggactttccagcagtcccatattctggatgggattttaatgatggtaaatgtaaaactggaagtggagatatcgagaactataatgatgctactcaggtcagagattgtcgtctgtctggtcttctcgatcttgcactggggaaggattatgtgcgttctaagattgccgaatatatgaaccatctcattgacattggtgttgcagggttcagaattgatgcttccaagcacatgtggcctggagacataaaggcaattttg

SEQ ID NO: 1817 - DNA, 1632 bp, Homo sapiens
  source 1..1632: mol_type = unassigned DNA
aaaatgtgcttcttacaggaatataaatagtttctggaaaggacactgacaacttcaaagcaaaatgaagctcttttggttgcttttcaccattgggttctgctgggctcagtattcctcaaatacacaacaaggacgaacatctattgttcatctgtttgaatggcgatgggttgatattgctcttgaatgtgagcgatatttagctcccaagggatttggaggggttcaggtctctccaccaaatgaaaatgttgccattcacaaccctttcagaccttggtgggaaagataccaaccagttagctataaattatgcacaagatctggaaatgaagatgaatttagaaacatggtgactagatgcaacaatgttggggttcgtatttatgtggatgctgtaattaatcatatgtgtggtaatgctgtgagtgcaggaacaagcagtacctgtggaagttacttcaaccctggaagtagggactttccagcagtcccatattctggatgggattttaatgatggtaaatgtaaaactggaagtggagatatcgagaactataatgatgctactcaggtcagagattgtcgtctgtctggtcttctcgatcttgcactggggaaggattatgtgcgttctaagattgccgaatatatgaaccatctcattgacattggtgttgcagggttcagaattgatgcttccaagcacatgtggcctggagacataaaggcaattttggacaaactgcataatctaaacagtaactggttcccggaaggtagtaaacctttcatttaccaggaggtaattgatctgggtggtgagccaattaaaagcagtgactactttggtaatggccgggtgacagaattcaagtatggtgcaaaactcggcacagttattcgcaagtggaatggagagaagatgtcttacttaaagaactggggagaaggttggggtttcatgccttctgacagagcgcttgtctttgtggataaccatgacaatcaacgaggacatggcgctggaggagcctctatacttaccttctgggatgctaggctgtacaaaatggcagttggatttatgcttgctcatccttatggatttacacgagtaatgtcaagctaccgttggccaagatattttgaaaatggaaaagatgttaatgattgggttgggccaccaaatgataatggagtaactaaagaagttactattaatccagacactacttgtggcaatgactgggtctgtgaacatcgatggcgccaaataaggaacatggttaatttccgcaatgtagtggatggccagccttttacaaactggtatgataatgggagcaaccaagtggcttttgggagaggaaacagaggattcattgttttcaacaatgatgactggacattttctttaactttgcaaactggtcttcctgctggcacatactgtgatgtcatttctggagataaaattaatggcaactgcacaggcattaaaatctacgtttctgatgatggcaaagctcatttttctattagtaactctgctgaagatccatttattgcaattcatgctgaatctaaattgtaaaatttaaaattaaatgcaaatccgcaaagcaa

SEQ ID NO: 1818 - DNA, 1634 bp, Homo sapiens
  source 1..1634: mol_type = unassigned DNA
aaaatgtgcttcttacaggaatataaatagtttctggaaaggacactgacaacttcaaagcaaaatgaagttctttctgttgcttttcaccattgggttctgctgggctcagtattccccaaatacacaacaaggacggacatctattgttcatctgtttgaatggcgatgggttgatattgctcttgaatgtgagcgatatttagctccgaagggatttggaggggttcaggtctctccaccaaatgaaaatgttgcaatttacaaccctttcagaccttggtgggaaagataccaaccagttagctataaattatgcacaagatctggaaatgaagatgaatttagaaacatggtgactagatgtaacaatgttggggttcgtatttatgtggatgctgtaattaatcatatgtgtggtaacgctgtgagtgcaggaacaagcagtacctgtggaagttacttcaaccctggaagtagggactttccagcagtcccatattctggatgggatttcaatgatggtaaatgtaaaactggaagtggagatatcgagaactacaatgatgctactcaggtcagagattgtcgtctgactggtcttcttgatcttgcactggagaaggattacgtgcgttctaagattgccgaatatatgaaccatctcattgacattggtgttgcagggttcagacttgatgcttccaagcacatgtggcctggagacataaaggcaattttggacaaactgcataatctaaacagtaactggttccctgcaggaagtaaacctttcatttaccaggaggtaattgatctgggtggtgagccaattaaaagcagtgactactttggtaatggccgggtgacagaattcaagtatggtgcaaaactcggcacagttattcgcaagtggaatggagagaagatgtcttacttaaagaactggggagaaggttggggtttcgtaccttctgacagagcgcttgtctttgtggataaccatgacaatcaacgaggacatggggctggaggagcctctattcttaccttctgggatgctaggctgtacaaaatggcagttggatttatgcttgctcatccttacggatttacacgagtaatgtcaagctaccgttggccaagacagtttcaaaatggaaacgatgttaatgattgggttgggccaccaaataataatggagtaattaaagaagttactattaatccagacactacttgtggcaatgactgggtctgtgaacatcgatggcgccaaataaggaacatggttattttccgcaatgtagtggatggccagccttttacaaattggtatgataatgggagcaaccaagtggcttttgggagaggaaacagaggattcattgttttcaacaatgatgactggtcattttctttaactttgcaaactggtcttcctgctggcacatactgtgatgtcatttctggagataaaattaatggcaattgcacaggcattaaaatttacgtttctgatgatggcaaagctcatttttctattagtaactctgctgaagatccatttattgcaattcatgctgaatctaaattgtaaaatttaaaattaaatgcatgtcctcaaaacaata

SEQ ID NO: 1819 - DNA, 2181 bp, Homo sapiens
  source 1..2181: mol_type = unassigned DNA
ggaaaataaagggttggagcctctgtgtttctttgttgaaaaatctgctactattattagatctgtgaaaacaattgaaaattcggttattatcaccttaaaagtacaaaacctatagattttgaaaatgtaattatttttctgtaggcatagttaaaaagattttgtaaatgttataaatcagtttctttataagcggtttatttagataaattttgttatactgacatgattcactaattttctaaatataaatggttcagctcttagttatttttaaactaatgacctgtgttatacttcctatttttaatgggcttttatgatgttttaggtttttttgaatcccgtgtccttcaagtgctttctaactttgagaggaagaaattgaccacctggactatggaactttggttgaatctggcgatgtggaacccatggatatggagggctgactatatacaccatgttttttcctggcacatcactcaactactattagctggcgagtcaactcacgttgttggaatgactagggacaactagacttcaagtgatctttcatcccaggaatataaatagtttctggaaaggacactgacaacttcaaagcaaaatgaagttctttctgttgcttttcaccattgggttctgctgggctcagtattccccaaatacacaacaaggacggacatctattgttcatctgtttgaatggcgatgggttgatattgctcttgaatgtgagcgatatttagctcccaagggatttggaggggttcaggtctctccaccaaatgaaaatgttgcaattcacaaccctttcagaccttggtgggaaagataccaaccagttagctataaattatgcacaagatctggaaatgaagatgaatttagaaacatggtgactagatgtaacaatgttggggttcgtatttatgtggatgctgtaattaatcatatgtctggtaatgctgtgagtgcaggaacaagcagtacctgtggaagttacttcaaccctggaagtagggactttccagcagtcccatattctggatgggattttaatgatggtaaatgtaaaactggaagtggagatatcgagaactacaatgatgctactcaggtcagagattgtcgtctggttggtcttcttgatcttgcactggagaaagattatgtgcgttccaagattgccgaatatatgaatcatctcattgacattggtgttgcagggttcagacttgatgcttccaagcacatgtggcctggagacataaaggcaattttggacaaactgcataatctaaacagtaactggttccctgcaggaagtaaacctttcatttaccaggaggtaattgatctgggtggtgagccaattaaaagcagtgactactttggaaatggccgggtgacagaattcaagtatggtgcaaaactcggcacagttattcgcaagtggaatggagagaagatgtcttacctaaagaactggggagaaggttggggtttcatgccttctgacagagcacttgtctttgtggataaccatgacaatcaacgaggacatggggctggaggagcctctattcttaccttctgggatgctaggctgtataaaatggcagttggatttatgcttgctcatccttatggttttacacgagtaatgtcaagctaccgttggccaagacagtttcaaaatggaaacgatgttaatgattgggttgggccaccaaataataatggagtaattaaagaagttactattaatccagacactacttgtggcaatgactgggtctgtgaacatcgatggcgccaaataaggaacatggttaatttccgcaatgtagtggatggccagccttttacaaactggtatgataatgggagcaaccaagtggcttttgggagaggaaacagaggattcattgttttcaacaatgatgactggacattttctttaactttgcaaactggtcttcctgctggcacatactgtgatgtcatttctggagataaaattaatggcaattgcacaggcattaaaatctacgtttctgacgatggcaaagctcatttttctattagtaactctgctgaggatccatttattgcaattcatgctgaatctaaattataaaatttaaaattaaatgcatatcctcaaaa

SEQ ID NO: 1820 - DNA, 832 bp, Homo sapiens
  source 1..832: mol_type = unassigned DNA
gagatatagtgtagtaagaagaggtggcagggcagcaaactgagcagaggagagaagacagtggtttgcttaggaaacaggagtgtggtgatcaacctgttgtaatactggagttcagagaagattccttgtacaaatctgatttggagaattggagtaggactctagggccacatattgaaagtaagaggttatagaaaatctataagattctaaattcagcaattttttttccaactgaagaaaaagcaaaaccagaactgtgagatttttattttatgattgtaaaacactcaactgtgggtttgggagattgctgattgagagaagttaatgtgttggttgaatctggcgatgtggaacccatggatatggagggctgactatatacaccatgttttttcctggcacatcactcaactactattagctggcgagtcaactcacgttgttggaatgactagggacaactagacttcaagtgatctttcatcccaggaatataaatagtttctggaaaggacactgacaacttcaaagcaaaatgaagttctttctgttgcttttcaccattgggttctgctgggctcagtattccccaaatacacaacaaggacggacatctattgttcatctgtttgaatggcgatgggttgatattgctcttgaatgtgagcgatatttagctcccaagggatttggaggggttcaggtctctccaccaaatgaaaatgttgcaattcacaaccctttcagaccttggtgggaaagataccaaccagttagctataaattatgcacaagatctggaaatgaagatgaatttagaaac

SEQ ID NO: 1821 - DNA, 869 bp, Homo sapiens
  source 1..869: mol_type = unassigned DNA
caccaagtctgttatatctcccctctctgttttacataaacatttcccctctattccaggggtatatgttccaagacccccagcaggtgcctgaaaccacagatagtaccaagccttttgcagtcatctctccagtatctgtgggggattggttccaggacctcccatggataccaaaatctacagatgctcaagtgccttatataaaatagcatagtatttgcatataaccaatgcacatcctcctgtatactttaaatcatctctatattgctagagatgtaatatctactgtaatataaatgctatgcagatagttacattgtttagggaataatgacagaaaagtctatatgttcagtacagatgcaactatccttctttaaaaatatgttcttccacagttggttgaatctggcgatgtggaacccatggatatggagggctgactatatacaccatgttttttcctggcacatcactcaactactattagctggcgagtcaactcacgttgttggaatgactagggacaactagacttcaagtgatctttcatcccaggaatataaatagtttctggaaaggacactgacaacttcaaagcaaaatgaagttctttctgttgcttttcaccattgggttctgctgggctcagtattccccaaatacacaacaaggacggacatctattgttcatctgtttgaatggcgatgggttgatattgctcttgaatgtgagcgatatttagctcccaagggatttggaggggttcaggtctctccaccaaatgaaaatgttgcaattcacaaccctttcagaccttggtgggaaagataccaaccagttagctataaattatgcacaa

SEQ ID NO: 1822 - DNA, 3467 bp, Homo sapiens
  source 1..3467: mol_type = unassigned DNA
cagcagcgcactcggtgccccgcgcagggtcgcgatgctgcccggtttggcactgctcctgctggccgcctggacggctcgggcgctggaggtacccactgatggtaatgctggcctgctggctgaaccccagattgccatgttctgtggcagactgaacatgcacatgaatgtccagaatgggaagtgggattcagatccatcagggaccaaaacctgcattgataccaaggaaggcatcctgcagtattgccaagaagtctaccctgaactgcagatcaccaatgtggtagaagccaaccaaccagtgaccatccagaactggtgcaagcggggccgcaagcagtgcaagacccatccccactttgtgattccctaccgctgcttagttggtgagtttgtaagtgatgcccttctcgttcctgacaagtgcaaattcttacaccaggagaggatggatgtttgcgaaactcatcttcactggcacaccgtcgccaaagagacatgcagtgagaagagtaccaacttgcatgactacggcatgttgctgccctgcggaattgacaagttccgaggggtagagtttgtgtgttgcccactggctgaagaaagtgacaatgtggattctgctgatgcggaggaggatgactcggatgtctggtggggcggagcagacacagactatgcagatgggagtgaagacaaagtagtagaagtagcagaggaggaagaagtggctgaggtggaagaagaagaagccgatgatgacgaggacgatgaggatggtgatgaggtagaggaagaggctgaggaaccctacgaagaagccacagagagaaccaccagcattgccaccaccaccaccaccaccacagagtctgtggaagaggtggttcgagaggtgtgctctgaacaagccgagacggggccgtgccgagcaatgatctcccgctggtactttgatgtgactgaagggaagtgtgccccattcttttacggcggatgtggcggcaaccggaacaactttgacacagaagagtactgcatggccgtgtgtggcagcgccatgtcccaaagtttactcaagactacccaggaacctcttgcccgagatcctgttaaacttcctacaacagcagccagtacccctgatgccgttgacaagtatctcgagacacctggggatgagaatgaacatgcccatttccagaaagccaaagagaggcttgaggccaagcaccgagagagaatgtcccaggtcatgagagaatgggaagaggcagaacgtcaagcaaagaacttgcctaaagctgataagaaggcagttatccagcatttccaggagaaagtggaatctttggaacaggaagcagccaacgagagacagcagctggtggagacacacatggccagagtggaagccatgctcaatgaccgccgccgcctggccctggagaactacatcaccgctctgcaggctgttcctcctcggcctcgtcacgtgttcaatatgctaaagaagtatgtccgcgcagaacagaaggacagacagcacaccctaaagcatttcgagcatgtgcgcatggtggatcccaagaaagccgctcagatccggtcccaggttatgacacacctccgtgtgatttatgagcgcatgaatcagtctctctccctgctctacaacgtgcctgcagtggccgaggagattcaggatgaagttgatgagctgcttcagaaagagcaaaactattcagatgacgtcttggccaacatgattagtgaaccaaggatcagttacggaaacgatgctctcatgccatctttgaccgaaacgaaaaccaccgtggagctccttcccgtgaatggagagttcagcctggacgatctccagccgtggcattcttttggggctgactctgtgccagccaacacagaaaacgaagttgagcctgttgatgcccgccctgctgccgaccgaggactgaccactcgaccaggttctgggttgacaaatatcaagacggaggagatctctgaagtgaagatggatgcagaattccgacatgactcaggatatgaagttcatcatcaaaaattggtgttctttgcagaagatgtgggttcaaacaaaggtgcaatcattggactcatggtgggcggtgttgtcatagcgacagtgatcgtcatcaccttggtgatgctgaagaagaaacagtacacatccattcatcatggtgtggtggaggttgacgccgctgtcaccccagaggagcgccacctgtccaagatgcagcagaacggctacgaaaatccaacctacaagttctttgagcagatgcagaactagacccccgccacagcagcctctgaagttggacagcaaaaccattgcttcactacccatcggtgtccatttatagaataatgtgggaagaaacaaacccgttttatgatttactcattatcgccttttgacagctgtgctgtaacacaagtagatgcctgaacttgaattaatccacacatcagtaatgtattctatctctctttacattttggtctctatactacattattaatgggttttgtgtactgtaaagaatttagctgtatcaaactagtgcatgaatagattctctcctgattatttatcacatagccccttagccagttgtatattattcttgtggtttgtgacccaattaagtcctactttacatatgctttaagaatcgatgggggatgcttcatgtgaacgtgggagttcagctgcttctcttgcctaagtattcctttcctgatcactatgcattttaaagttaaacatttttaagtatttcagatgctttagagagattttttttccatgactgcattttactgtacagattgctgcttctgctatatttgtgatataggaattaagaggatacacacgtttgtttcttcgtgcctgttttatgtgcacacattaggcattgagacttcaagcttttctttttttgtccacgtatctttgggtctttgataaagaaaagaatccctgttcattgtaagcacttttacggggcgggtggggaggggtgctctgctggtcttcaattaccaagaattctccaaaacaattttctgcaggatgattgtacagaatcattgcttatgacatgatcgctttctacactgtattacataaataaattaaataaaataaccccgggcaagacttttctttgaaggatgactacagacattaaataatcgaagtaattttgggtggggagaagaggcagattcaattttctttaaccagtctgaagtttcatttatgatacaaaagaagatgaaaatggaagtggcaatataaggggatgaggaaggcatgcctggacaaacccttcttttaagatgtgtcttcaatttgtataaaatggtgttttcatgtaaataaatacattcttggaggagca

SEQ ID NO: 1823 - DNA, 3355 bp, Homo sapiens
  source 1..3355: mol_type = unassigned DNA
agtttcctcggcagcggtaggcgagagcacgcggaggagcgtgcgcgggggccccgggagacggcggcggtggcggcgcgggcagagcaaggacgcggcggatcccactcgcacagcagcgcactcggtgccccgcgcagggtcgcgatgctgcccggtttggcactgctcctgctggccgcctggacggctcgggcgctggaggtacccactgatggtaatgctggcctgctggctgaaccccagattgccatgttctgtggcagactgaacatgcacatgaatgtccagaatgggaagtgggattcagatccatcagggaccaaaacctgcattgataccaaggaaggcatcctgcagtattgccaagaagtctaccctgaactgcagatcaccaatgtggtagaagccaaccaaccagtgaccatccagaactggtgcaagcggggccgcaagcagtgcaagacccatccccactttgtgattccctaccgctgcttagttggtgagtttgtaagtgatgcccttctcgttcctgacaagtgcaaattcttacaccaggagaggatggatgtttgcgaaactcatcttcactggcacaccgtcgccaaagagacatgcagtgagaagagtaccaacttgcatgactacggcatgttgctgccctgcggaattgacaagttccgaggggtagagtttgtgtgttgcccactggctgaagaaagtgacaatgtggattctgctgatgcggaggaggatgactcggatgtctggtggggcggagcagacacagactatgcagatgggagtgaagacaaagtagtagaagtagcagaggaggaagaagtggctgaggtggaagaagaagaagccgatgatgacgaggacgatgaggatggtgatgaggtagaggaagaggctgaggaaccctacgaagaagccacagagagaaccaccagcattgccaccaccaccaccaccaccacagagtctgtggaagaggtggttcgagttcctacaacagcagccagtacccctgatgccgttgacaagtatctcgagacacctggggatgagaatgaacatgcccatttccagaaagccaaagagaggcttgaggccaagcaccgagagagaatgtcccaggtcatgagagaatgggaagaggcagaacgtcaagcaaagaacttgcctaaagctgataagaaggcagttatccagcatttccaggagaaagtggaatctttggaacaggaagcagccaacgagagacagcagctggtggagacacacatggccagagtggaagccatgctcaatgaccgccgccgcctggccctggagaactacatcaccgctctgcaggctgttcctcctcggcctcgtcacgtgttcaatatgctaaagaagtatgtccgcgcagaacagaaggacagacagcacaccctaaagcatttcgagcatgtgcgcatggtggatcccaagaaagccgctcagatccggtcccaggttatgacacacctccgtgtgatttatgagcgcatgaatcagtctctctccctgctctacaacgtgcctgcagtggccgaggagattcaggatgaagttgatgagctgcttcagaaagagcaaaactattcagatgacgtcttggccaacatgattagtgaaccaaggatcagttacggaaacgatgctctcatgccatctttgaccgaaacgaaaaccaccgtggagctccttcccgtgaatggagagttcagcctggacgatctccagccgtggcattcttttggggctgactctgtgccagccaacacagaaaacgaagttgagcctgttgatgcccgccctgctgccgaccgaggactgaccactcgaccaggttctgggttgacaaatatcaagacggaggagatctctgaagtgaagatggatgcagaattccgacatgactcaggatatgaagttcatcatcaaaaattggtgttctttgcagaagatgtgggttcaaacaaaggtgcaatcattggactcatggtgggcggtgttgtcatagcgacagtgatcgtcatcaccttggtgatgctgaagaagaaacagtacacatccattcatcatggtgtggtggaggttgacgccgctgtcaccccagaggagcgccacctgtccaagatgcagcagaacggctacgaaaatccaacctacaagttctttgagcagatgcagaactagacccccgccacagcagcctctgaagttggacagcaaaaccattgcttcactacccatcggtgtccatttatagaataatgtgggaagaaacaaacccgttttatgatttactcattatcgccttttgacagctgtgctgtaacacaagtagatgcctgaacttgaattaatccacacatcagtaatgtattctatctctctttacattttggtctctatactacattattaatgggttttgtgtactgtaaagaatttagctgtatcaaactagtgcatgaatagattctctcctgattatttatcacatagccccttagccagttgtatattattcttgtggtttgtgacccaattaagtcctactttacatatgctttaagaatcgatgggggatgcttcatgtgaacgtgggagttcagctgcttctcttgcctaagtattcctttcctgatcactatgcattttaaagttaaacatttttaagtatttcagatgctttagagagattttttttccatgactgcattttactgtacagattgctgcttctgctatatttgtgatataggaattaagaggatacacacgtttgtttcttcgtgcctgttttatgtgcacacattaggcattgagacttcaagcttttctttttttgtccacgtatctttgggtctttgataaagaaaagaatccctgttcattgtaagcacttttacggggcgggtggggaggggtgctctgctggtcttcaattaccaagaattctccaaaacaattttctgcaggatgattgtacagaatcattgcttatgacatgatcgctttctacactgtattacataaataaattaaataaaataaccccgggcaagacttttctttgaaggatgactacagacattaaataatcgaagtaattttgggtggggagaagaggcagattcaattttctttaaccagtctgaagtttcatttatgatacaaaagaagatgaaaatggaagtggcaatataaggggatgaggaaggcatgcctggacaaacccttcttttaagatgtgtcttcaatttgtataaaatggtgttttcatgtaaataaatacattcttggaggagca

SEQ ID NO: 1824 - DNA, 3167 bp, Homo sapiens
  source 1..3167: mol_type = unassigned DNA
gcgagagcacgcggaggagcgtgcgcgggggccccgggagacggcggcggtggcggcgcgggcagagcaaggacgcggcggatcccactcgcacagcagcgcactcggtgccccgcgcagggtcgcgatgctgcccggtttggcactgctcctgctggccgcctggacggctcgggcgctggaggtctaccctgaactgcagatcaccaatgtggtagaagccaaccaaccagtgaccatccagaactggtgcaagcggggccgcaagcagtgcaagacccatccccactttgtgattccctaccgctgcttagttggtgagtttgtaagtgatgcccttctcgttcctgacaagtgcaaattcttacaccaggagaggatggatgtttgcgaaactcatcttcactggcacaccgtcgccaaagagacatgcagtgagaagagtaccaacttgcatgactacggcatgttgctgccctgcggaattgacaagttccgaggggtagagtttgtgtgttgcccactggctgaagaaagtgacaatgtggattctgctgatgcggaggaggatgactcggatgtctggtggggcggagcagacacagactatgcagatgggagtgaagacaaagtagtagaagtagcagaggaggaagaagtggctgaggtggaagaagaagaagccgatgatgacgaggacgatgaggatggtgatgaggtagaggaagaggctgaggaaccctacgaagaagccacagagagaaccaccagcattgccaccaccaccaccaccaccacagagtctgtggaagaggtggttcgagttcctacaacagcagccagtacccctgatgccgttgacaagtatctcgagacacctggggatgagaatgaacatgcccatttccagaaagccaaagagaggcttgaggccaagcaccgagagagaatgtcccaggtcatgagagaatgggaagaggcagaacgtcaagcaaagaacttgcctaaagctgataagaaggcagttatccagcatttccaggagaaagtggaatctttggaacaggaagcagccaacgagagacagcagctggtggagacacacatggccagagtggaagccatgctcaatgaccgccgccgcctggccctggagaactacatcaccgctctgcaggctgttcctcctcggcctcgtcacgtgttcaatatgctaaagaagtatgtccgcgcagaacagaaggacagacagcacaccctaaagcatttcgagcatgtgcgcatggtggatcccaagaaagccgctcagatccggtcccaggttatgacacacctccgtgtgatttatgagcgcatgaatcagtctctctccctgctctacaacgtgcctgcagtggccgaggagattcaggatgaagttgatgagctgcttcagaaagagcaaaactattcagatgacgtcttggccaacatgattagtgaaccaaggatcagttacggaaacgatgctctcatgccatctttgaccgaaacgaaaaccaccgtggagctccttcccgtgaatggagagttcagcctggacgatctccagccgtggcattcttttggggctgactctgtgccagccaacacagaaaacgaagttgagcctgttgatgcccgccctgctgccgaccgaggactgaccactcgaccaggttctgggttgacaaatatcaagacggaggagatctctgaagtgaagatggatgcagaattccgacatgactcaggatatgaagttcatcatcaaaaattggtgttctttgcagaagatgtgggttcaaacaaaggtgcaatcattggactcatggtgggcggtgttgtcatagcgacagtgatcgtcatcaccttggtgatgctgaagaagaaacagtacacatccattcatcatggtgtggtggaggttgacgccgctgtcaccccagaggagcgccacctgtccaagatgcagcagaacggctacgaaaatccaacctacaagttctttgagcagatgcagaactagacccccgccacagcagcctctgaagttggacagcaaaaccattgcttcactacccatcggtgtccatttatagaataatgtgggaagaaacaaacccgttttatgatttactcattatcgccttttgacagctgtgctgtaacacaagtagatgcctgaacttgaattaatccacacatcagtaatgtattctatctctctttacattttggtctctatactacattattaatgggttttgtgtactgtaaagaatttagctgtatcaaactagtgcatgaatagattctctcctgattatttatcacatagccccttagccagttgtatattattcttgtggtttgtgacccaattaagtcctactttacatatgctttaagaatcgatgggggatgcttcatgtgaacgtgggagttcagctgcttctcttgcctaagtattcctttcctgatcactatgcattttaaagttaaacatttttaagtatttcagatgctttagagagattttttttccatgactgcattttactgtacagattgctgcttctgctatatttgtgatataggaattaagaggatacacacgtttgtttcttcgtgcctgttttatgtgcacacattaggcattgagacttcaagcttttctttttttgtccacgtatctttgggtctttgataaagaaaagaatccctgttcattgtaagcacttttacggggcgggtggggaggggtgctctgctggtcttcaattaccaagaattctccaaaacaattttctgcaggatgattgtacagaatcattgcttatgacatgatcgctttctacactgtattacataaataaattaaataaaataaccccgggcaagacttttctttgaaggatgactacagacattaaataatcgaagtaattttgggtggggagaagaggcagattcaattttctttaaccagtctgaagtttcatttatgatacaaaagaagatgaaaatggaagtggcaatataaggggatgaggaaggcatgcctggacaaacccttcttttaagatgtgtcttcaatttgtataaaatggtgttttcatgtaaataaatacattcttggaggagca

SEQ ID NO: 1825 - DNA, 3543 bp, Homo sapiens
  source 1..3543: mol_type = unassigned DNA
cgccgcgctcgggctccgtcagtttcctcggcagcggtaggcgagagcacgcggaggagcgtgcgcgggggccccgggagacggcggcggtggcggcgcgggcagagcaaggacgcggcggatcccactcgcacagcagcgcactcggtgccccgcgcagggtcgcgatgctgcccggtttggcactgctcctgctggccgcctggacggctcgggcgctggaggtacccactgatggtaatgctggcctgctggctgaaccccagattgccatgttctgtggcagactgaacatgcacatgaatgtccagaatgggaagtgggattcagatccatcagggaccaaaacctgcattgataccaaggaaggcatcctgcagtattgccaagaagtctaccctgaactgcagatcaccaatgtggtagaagccaaccaaccagtgaccatccagaactggtgcaagcggggccgcaagcagtgcaagacccatccccactttgtgattccctaccgctgcttagttggtgagtttgtaagtgatgcccttctcgttcctgacaagtgcaaattcttacaccaggagaggatggatgtttgcgaaactcatcttcactggcacaccgtcgccaaagagacatgcagtgagaagagtaccaacttgcatgactacggcatgttgctgccctgcggaattgacaagttccgaggggtagagtttgtgtgttgcccactggctgaagaaagtgacaatgtggattctgctgatgcggaggaggatgactcggatgtctggtggggcggagcagacacagactatgcagatgggagtgaagacaaagtagtagaagtagcagaggaggaagaagtggctgaggtggaagaagaagaagccgatgatgacgaggacgatgaggatggtgatgaggtagaggaagaggctgaggaaccctacgaagaagccacagagagaaccaccagcattgccaccaccaccaccaccaccacagagtctgtggaagaggtggttcgagaggtgtgctctgaacaagccgagacggggccgtgccgagcaatgatctcccgctggtactttgatgtgactgaagggaagtgtgccccattcttttacggcggatgtggcggcaaccggaacaactttgacacagaagagtactgcatggccgtgtgtggcagcgccattcctacaacagcagccagtacccctgatgccgttgacaagtatctcgagacacctggggatgagaatgaacatgcccatttccagaaagccaaagagaggcttgaggccaagcaccgagagagaatgtcccaggtcatgagagaatgggaagaggcagaacgtcaagcaaagaacttgcctaaagctgataagaaggcagttatccagcatttccaggagaaagtggaatctttggaacaggaagcagccaacgagagacagcagctggtggagacacacatggccagagtggaagccatgctcaatgaccgccgccgcctggccctggagaactacatcaccgctctgcaggctgttcctcctcggcctcgtcacgtgttcaatatgctaaagaagtatgtccgcgcagaacagaaggacagacagcacaccctaaagcatttcgagcatgtgcgcatggtggatcccaagaaagccgctcagatccggtcccaggttatgacacacctccgtgtgatttatgagcgcatgaatcagtctctctccctgctctacaacgtgcctgcagtggccgaggagattcaggatgaagttgatgagctgcttcagaaagagcaaaactattcagatgacgtcttggccaacatgattagtgaaccaaggatcagttacggaaacgatgctctcatgccatctttgaccgaaacgaaaaccaccgtggagctccttcccgtgaatggagagttcagcctggacgatctccagccgtggcattcttttggggctgactctgtgccagccaacacagaaaacgaagttgagcctgttgatgcccgccctgctgccgaccgaggactgaccactcgaccaggttctgggttgacaaatatcaagacggaggagatctctgaagtgaagatggatgcagaattccgacatgactcaggatatgaagttcatcatcaaaaattggtgttctttgcagaagatgtgggttcaaacaaaggtgcaatcattggactcatggtgggcggtgttgtcatagcgacagtgatcgtcatcaccttggtgatgctgaagaagaaacagtacacatccattcatcatggtgtggtggaggttgacgccgctgtcaccccagaggagcgccacctgtccaagatgcagcagaacggctacgaaaatccaacctacaagttctttgagcagatgcagaactagacccccgccacagcagcctctgaagttggacagcaaaaccattgcttcactacccatcggtgtccatttatagaataatgtgggaagaaacaaacccgttttatgatttactcattatcgccttttgacagctgtgctgtaacacaagtagatgcctgaacttgaattaatccacacatcagtaatgtattctatctctctttacattttggtctctatactacattattaatgggttttgtgtactgtaaagaatttagctgtatcaaactagtgcatgaatagattctctcctgattatttatcacatagccccttagccagttgtatattattcttgtggtttgtgacccaattaagtcctactttacatatgctttaagaatcgatgggggatgcttcatgtgaacgtgggagttcagctgcttctcttgcctaagtattcctttcctgatcactatgcattttaaagttaaacatttttaagtatttcagatgctttagagagattttttttccatgactgcattttactgtacagattgctgcttctgctatatttgtgatataggaattaagaggatacacacgtttgtttcttcgtgcctgttttatgtgcacacattaggcattgagacttcaagcttttctttttttgtccacgtatctttgggtctttgataaagaaaagaatccctgttcattgtaagcacttttacggggcgggtggggaggggtgctctgctggtcttcaattaccaagaattctccaaaacaattttctgcaggatgattgtacagaatcattgcttatgacatgatcgctttctacactgtattacataaataaattaaataaaataaccccgggcaagacttttctttgaaggatgactacagacattaaataatcgaagtaattttgggtggggagaagaggcagattcaattttctttaaccagtctgaagtttcatttatgatacaaaagaagatgaaaatggaagtggcaatataaggggatgaggaaggcatgcctggacaaacccttcttttaagatgtgtcttcaatttgtataaaatggtgttttcatgtaaataaatacattcttggaggagca

SEQ ID NO: 1826 - DNA, 3578 bp, Homo sapiens
  source 1..3578: mol_type = unassigned DNA
ggatcagctgactcgcctggctctgagccccgccgccgcgctcgggctccgtcagtttcctcggcagcggtaggcgagagcacgcggaggagcgtgcgcgggggccccgggagacggcggcggtggcggcgcgggcagagcaaggacgcggcggatcccactcgcacagcagcgcactcggtgccccgcgcagggtcgcgatgctgcccggtttggcactgctcctgctggccgcctggacggctcgggcgctggaggtacccactgatggtaatgctggcctgctggctgaaccccagattgccatgttctgtggcagactgaacatgcacatgaatgtccagaatgggaagtgggattcagatccatcagggaccaaaacctgcattgataccaaggaaggcatcctgcagtattgccaagaagtctaccctgaactgcagatcaccaatgtggtagaagccaaccaaccagtgaccatccagaactggtgcaagcggggccgcaagcagtgcaagacccatccccactttgtgattccctaccgctgcttagttggtgagtttgtaagtgatgcccttctcgttcctgacaagtgcaaattcttacaccaggagaggatggatgtttgcgaaactcatcttcactggcacaccgtcgccaaagagacatgcagtgagaagagtaccaacttgcatgactacggcatgttgctgccctgcggaattgacaagttccgaggggtagagtttgtgtgttgcccactggctgaagaaagtgacaatgtggattctgctgatgcggaggaggatgactcggatgtctggtggggcggagcagacacagactatgcagatgggagtgaagacaaagtagtagaagtagcagaggaggaagaagtggctgaggtggaagaagaagaagccgatgatgacgaggacgatgaggatggtgatgaggtagaggaagaggctgaggaaccctacgaagaagccacagagagaaccaccagcattgccaccaccaccaccaccaccacagagtctgtggaagaggtggttcgagaggtgtgctctgaacaagccgagacggggccgtgccgagcaatgatctcccgctggtactttgatgtgactgaagggaagtgtgccccattcttttacggcggatgtggcggcaaccggaacaactttgacacagaagagtactgcatggccgtgtgtggcagcgccatgtcccaaagtttactcaagactacccaggaacctcttgcccgagatcctgttaaacttcctacaacagcagccagtacccctgatgccgttgacaagtatctcgagacacctggggatgagaatgaacatgcccatttccagaaagccaaagagaggcttgaggccaagcaccgagagagaatgtcccaggtcatgagagaatgggaagaggcagaacgtcaagcaaagaacttgcctaaagctgataagaaggcagttatccagcatttccaggagaaagtggaatctttggaacaggaagcagccaacgagagacagcagctggtggagacacacatggccagagtggaagccatgctcaatgaccgccgccgcctggccctggagaactacatcaccgctctgcaggctgttcctcctcggcctcgtcacgtgttcaatatgctaaagaagtatgtccgcgcagaacagaaggacagacagcacaccctaaagcatttcgagcatgtgcgcatggtggatcccaagaaagccgctcagatccggtcccaggttatgacacacctccgtgtgatttatgagcgcatgaatcagtctctctccctgctctacaacgtgcctgcagtggccgaggagattcaggatgaagttgatgagctgcttcagaaagagcaaaactattcagatgacgtcttggccaacatgattagtgaaccaaggatcagttacggaaacgatgctctcatgccatctttgaccgaaacgaaaaccaccgtggagctccttcccgtgaatggagagttcagcctggacgatctccagccgtggcattcttttggggctgactctgtgccagccaacacagaaaacgaaggttctgggttgacaaatatcaagacggaggagatctctgaagtgaagatggatgcagaattccgacatgactcaggatatgaagttcatcatcaaaaattggtgttctttgcagaagatgtgggttcaaacaaaggtgcaatcattggactcatggtgggcggtgttgtcatagcgacagtgatcgtcatcaccttggtgatgctgaagaagaaacagtacacatccattcatcatggtgtggtggaggttgacgccgctgtcaccccagaggagcgccacctgtccaagatgcagcagaacggctacgaaaatccaacctacaagttctttgagcagatgcagaactagacccccgccacagcagcctctgaagttggacagcaaaaccattgcttcactacccatcggtgtccatttatagaataatgtgggaagaaacaaacccgttttatgatttactcattatcgccttttgacagctgtgctgtaacacaagtagatgcctgaacttgaattaatccacacatcagtaatgtattctatctctctttacattttggtctctatactacattattaatgggttttgtgtactgtaaagaatttagctgtatcaaactagtgcatgaatagattctctcctgattatttatcacatagccccttagccagttgtatattattcttgtggtttgtgacccaattaagtcctactttacatatgctttaagaatcgatgggggatgcttcatgtgaacgtgggagttcagctgcttctcttgcctaagtattcctttcctgatcactatgcattttaaagttaaacatttttaagtatttcagatgctttagagagattttttttccatgactgcattttactgtacagattgctgcttctgctatatttgtgatataggaattaagaggatacacacgtttgtttcttcgtgcctgttttatgtgcacacattaggcattgagacttcaagcttttctttttttgtccacgtatctttgggtctttgataaagaaaagaatccctgttcattgtaagcacttttacggggcgggtggggaggggtgctctgctggtcttcaattaccaagaattctccaaaacaattttctgcaggatgattgtacagaatcattgcttatgacatgatcgctttctacactgtattacataaataaattaaataaaataaccccgggcaagacttttctttgaaggatgactacagacattaaataatcgaagtaattttgggtggggagaagaggcagattcaattttctttaaccagtctgaagtttcatttatgatacaaaagaagatgaaaatggaagtggcaatataaggggatgaggaaggcatgcctggacaaacccttcttttaagatgtgtcttcaatttgtataaaatggtgttttcatgtaaataaatacattcttggaggagc

SEQ ID NO: 1827 - DNA, 3464 bp, Homo sapiens
  source 1..3464: mol_type = unassigned DNA
ggatcagctgactcgcctggctctgagccccgccgccgcgctcgggctccgtcagtttcctcggcagcggtaggcgagagcacgcggaggagcgtgcgcgggggccccgggagacggcggcggtggcggcgcgggcagagcaaggacgcggcggatcccactcgcacagcagcgcactcggtgccccgcgcagggtcgcgatgctgcccggtttggcactgctcctgctggccgcctggacggctcgggcgctggaggtacccactgatggtaatgctggcctgctggctgaaccccagattgccatgttctgtggcagactgaacatgcacatgaatgtccagaatgggaagtgggattcagatccatcagggaccaaaacctgcattgataccaaggaaggcatcctgcagtattgccaagaagtctaccctgaactgcagatcaccaatgtggtagaagccaaccaaccagtgaccatccagaactggtgcaagcggggccgcaagcagtgcaagacccatccccactttgtgattccctaccgctgcttagttggtgagtttgtaagtgatgcccttctcgttcctgacaagtgcaaattcttacaccaggagaggatggatgtttgcgaaactcatcttcactggcacaccgtcgccaaagagacatgcagtgagaagagtaccaacttgcatgactacggcatgttgctgccctgcggaattgacaagttccgaggggtagagtttgtgtgttgcccactggctgaagaaagtgacaatgtggattctgctgatgcggaggaggatgactcggatgtctggtggggcggagcagacacagactatgcagatgggagtgaagacaaagtagtagaagtagcagaggaggaagaagtggctgaggtggaagaagaagaagccgatgatgacgaggacgatgaggatggtgatgaggtagaggaagaggctgaggaaccctacgaagaagccacagagagaaccaccagcattgccaccaccaccaccaccaccacagagtctgtggaagaggtggttcgagtgtcccaaagtttactcaagactacccaggaacctcttgcccgagatcctgttaaacttcctacaacagcagccagtacccctgatgccgttgacaagtatctcgagacacctggggatgagaatgaacatgcccatttccagaaagccaaagagaggcttgaggccaagcaccgagagagaatgtcccaggtcatgagagaatgggaagaggcagaacgtcaagcaaagaacttgcctaaagctgataagaaggcagttatccagcatttccaggagaaagtggaatctttggaacaggaagcagccaacgagagacagcagctggtggagacacacatggccagagtggaagccatgctcaatgaccgccgccgcctggccctggagaactacatcaccgctctgcaggctgttcctcctcggcctcgtcacgtgttcaatatgctaaagaagtatgtccgcgcagaacagaaggacagacagcacaccctaaagcatttcgagcatgtgcgcatggtggatcccaagaaagccgctcagatccggtcccaggttatgacacacctccgtgtgatttatgagcgcatgaatcagtctctctccctgctctacaacgtgcctgcagtggccgaggagattcaggatgaagttgatgagctgcttcagaaagagcaaaactattcagatgacgtcttggccaacatgattagtgaaccaaggatcagttacggaaacgatgctctcatgccatctttgaccgaaacgaaaaccaccgtggagctccttcccgtgaatggagagttcagcctggacgatctccagccgtggcattcttttggggctgactctgtgccagccaacacagaaaacgaagttgagcctgttgatgcccgccctgctgccgaccgaggactgaccactcgaccaggttctgggttgacaaatatcaagacggaggagatctctgaagtgaagatggatgcagaattccgacatgactcaggatatgaagttcatcatcaaaaattggtgttctttgcagaagatgtgggttcaaacaaaggtgcaatcattggactcatggtgggcggtgttgtcatagcgacagtgatcgtcatcaccttggtgatgctgaagaagaaacagtacacatccattcatcatggtgtggtggaggttgacgccgctgtcaccccagaggagcgccacctgtccaagatgcagcagaacggctacgaaaatccaacctacaagttctttgagcagatgcagaactagacccccgccacagcagcctctgaagttggacagcaaaaccattgcttcactacccatcggtgtccatttatagaataatgtgggaagaaacaaacccgttttatgatttactcattatcgccttttgacagctgtgctgtaacacaagtagatgcctgaacttgaattaatccacacatcagtaatgtattctatctctctttacattttggtctctatactacattattaatgggttttgtgtactgtaaagaatttagctgtatcaaactagtgcatgaatagattctctcctgattatttatcacatagccccttagccagttgtatattattcttgtggtttgtgacccaattaagtcctactttacatatgctttaagaatcgatgggggatgcttcatgtgaacgtgggagttcagctgcttctcttgcctaagtattcctttcctgatcactatgcattttaaagttaaacatttttaagtatttcagatgctttagagagattttttttccatgactgcattttactgtacagattgctgcttctgctatatttgtgatataggaattaagaggatacacacgtttgtttcttcgtgcctgttttatgtgcacacattaggcattgagacttcaagcttttctttttttgtccacgtatctttgggtctttgataaagaaaagaatccctgttcattgtaagcacttttacggggcgggtggggaggggtgctctgctggtcttcaattaccaagaattctccaaaacaattttctgcaggatgattgtacagaatcattgcttatgacatgatcgctttctacactgtattacataaataaattaaataaaataaccccgggcaagacttttctttgaaggatgactacagacattaaataatcgaagtaattttgggtggggagaagaggcagattcaattttctttaaccagtctgaagtttcatttatgatacaaaagaagatgaaaatggaagtggcaatataaggggatgaggaaggcatgcctggacaaacccttcttttaagatgtgtcttcaatttgtataaaatggtgttttcatgtaaataaatacattcttggaggagc

SEQ ID NO: 1828 - DNA, 2517 bp, Homo sapiens
  source 1..2517: mol_type = unassigned DNA
cagcagcgcactcggtgccccgcgcagggtcgcgatgctgcccggtttggcactgctcctgctggccgcctggacggctcgggcgctggaggtctaccctgaactgcagatcaccaatgtggtagaagccaaccaaccagtgaccatccagaactggtgcaagcggggccgcaagcagtgcaagacccatccccactttgtgattccctaccgctgcttagttggtgagtttgtaagtgatgcccttctcgttcctgacaagtgcaaattcttacaccaggagaggatggatgtttgcgaaactcatcttcactggcacaccgtcgccaaagagacatgcagtgagaagagtaccaacttgcatgactacggcatgttgctgccctgcggaattgacaagttccgaggggtagagtttgtgtgttgcccactggctgaagaaagtgacaatgtggattctgctgatgcggaggaggatgactcggatgtctggtggggcggagcagacacagactatgcagatgggagtgaagacaaagtagtagaagtagcagaggaggaagaagtggctgaggtggaagaagaagaagccgatgatgacgaggacgatgaggatggtgatgaggtagaggaagaggctgaggaaccctacgaagaagccacagagagaaccaccagcattgccaccaccaccaccaccaccacagagtctgtggaagaggtggttcgagaggtgtgctctgaacaagccgagacggggccgtgccgagcaatgatctcccgctggtactttgatgtgactgaagggaagtgtgccccattcttttacggcggatgtggcggcaaccggaacaactttgacacagaagagtactgcatggccgtgtgtggcagcgccatgtcccaaagtttactcaagactacccaggaacctcttgcccgagatcctgttaaacttcctacaacagcagccagtacccctgatgccgttgacaagtatctcgagacacctggggatgagaatgaacatgcccatttccagaaagccaaagagaggcttgaggccaagcaccgagagagaatgtcccaggtcatgagagaatgggaagaggcagaacgtcaagcaaagaacttgcctaaagctgataagaaggcagttatccagcatttccaggagaaagtggaatctttggaacaggaagcagccaacgagagacagcagctggtggagacacacatggccagagtggaagccatgctcaatgaccgccgccgcctggccctggagaactacatcaccgctctgcaggctgttcctcctcggcctcgtcacgtgttcaatatgctaaagaagtatgtccgcgcagaacagaaggacagacagcacaccctaaagcatttcgagcatgtgcgcatggtggatcccaagaaagccgctcagatccggtcccaggttatgacacacctccgtgtgatttatgagcgcatgaatcagtctctctccctgctctacaacgtgcctgcagtggccgaggagattcaggatgaagttgatgagctgcttcagaaagagcaaaactattcagatgacgtcttggccaacatgattagtgaaccaaggatcagttacggaaacgatgctctcatgccatctttgaccgaaacgaaaaccaccgtggagctccttcccgtgaatggagagttcagcctggacgatctccagccgtggcattcttttggggctgactctgtgccagccaacacagaaaacgaagttgagcctgttgatgcccgccctgctgccgaccgaggactgaccactcgaccaggttctgggttgacaaatatcaagacggaggagatctctgaagtgaagatggatgcagaattccgacatgactcaggatatgaagttcatcatcaaaaattggtgttctttgcagaagatgtgggttcaaacaaaggtgcaatcattggactcatggtgggcggtgttgtcatagcgacagtgatcgtcatcaccttggtgatgctgaagaagaaacagtacacatccattcatcatggtgtggtggaggttgacgccgctgtcaccccagaggagcgccacctgtccaagatgcagcagaacggctacgaaaatccaacctacaagttctttgagcagatgcagaactagacccccgccacagcagcctctgaagttggacagcaaaaccattgcttcactacccatcggtgtccatttatagaataatgtgggaagaaacaaacccgttttatgatttactcattatcgccttttgacagctgtgctgtaacacaagtagatgcctgaacttgaattaatccacacatcagtaatgtattctatctctctttacattttggtctctatactacattattaatgggttttgtgtactgtaaagaatttagctgtatcaaactagtgcatgaatagattctctcctgattatttatcacatagccccttagccagttgtatattattct

SEQ ID NO: 1829 - DNA, 2737 bp, Homo sapiens
  source 1..2737: mol_type = unassigned DNA
agtgttgacatgctgttgactcaccctcccgaggatggaagctctggcctgggtcaagttgtggtcactgcagttaacagtttgttgatctcagggagtattccacagttgctgatgtaattgacaatgattggagccagctcttccccagattcaaatggaccaattagaggacttgttggttctgtttatcaactatgtacccactgatggtaatgctggcctgctggctgaaccccagattgccatgttctgtggcagactgaacatgcacatgaatgtccagaatgggaagtgggattcagatccatcagggaccaaaacctgcattgataccaaggaaggcatcctgcagtattgccaagaagtctaccctgaactgcagatcaccaatgtggtagaagccaaccaaccagtgaccatccagaactggtgcaagcggggccgcaagcagtgcaagacccatccccactttgtgattccctaccgctgcttagttggtgagtttgtaagtgatgcccttctcgttcctgacaagtgcaaattcttacaccaggagaggatggatgtttgcgaaactcatcttcactggcacaccgtcgccaaagagacatgcagtgagaagagtaccaacttgcatgactacggcatgttgctgccctgcggaattgacaagttccgaggggtagagtttgtgtgttgcccactggctgaagaaagtgacaatgtggattctgctgatgcggaggaggatgactcggatgtctggtggggcggagcagacacagactatgcagatgggagtgaagacaaagtagtagaagtagcagaggaggaagaagtggctgaggtggaagaagaagaagccgatgatgacgaggacgatgaggatggtgatgaggtagaggaagaggctgaggaaccctacgaagaagccacagagagaaccaccagcattgccaccaccaccaccaccaccacagagtctgtggaagaggtggttcgagaggtgtgctctgaacaagccgagacggggccgtgccgagcaatgatctcccgctggtactttgatgtgactgaagggaagtgtgccccattcttttacggcggatgtggcggcaaccggaacaactttgacacagaagagtactgcatggccgtgtgtggcagcgccattcctacaacagcagccagtacccctgatgccgttgacaagtatctcgagacacctggggatgagaatgaacatgcccatttccagaaagccaaagagaggcttgaggccaagcaccgagagagaatgtcccaggtcatgagagaatgggaagaggcagaacgtcaagcaaagaacttgcctaaagctgataagaaggcagttatccagcatttccaggagaaagtggaatctttggaacaggaagcagccaacgagagacagcagctggtggagacacacatggccagagtggaagccatgctcaatgaccgccgccgcctggccctggagaactacatcaccgctctgcaggctgttcctcctcggcctcgtcacgtgttcaatatgctaaagaagtatgtccgcgcagaacagaaggacagacagcacaccctaaagcatttcgagcatgtgcgcatggtggatcccaagaaagccgctcagatccggtcccaggttatgacacacctccgtgtgatttatgagcgcatgaatcagtctctctccctgctctacaacgtgcctgcagtggccgaggagattcaggatgaagttgatgagctgcttcagaaagagcaaaactattcagatgacgtcttggccaacatgattagtgaaccaaggatcagttacggaaacgatgctctcatgccatctttgaccgaaacgaaaaccaccgtggagctccttcccgtgaatggagagttcagcctggacgatctccagccgtggcattcttttggggctgactctgtgccagccaacacagaaaacgaagttgagcctgttgatgcccgccctgctgccgaccgaggactgaccactcgaccaggttctgggttgacaaatatcaagacggaggagatctctgaagtgaagatggatgcagaattccgacatgactcaggatatgaagttcatcatcaaaaattggtgttctttgcagaagatgtgggttcaaacaaaggtgcaatcattggactcatggtgggcggtgttgtcatagcgacagtgatcgtcatcaccttggtgatgctgaagaagaaacagtacacatccattcatcatggtgtggtggaggttgacgccgctgtcaccccagaggagcgccacctgtccaagatgcagcagaacggctacgaaaatccaacctacaagttctttgagcagatgcagaactagacccccgccacagcagcctctgaagttggacagcaaaaccattgcttcactacccatcggtgtccatttatagaataatgtgggaagaaacaaacccgttttatgatttactcattatcgccttttgacagctgtgctgtaacacaagtagatgcctgaacttgaattaatccacacatcagtaatgtattctatctctctttacattttggtctctatactacattattaatgggttttgtgtactgtaaagaatttagctgtatcaaactagtgcatgaatagattctctcctgattatttatcacatagccccttagccagttgtatattattctt

SEQ ID NO: 1830 - DNA, 2518 bp, Homo sapiens
  source 1..2518: mol_type = unassigned DNA
gtcggatgattcaagctcacggggacgagcaggagcgctctcgacttttctagagcctcagcgtcctaggactcacctttccctgatcctgcaccgtccctctcctggccccagactctccctcccactgttcacgaagcccaggtacccactgatggtaatgctggcctgctggctgaaccccagattgccatgttctgtggcagactgaacatgcacatgaatgtccagaatgggaagtgggattcagatccatcagggaccaaaacctgcattgataccaaggaaggcatcctgcagtattgccaagaagtctaccctgaactgcagatcaccaatgtggtagaagccaaccaaccagtgaccatccagaactggtgcaagcggggccgcaagcagtgcaagacccatccccactttgtgattccctaccgctgcttagttggtgagtttgtaagtgatgcccttctcgttcctgacaagtgcaaattcttacaccaggagaggatggatgtttgcgaaactcatcttcactggcacaccgtcgccaaagagacatgcagtgagaagagtaccaacttgcatgactacggcatgttgctgccctgcggaattgacaagttccgaggggtagagtttgtgtgttgcccactggctgaagaaagtgacaatgtggattctgctgatgcggaggaggatgactcggatgtctggtggggcggagcagacacagactatgcagatgggagtgaagacaaagtagtagaagtagcagaggaggaagaagtggctgaggtggaagaagaagaagccgatgatgacgaggacgatgaggatggtgatgaggtagaggaagaggctgaggaaccctacgaagaagccacagagagaaccaccagcattgccaccaccaccaccaccaccacagagtctgtggaagaggtggttcgagttcctacaacagcagccagtacccctgatgccgttgacaagtatctcgagacacctggggatgagaatgaacatgcccatttccagaaagccaaagagaggcttgaggccaagcaccgagagagaatgtcccaggtcatgagagaatgggaagaggcagaacgtcaagcaaagaacttgcctaaagctgataagaaggcagttatccagcatttccaggagaaagtggaatctttggaacaggaagcagccaacgagagacagcagctggtggagacacacatggccagagtggaagccatgctcaatgaccgccgccgcctggccctggagaactacatcaccgctctgcaggctgttcctcctcggcctcgtcacgtgttcaatatgctaaagaagtatgtccgcgcagaacagaaggacagacagcacaccctaaagcatttcgagcatgtgcgcatggtggatcccaagaaagccgctcagatccggtcccaggttatgacacacctccgtgtgatttatgagcgcatgaatcagtctctctccctgctctacaacgtgcctgcagtggccgaggagattcaggatgaagttgatgagctgcttcagaaagagcaaaactattcagatgacgtcttggccaacatgattagtgaaccaaggatcagttacggaaacgatgctctcatgccatctttgaccgaaacgaaaaccaccgtggagctccttcccgtgaatggagagttcagcctggacgatctccagccgtggcattcttttggggctgactctgtgccagccaacacagaaaacgaagttgagcctgttgatgcccgccctgctgccgaccgaggactgaccactcgaccaggttctgggttgacaaatatcaagacggaggagatctctgaagtgaagatggatgcagaattccgacatgactcaggatatgaagttcatcatcaaaaattggtgttctttgcagaagatgtgggttcaaacaaaggtgcaatcattggactcatggtgggcggtgttgtcatagcgacagtgatcgtcatcaccttggtgatgctgaagaagaaacagtacacatccattcatcatggtgtggtggaggttgacgccgctgtcaccccagaggagcgccacctgtccaagatgcagcagaacggctacgaaaatccaacctacaagttctttgagcagatgcagaactagacccccgccacagcagcctctgaagttggacagcaaaaccattgcttcactacccatcggtgtccatttatagaataatgtgggaagaaacaaacccgttttatgatttactcattatcgccttttgacagctgtgctgtaacacaagtagatgcctgaacttgaattaatccacacatcagtaatgtattctatctctctttacattttggtctctatactacattattaatgggttttgtgtactgtaaagaatttagctgtatcaaactagtgcatgaatagattctctcctgattatttatcacatagccccttagccagttgtatattattcttgtgg

SEQ ID NO: 1831 - DNA, 1385 bp, Homo sapiens
  source 1..1385: mol_type = unassigned DNA
gatgttgtgatggagaagccgcggcggagcccgaaccccgcagcctgagccacctccgtcatctgggcccggggcctcaccgcgcagattccttctggaaccccaacgccttcgagacggattccgacctgccggctggatggatgagggtccaggacacctcagggacctattactggcacatcccaacagggaccacccagtgggaaccccccggccgggcctccccctcacaggggagcagcccccaagaggagtcccagctcacctggacaggttttgctcatggagaaggctttgaggatggagaattttggaaggatgaacccagtgatgaggccccaatggagctgggactgaaggaacctgaggaggggacgttgaccttcccagctcagagcctcagcccagagccgttgccccaagaggaggagaagcttcccccacggaataccaacccagggatcaagtgtttcgccgtgcgctccctaggctgggtagagatgaccgaggaggagctggcccctggacgcagcagtgtggcagtcaacaattgcatccgtcagctctcttaccacaaaaacaacctgcatgaccccatgtctgggggctggggggaaggaaaggatctgctactgcagctggaggatgagacactaaagctagtggagccacagagccaggcactgctgcacgcccaacccatcatcagcatccgcgtgtggggcgtcgggcgggacagtggaagggactttgcctacgtagctcgtgataagctgacccagatgctcaagtgccacgtgtttcgctgtgaggcacctgccaagaacatcgccaccagcctgcatgagatctgctctaaggcacggccccctccactccctggactagttgccacctttgctctacaagggtgtgggtggggtcactgagtgctgtaggggggccccagggcaatgaggctctaatagattctccctggctcctcgcctcccttccttcctcagatcatggccgaacggcgtaatgcccgctgcttggtaaatggactctccctggaccactctaaacttgtggatgtccctttccaaggtcagtgtcaaaacccctccaggtccagctcagctttgttggcaaaggtgggtgacccaaggaaaggcatgagctcctggacagcgctgatagaaaaatgaacacatgaagactgaatactccaatacgtggagggactccggttaaagggaggcaggggacgagatgaaagtagggcctcggctgggcaagtgtccagcttatgccctgctggtggggctgcgggtgagcaaggtctgccaccatgatcaaccttctcttctttcccatagtggaattcccagcgcctaaga

SEQ ID NO: 1832 - DNA, 1810 bp, Homo sapiens
  source 1..1810: mol_type = unassigned DNA
ggagcagccggggttatgctgggcaaggattacatgctggccatcattctggtcaactgcgatgatgacttgtggggggaccacagtctggaggtggaggctggcctgcctcctggctggaggaagatccacgatgctgcaggtacttactactggcatgtacccagcggtagcacccagtggcagcgcccaacctgggaactaggagatgcagaggacccaggcacgggaacggaggggatctggggactgcggccccccaaagggagatccttctccagcctggagagttcactggaccggagtaactctctgtcctggtatggtggggaatcctacatccagagcatggagccaggggctaagtgctttgcagtccgctctctgggctgggtagaggtacctgaagaggacctggcaccggggaagagcagtattgcagtcaataactgtatccagcagctggcccagacccgcagccggagccagcctccagatggtgcctggggtgagggccagaacatgctgatgatcctgaagaaggatgccatgagcctagtgaatcccctggaccacagtctgatccactgccagcctctggtgcacatccgtgtgtggggcgtggggagctccaagggccgtgacagccccatctctgcccctgctagggacttcgcttttgtggcaagtgacaaagatagctgtatgctcaagtgccatgtgttttgctgtgatgtccctgccaaggccattgccagtgccctacatgggctttgtgcccagatcttgtcagagcgagtagaggtcagtggtgatgcctcttgctgctccccagaccccatctctcctgaagacctgccacggcaagtggagctgctggatgcggtaagccaagctgctcagaagtacgaggcactgtatatggggacactgccagtcaccaaggccatgggcatggatgtgctgaacgaggccattggtaccctcaccgccaggggggaccggaatgcctgggtccccaccatgctcagtgtgtctgactctctcatgactgcacaccccattcaggcagaggccagtacagaggaggagccattgtggcagtgccctgtgcgccttgtgacatttattggtgttggccgcgacccacacacctttggcctcatcgctgacctgggccgtcagagcttccagtgcgcagccttctggtgccagccccatgcagggggactctctgaagctgtgcaggctgcctgtatggttcagtaccagaagtgtcttgtggcctctgcagctcgaggcaaggcctggggtgcccaggcccgtgcccgcctgcggctcaagcggaccagctccatggattccccaggaggtcccctgcccctccccctgctcaaaggaggggttggcggtgcaggggcaacccctcgaaagcggggtgtcttctcttttcttgatgccttccggctgaaaccctctctgctccatatgccctaaacttatctgggaaggctggggaagtaggctctgggtccatgcctaactctgtaccgttttattcctcaaggcctatagcctgtcactccttgaagccttctctgcctgtccctccgatccttgtccaccgtctatttattgcccaatttattgtttatacggatgactgggaggcactgcaccacaacgtaggaccctggctcccctttccttgggtccttgtgttccttgcccctgtccaaccctggacagttggctctacctcagtaacactttatagcaaaatcagtgcaaataaaaatccctcagtgac

SEQ ID NO: 1833 - DNA, 3635 bp, Homo sapiens
  source 1..3635: mol_type = unassigned DNA
cagtctcctgaatatttacgcgttgctgaatctcctgtggacaaaccaccaataggccaggactgtcctgtggacagacggggtgagcctcttcttgtgtctggagattctgaaaagatttgatcaccaggagatttttcgggacattaccaaaccactcattttagtggctgcctccgggtgatgatggctgtgtgaacgactgccatggcccaccggaagcttgagagcgtggggagcggcatgttggaccatagggtgagaccaggtcctgtccctcacagccaggagcccgagagcgaggacatggagctgcccttggagggctatgtgcccgagggcctggagctggctgccctgcggccagagagccccgcgccagaggaacaggagtgccacaaccacagccccgatggggactccagctctgactacgtgaacaacacctctgaggaggaggactatgacgagggcctccctgaggaggaggagggcatcacctactacatccgctactgccctgaggacgacagctacctagagggcatggactgcaacggggaggagtacctggcccacagtgcacaccctgtggacactgatgagtgccaggaggcggtggaggagtggacggactcggcgggcccgcacccccacggccacgaggctgaaggcagccaggactacccagacggccaactgcccattccggaggatgagccctccgtccttgaggcccatgaccaggaagaagatggtcactactgtgccagcaaagagggctaccaggactactaccccgaggaggccaacgggaacaccggcgcctccccctaccgcctgaggcgtggggatggggacctggaggaccaggaggaggacattgaccagatcgtggcagagatcaagatgagtctgagcatgaccagcatcaccagcgccagtgaggccagccccgagcatgggcctgagccagggcctgaggactctgtagaggcctgcccacccatcaaggccagctgcagccccagcaggcacgaggcgaggcccaagtcgctgaacctccttcccgaggccaagcaccccggagacccccagagaggcttcaagcccaagaccaggaccccagaagagaggctgaagtggccccacgagcaggtttgcaatggtctggagcagccaaggaagcagcagcgctctgatctcaatggacctgttgacaataacaacattccagagacaaagaaggtggcatcatttccaagttttgtggctgttccagggccctgcgaaccagaagacctcatcgacgggatcatctttgctgccaattacctggggtccacccagctgctatcagaacggaacccttccaaaaacatcagaatgatgcaagcgcaggaggccgtcagccgggtcaagaggatgcaaaaggctgctaagatcaagaaaaaagcgaattctgagggggatgcccagacgctgacggaagtggacctcttcatttccacccagaggatcaaggttttaaatgcagacacgcaggaaaccatgatggaccacgccttgcgtaccatctcctacatcgccgacattgggaacattgtagtgctgatggccagacgccgcatgccccggtcagcctctcaggactgcatcgagaccacgcccggggcccaggaaggcaagaagcagtataagatgatctgccatgtgttcgagtcggaggatgcccagctcatcgcccagtctatcggccaggccttcagcgtggcctaccaggagttcctgcgagccaatggcatcaaccccgaagacttgagccagaaggaatacagcgacatcatcaacacccaggagatgtacaacgacgacctcatccacttctcaaactcggagaactgcaaggagctgcagctggagaagcacaagggcgagatcctgggcgtggtggtggtggagtcgggctggggctccatcctgcccacggtgatcctggccaacatgatgaatggcggcccggctgcccgctcggggaagctgagcatcggggaccagatcatgtccatcaatggcaccagcctggtggggctgcccctcgccacctgccaaggcatcatcaagggcctgaagaaccagacacaggtgaagctcaacattgtcagctgtcccccggtcaccacggtccttatcaagcggccagacctcaagtaccagctgggcttcagcgtgcagaatggaattatctgcagcctcatgagagggggcattgctgagcgagggggcgtccgtgtgggccaccgcatcatcgagatcaacgggcagagcgtggtggccacagcccacgagaagatagtccaagctctgtccaactcggtcggagagatccacatgaagaccatgcccgccgccatgttcaggctcctcacgggtcaggagaccccgctgtacatctaggccaccccagcctggccacgcagccaggacaccgggcagggccgcccgggcccagaggagctgggagccgggccgcagacttgaccccgacgccacagcccagccacggacgctggctccccaaagggtgtgccctcaccacccacttgatttttttcattttgccaaaaaggggtatgtctttatcaaaggagagtcacagaacaaatgtttgtttgtaaagcgttccaagtattttgccacgttctggactgtcttctccctgcacaagccagggtgtgtctcggtagctgtgcgtggtgtggagtgtgtgtctttcctccctgaagctgtgcggagcgaactggcgcctccgagggacgcggctcccggggcagggcagccgtcacccctgcctcccgcccccttggctgggacgtctggggtcctgtggggcccccacaatggtcccaaacagctgcctctgccactgactgcagggacacgggcagcctggctcccaggacacgacttgtaatgaaagtttggggacatgtgattgattgattgattgtaaataaaggatgatggccacaacatgaaaactccatatttatttagatgctattattactgtttggacttttattttggcaggcttttttccagactctagggttttccaatgtgactaatgaccacacctgcctctcccgtcgtctcttctgggcaccctcccacccggctgcatacccgggcagggctcccacagagacaaggagggcacaggtgtctgccccctctttaaaatcgatctacacacatccacgcacatgcgaccccgaggaaacgaaacccactctagaaaacgcgaccttggccgcacctaaagcagccagccgtgagtgcagaccccttggccagcgtggcgcagtggccctgagcagtagtggcatgtgtgtagatcaagtcggatctagtccagctcggttcattagcgatccatgtaatctgacgtcatcttgtctcgaagtctctttttttggcccaggccttgaagaatacactgtgacttaagaagccttaccacgcagtaactaaagctttaggatgactgtattcgaggagtgccgtgtgttgcatgcagctacccgtaggaagacttcgcgcatatcactaataaacctgaagtcgtgatg

SEQ ID NO: 1834 - DNA, 3599 bp, Homo sapiens
  source 1..3599: mol_type = unassigned DNA
cagtctcctgaatatttacgcgttgctgaatctcctgtggacaaaccaccaataggccaggactgtcctgtggacagacggggtgagcctcttcttgtgtctggagattctgaaaagatttgatcaccaggagatttttcgggacattaccaaaccactcattttagtggctgcctccgggtgatgatggctgtgtgaacgactgccatggcccaccggaagcttgagagcgtggggagcggcatgttggaccatagggtgagaccaggtcctgtccctcacagccaggagcccgagagcgaggacatggagctgcccttggagggctatgtgcccgagggcctggagctggctgccctgcggccagagagccccgcgccagaggaacaggagtgccacaaccacagccccgatggggactccagctctgactacgtgaacaacacctctgaggaggaggactatgacgagggcctccctgaggaggaggagggcatcacctactacatccgctactgccctgaggacgacagctacctagagggcatggactgcaacggggaggagtacctggcccacagtgcacaccctgtggacactgatgagtgccaggaggcggtggaggagtggacggactcggcgggcccgcacccccacggccacgaggctgaaggcagccaggactacccagacggccaactgcccattccggaggatgagccctccgtccttgaggcccatgaccaggaagaagatggtcactactgtgccagcaaagagggctaccaggactactaccccgaggaggccaacgggaacaccggcgcctccccctaccgcctgaggcgtggggatggggacctggaggaccaggaggaggacattgaccagatcgtggcagagatcaagatgagtctgagcatgaccagcatcaccagcgccagtgaggccagccccgagcatgggcctgagccagggcctgaggactctgtagaggcctgcccacccatcaaggccagctgcagccccagcaggcacgaggcgaggcccaagtcgctgaacctccttcccgaggccaagcaccccggagacccccagagaggcttcaagcccaagaccaggaccccagaagagaggctgaagtggccccacgagcaggtttgcaatggtctggagcagccaaggaagcagcagcgctctgatctcaatggacctgttgacaataacaacattccagagacaaagaaggtggcatcatttccaagttttgtggctgttccagggccctgcgaaccagaagacctcatcgacgggatcatctttgctgccaattacctggggtccacccagctgctatcagaacggaacccttccaaaaacatcagaatgatgcaagcgcaggaggccgtcagccgggtcaagaattctgagggggatgcccagacgctgacggaagtggacctcttcatttccacccagaggatcaaggttttaaatgcagacacgcaggaaaccatgatggaccacgccttgcgtaccatctcctacatcgccgacattgggaacattgtagtgctgatggccagacgccgcatgccccggtcagcctctcaggactgcatcgagaccacgcccggggcccaggaaggcaagaagcagtataagatgatctgccatgtgttcgagtcggaggatgcccagctcatcgcccagtctatcggccaggccttcagcgtggcctaccaggagttcctgcgagccaatggcatcaaccccgaagacttgagccagaaggaatacagcgacatcatcaacacccaggagatgtacaacgacgacctcatccacttctcaaactcggagaactgcaaggagctgcagctggagaagcacaagggcgagatcctgggcgtggtggtggtggagtcgggctggggctccatcctgcccacggtgatcctggccaacatgatgaatggcggcccggctgcccgctcggggaagctgagcatcggggaccagatcatgtccatcaatggcaccagcctggtggggctgcccctcgccacctgccaaggcatcatcaagggcctgaagaaccagacacaggtgaagctcaacattgtcagctgtcccccggtcaccacggtccttatcaagcggccagacctcaagtaccagctgggcttcagcgtgcagaatggaattatctgcagcctcatgagagggggcattgctgagcgagggggcgtccgtgtgggccaccgcatcatcgagatcaacgggcagagcgtggtggccacagcccacgagaagatagtccaagctctgtccaactcggtcggagagatccacatgaagaccatgcccgccgccatgttcaggctcctcacgggtcaggagaccccgctgtacatctaggccaccccagcctggccacgcagccaggacaccgggcagggccgcccgggcccagaggagctgggagccgggccgcagacttgaccccgacgccacagcccagccacggacgctggctccccaaagggtgtgccctcaccacccacttgatttttttcattttgccaaaaaggggtatgtctttatcaaaggagagtcacagaacaaatgtttgtttgtaaagcgttccaagtattttgccacgttctggactgtcttctccctgcacaagccagggtgtgtctcggtagctgtgcgtggtgtggagtgtgtgtctttcctccctgaagctgtgcggagcgaactggcgcctccgagggacgcggctcccggggcagggcagccgtcacccctgcctcccgcccccttggctgggacgtctggggtcctgtggggcccccacaatggtcccaaacagctgcctctgccactgactgcagggacacgggcagcctggctcccaggacacgacttgtaatgaaagtttggggacatgtgattgattgattgattgtaaataaaggatgatggccacaacatgaaaactccatatttatttagatgctattattactgtttggacttttattttggcaggcttttttccagactctagggttttccaatgtgactaatgaccacacctgcctctcccgtcgtctcttctgggcaccctcccacccggctgcatacccgggcagggctcccacagagacaaggagggcacaggtgtctgccccctctttaaaatcgatctacacacatccacgcacatgcgaccccgaggaaacgaaacccactctagaaaacgcgaccttggccgcacctaaagcagccagccgtgagtgcagaccccttggccagcgtggcgcagtggccctgagcagtagtggcatgtgtgtagatcaagtcggatctagtccagctcggttcattagcgatccatgtaatctgacgtcatcttgtctcgaagtctctttttttggcccaggccttgaagaatacactgtgacttaagaagccttaccacgcagtaactaaagctttaggatgactgtattcgaggagtgccgtgtgttgcatgcagctacccgtaggaagacttcgcgcatatcactaataaacctgaagtcgtgatg

SEQ ID NO: 1835 - DNA, 554 bp, Homo sapiens
  source 1..554: mol_type = unassigned DNA
cagctcagccccactgcaaggagctcctgggtttatttaagtgagcctcagataactttacataaaagcaaatgtgtaaaaagcgataaagtcagatatattgaacatttgtcctgagggcaaatttctgagctctaaaagccagtttggttttagataacatctgtgagtctggaaacaggctgagatactctatatctgcactcccaactctgcctttggctttgtgagccctgtggtctccttgaaagaattggtccccagtgggtgaactaatcacccatgaagagtctcccaattcaaatctggaataaaaagtgaggacatgggggcagaatgttactcatcacatgtggcccgtcagtactagacttcaagaaagatttgatcaccaggagatttttcgggacattaccaaaccactcattttagtggctgcctccgggtgatgatggctgtgtgaacgactgccatggcccaccggaagcttgagagcgtggggagcggcatgttggaccatagggtgagaccaggtcctgtccctcacagccagg

SEQ ID NO: 1836 - DNA, 3635 bp, Homo sapiens; identical to SEQ ID NO: 1833
  source 1..3635: mol_type = unassigned DNA

SEQ ID NO: 1837 - DNA, 3349 bp, Homo sapiens
  source 1..3349: mol_type = unassigned DNA
gcccggcagccgcaggccggtgcgggatgcgccccgcagccgcgccgcgtgcgcccggcagaggcggccctgcgtgccgtacgctgcgtccggggcgcgcccgccgctattcgggaagctattcagcttcccgggctcattagcagtcgcggtgtgcggctcggcgcgggctcacaaagagctcggcctcgcggactgagccggcggcagcggggcggggacggcggcgtacccgggcagcccagcgccctggccaggcggagggagctgttcatcctctgggggctgctgggccagaaatatctcttacctgataatgtcaggcatcagaggttcctgtttcgtggtctcctgaatatttacgcgttgctgaatctcctgtggacaaaccaccaataggccaggactgtcctgtggacagacggggtgagcctcttcttgtgtctggagattctgaaaagatttgatcaccaggagatttttcgggacattaccaaaccactcattttagtggctgcctccgggtgatgatggctgtgtgaacgactgccatggcccaccggaagcttgagagcgtggggagcggcatgttggaccatagggtgagaccaggtcctgtccctcacagccaggagcccgagagcgaggacatggagctgcccttggagggctatgtgcccgagggcctggagctggctgccctgcggccagagagccccgcgccagaggaacaggagtgccacaaccacagccccgatggggactccagctctgactacgtgaacaacacctctgaggaggaggactatgacgagggcctccctgaggaggaggagggcatcacctactacatccgctactgccctgaggacgacagctacctagagggcatggactgcaacggggaggagtacctggcccacagtgcacaccctgtggacactgatgagtgccaggaggcggtggaggagtggacggactcggcgggcccgcacccccacggccacgaggctgaaggcagccaggactacccagacggccaactgcccattccggaggatgagccctccgtccttgaggcccatgaccaggaagaagatggtcactactgtgccagcaaagagggctaccaggactactaccccgaggaggccaacgggaacaccggcgcctccccctaccgcctgaggcgtggggatggggacctggaggaccaggaggaggacattgaccagatcgtggcagagatcaagatgagtctgagcatgaccagcatcaccagcgccagtgaggccagccccgagcatgggcctgagccagggcctgaggactctgtagaggcctgcccacccatcaaggccagctgcagccccagcaggcacgaggcgaggcccaagtcgctgaacctccttcccgaggccaagcaccccggagacccccagagaggcttcaagcccaagaccaggaccccagaagagaggctgaagtggccccacgagcaggtttgcaatggtctggagcagccaaggaagcagcagcgctctgatctcaatggacctgttgacaataacaacattccagagacaaagaaggtggcatcatttccaagttttgtggctgttccagggccctgcgaaccagaagacctcatcgacgggatcatctttgctgccaattacctggggtccacccagctgctatcagaacggaacccttccaaaaacatcagaatgatgcaagcgcaggaggccgtcagccgggtcaagaattctgagggggatgcccagacgctgacggaagtggacctcttcatttccacccagaggatcaaggttttaaatgcagacacgcaggaaaccatgatggaccacgccttgcgtaccatctcctacatcgccgacattgggaacattgtagtgctgatggccagacgccgcatgccccggtcagcctctcaggactgcatcgagaccacgcccggggcccaggaaggcaagaagcagtataagatgatctgccatgtgttcgagtcggaggatgcccagctcatcgcccagtctatcggccaggccttcagcgtggcctaccaggagttcctgcgagccaatggcatcaaccccgaagacttgagccagaaggaatacagcgacatcatcaacacccaggagatgtacaacgacgacctcatccacttctcaaactcggagaactgcaaggagctgcagctggagaagcacaagggcgagatcctgggcgtggtggtggtggagtcgggctggggctccatcctgcccacggtgatcctggccaacatgatgaatggcggcccggctgcccgctcggggaagctgagcatcggggaccagatcatgtccatcaatggcaccagcctggtggggctgcccctcgccacctgccaaggcatcatcaagggcctgaagaaccagacacaggtgaagctcaacattgtcagctgtcccccggtcaccacggtccttatcaagcggccagacctcaagtaccagctgggcttcagcgtgcagaatggaattatctgcagcctcatgagagggggcattgctgagcgagggggcgtccgtgtgggccaccgcatcatcgagatcaacgggcagagcgtggtggccacagcccacgagaagatagtccaagctctgtccaactcggtcggagagatccacatgaagaccatgcccgccgccatgttcaggctcctcacgggtcaggagaccccgctgtacatctaggccaccccagcctggccacgcagccaggacaccgggcagggccgcccgggcccagaggagctgggagccgggccgcagacttgaccccgacgccacagcccagccacggacgctggctccccaaagggtgtgccctcaccacccacttgatttttttcattttgccaaaaaggggtatgtctttatcaaaggagagtcacagaacaaatgtttgtttgtaaagcgttccaagtattttgccacgttctggactgtcttctccctgcacaagccagggtgtgtctcggtagctgtgcgtggtgtggagtgtgtgtctttcctccctgaagctgtgcggagcgaactggcgcctccgagggacgcggctcccggggcagggcagccgtcacccctgcctcccgcccccttggctgggacgtctggggtcctgtggggcccccacaatggtcccaaacagctgcctctgccactgactgcagggacacgggcagcctggctcccaggacacgacttgtaatgaaagtttggggacatgtgattgattgattgattgtaaataaaggatgatggccacaacatgaaaa

SEQ ID NO: 1838 - DNA, 936 bp, Homo sapiens
  source 1..936: mol_type = unassigned DNA
agtggtgagcacggtgtcgggggccgcattagctattgatttatgtgctgttatagaattaattgagtctggacatggagactcattttcttggacatgtagcagtggctgcctccgggtgatgatggctgtgtgaacgactgccatggcccaccggaagcttgagagcgtggggagcggcatgttggaccatagggtgagaccaggtcctgtccctcacagccaggagcccgagagcgaggacatggagctgcccttggagggctatgtgcccgagggcctggagctggctgccctgcggccagagagccccgcgccagaggaacaggagtgccacaaccacagccccgatggggactccagctctgactacgtgaacaacacctctgaggaggaggactatgacgagggcctccctgaggaggaggagggcatcacctactacatccgctactgccctgaggacgacagctacctagagggcatggactgcaacggggaggagtacctggcccacagtgcacaccctgtggacactgatgagtgccaggaggcggtggaggagtggacggactcggcgggcccgcacccccacggccacgaggctgaaggcagccaggactacccagacggccaactgcccattccggaggatgagccctccgtccttgaggcccatgaccaggaagaagatggtcactactgtgccagcaaagagggctaccaggactactaccccgaggaggccaacgggaacaccggcgcctccccctaccgcctgaggcgtggggatggggacctggaggaccaggaggaggacattgaccagatcgtggcagagatcaagatgagtctgagcatgaccagcatcaccagcgccagtgaggccagccccgagcatgggcctgagccagggcctgaggactctgtagaggc

SEQ ID NO: 1839 - DNA, 4031 bp, Homo sapiens
  source 1..4031: mol_type = unassigned DNA
agtgtgcccggcgcgggtgaggcggaagcggccggggcgggggcgcaggcccggcagccgcaggccggtgcgggatgcgccccgcagccgcgccgcgtgcgcccggcagaggcggccctgcgtgccgtacgctgcgtccggggcgcgcccgccgctattcgggaagctattcagcttcccgggctcattagcagtcgcggtgtgcggctcggcgcgggctcacaaagagctcggcctcgcggactgagccggcggcagcggggcggggacggcggcgtacccgggcagcccagcgccctggccaggcggagggagctgttcatcctctgggggctgctgggccagaaatatctcttacctgataatgtcaggcatcagaggttcctgtttcgtggtctcctgaatatttacgcgttgctgaatctcctgtggacaaaccaccaataggccaggactgtcctgtggacagacggggtgagcctcttcttgtgtctggagattctgaaaagatttgatcaccaggagatttttcgggacattaccaaaccactcattttagtggctgcctccgggtgatgatggctgtgtgaacgactgccatggcccaccggaagcttgagagcgtggggagcggcatgttggaccatagggtgagaccaggtcctgtccctcacagccaggagcccgagagcgaggacatggagctgcccttggagggctatgtgcccgagggcctggagctggctgccctgcggccagagagccccgcgccagaggaacaggagtgccacaaccacagccccgatggggactccagctctgactacgtgaacaacacctctgaggaggaggactatgacgagggcctccctgaggaggaggagggcatcacctactacatccgctactgccctgaggacgacagctacctagagggcatggactgcaacggggaggagtacctggcccacagtgcacaccctgtggacactgatgagtgccaggaggcggtggaggagtggacggactcggcgggcccgcacccccacggccacgaggctgaaggcagccaggactacccagacggccaactgcccattccggaggatgagccctccgtccttgaggcccatgaccaggaagaagatggtcactactgtgccagcaaagagggctaccaggactactaccccgaggaggccaacgggaacaccggcgcctccccctaccgcctgaggcgtggggatggggacctggaggaccaggaggaggacattgaccagatcgtggcagagatcaagatgagtctgagcatgaccagcatcaccagcgccagtgaggccagccccgagcatgggcctgagccagggcctgaggactctgtagaggcctgcccacccatcaaggccagctgcagccccagcaggcacgaggcgaggcccaagtcgctgaacctccttcccgaggccaagcaccccggagacccccagagaggcttcaagcccaagaccaggaccccagaagagaggctgaagtggccccacgagcaggtttgcaatggtctggagcagccaaggaagcagcagcgctctgatctcaatggacctgttgacaataacaacattccagagacaaagaaggtggcatcatttccaagttttgtggctgttccagggccctgcgaaccagaagacctcatcgacgggatcatctttgctgccaattacctggggtccacccagctgctatcagaacggaacccttccaaaaacatcagaatgatgcaagcgcaggaggccgtcagccgggtcaagaggatgcaaaaggctgctaagatcaagaaaaaagcgaattctgagggggatgcccagacgctgacggaagtggacctcttcatttccacccagaggatcaaggttttaaatgcagacacgcaggaaaccatgatggaccacgccttgcgtaccatctcctacatcgccgacattgggaacattgtagtgctgatggccagacgccgcatgccccggtcagcctctcaggactgcatcgagaccacgcccggggcccaggaaggcaagaagcagtataagatgatctgccatgtgttcgagtcggaggatgcccagctcatcgcccagtctatcggccaggccttcagcgtggcctaccaggagttcctgcgagccaatggcatcaaccccgaagacttgagccagaaggaatacagcgacatcatcaacacccaggagatgtacaacgacgacctcatccacttctcaaactcggagaactgcaaggagctgcagctggagaagcacaagggcgagatcctgggcgtggtggtggtggagtcgggctggggctccatcctgcccacggtgatcctggccaacatgatgaatggcggcccggctgcccgctcggggaagctgagcatcggggaccagatcatgtccatcaatggcaccagcctggtggggctgcccctcgccacctgccaaggcatcatcaagggcctgaagaaccagacacaggtgaagctcaacattgtcagctgtcccccggtcaccacggtccttatcaagcggccagacctcaagtaccagctgggcttcagcgtgcagaatggaattatctgcagcctcatgagagggggcattgctgagcgagggggcgtccgtgtgggccaccgcatcatcgagatcaacgggcagagcgtggtggccacagcccacgagaagatagtccaagctctgtccaactcggtcggagagatccacatgaagaccatgcccgccgccatgttcaggctcctcacgggtcaggagaccccgctgtacatctaggccaccccagcctggccacgcagccaggacaccgggcagggccgcccgggcccagaggagctgggagccgggccgcagacttgaccccgacgccacagcccagccacggacgctggctccccaaagggtgtgccctcaccacccacttgatttttttcattttgccaaaaaggggtatgtctttatcaaaggagagtcacagaacaaatgtttgtttgtaaagcgttccaagtattttgccacgttctggactgtcttctccctgcacaagccagggtgtgtctcggtagctgtgcgtggtgtggagtgtgtgtctttcctccctgaagctgtgcggagcgaactggcgcctccgagggacgcggctcccggggcagggcagccgtcacccctgcctcccgcccccttggctgggacgtctggggtcctgtggggcccccacaatggtcccaaacagctgcctctgccactgactgcagggacacgggcagcctggctcccaggacacgacttgtaatgaaagtttggggacatgtgattgattgattgattgtaaataaaggatgatggccacaacatgaaaactccatatttatttagatgctattattactgtttggacttttattttggcaggcttttttccagactctagggttttccaatgtgactaatgaccacacctgcctctcccgtcgtctcttctgggcaccctcccacccggctgcatacccgggcagggctcccacagagacaaggagggcacaggtgtctgccccctctttaaaatcgatctacacacatccacgcacatgcgaccccgaggaaacgaaacccactctagaaaacgcgaccttggccgcacctaaagcagccagccgtgagtgcagaccccttggccagcgtggcgcagtggccctgagcagtagtggcatgtgtgtagatcaagtcggatctagtccagctcggttcattagcgatccatgtaatctgacgtcatcttgtctcgaagtctctttttttggcccaggccttgaagaatacactgtgacttaagaagccttaccacgcagtaactaaagctttaggatgactgtattcgaggagtgccgtgtgttgcatgcagctacccgtaggaagacttcgcgcatatcactaataaacctgaagtcgtgatgaaaa

SEQ ID NO: 1840 - DNA, 535 bp, Homo sapiens
  source 1..535: mol_type = unassigned DNA
aacaaccgctgacttcctggttcctgggtgccgcatcactgcccctctgctccgggtcaaaccggctgtatgcttagcttcaggaacatgtggcaggtggcagcccccggccccgtggcagtctcctgaatatttacgcgttgctgaatctcctgtggacaaaccaccaataggccaggactgtcctgtggacagacggggtgagcctcttcttgtgtctggagattctgaaaagatttgatcaccaggagatttttcgggacattaccaaaccactcattttagtggctgcctccgggtgatgatggctgtgtgaacgactgccatggcccaccggaagcttgagagcgtggggagcggcatgttggaccatagggtgagaccaggtcctgtccctcacagccaggagcccgagagcgaggacatggagctgcccttggagggctatgtgcccgagggcctggagctggctgccctgcggccagagagccccgcgccagaggaacaggagtgccacaaccacagccccgatggg

SEQ ID NO: 1841 - DNA, 594 bp, Homo sapiens
  source 1..594: mol_type = unassigned DNA
agcagtcgcggtgtgcggctcggcgcgggctcacaaagagctcggcctcgcggactgagccggcggcagcggggcggggacggcggcgtacccgggcagcccagcgccctggccaggcgtgcctgtgcttaatcagcactgacgactggtgctgcttcagttgatttgatacacctagaggcagcctcatctccaacttgccttgacttcgtctggggagctgccgtgggggacccctggactggcagcattcccacccctcactttggcaaccctggtctaactccgcggagggagctgttcatcctctgggggctgctgggccagaaatatctcttacctgataatgtcaggcatcagaggttcctgtttcgtggtctcctgaatatttacgcgttgctgaatctcctgtggacaaaccaccaataggccaggactgtcctgtggacagacggggtgagcctcttcttgtgtctggagattctgaaaagatttgatcaccaggagatttttcgggacattaccaaaccactcattttagtggctgcctccgggtgatgatggctgtgtgaacgactgccatggcccaccgga

SEQ ID NO: 1842 - DNA, 711 bp, Homo sapiens
  source 1..711: mol_type = unassigned DNA
gcagatgagggcctgcttgggtctggggcgtcagtggggattggctgcaggcagccatgaggagccttcagggtgatgagggttctaaaagtgcgtcgtgtgcctgagccactgcgacattcactagaagtcctccgtgctgacggagggtgaactgtgtggggcccaagttctatctcaggaaagccagggaagccactcagttcagctttgtgaaaatcaagggagtcttcttggaggaagtggactctgagctggatgtgaatgacggagtgtctttgaaagatttgatcaccaggagatttttcgggacattaccaaaccactcattttagtggctgcctccgggtgatgatggctgtgtgaacgactgccatggcccaccggaagcttgagagcgtggggagcggcatgttggaccatagggtgagaccaggtcctgtccctcacagccaggagcccgagagcgaggacatggagctgcccttggagggctatgtgcccgagggcctggagctggctgccctgcggccagagagccccgcgccagaggaacaggagtgccacaaccacagccccgatggggactccagctctgactacgtgaacaacacctctgaggaggaggactatgacgagggcctccctgaggaggaggagggcatcacctactacatccgctactgccctgaggacgacagctacctagag

SEQ ID NO: 1843 - DNA, 3138 bp, Homo sapiens
  source 1..3138: mol_type = unassigned DNA
acataacagtaaggcaagaagatgactgcatttatcttctcagaatcacttcttcttaattgttgcttcccactattggcattggtgaaaggctgggccacaggaggctggatgaactttgtgttagccagtctcctgaatatttacgcgttgctgaatctcctgtggacaaaccaccaataggccaggactgtcctgtggacagacgggaaagatttgatcaccaggagatttttcgggacattaccaaaccactcattttagtggctgcctccgggtgatgatggctgtgtgaacgactgccatggcccaccggaagcttgagagcgtggggagcggcatgttggaccatagggtgagaccaggtcctgtccctcacagccaggagcccgagagcgaggacatggagctgcccttggagggctatgtgcccgagggcctggagctggctgccctgcggccagagagccccgcgccagaggaacaggagtgccacaaccacagccccgatggggactccagctctgactacgtgaacaacacctctgaggaggaggactatgacgagggcctccctgaggaggaggagggcatcacctactacatccgctactgccctgaggacgacagctacctagagggcatggactgcaacggggaggagtacctggcccacagtgcacaccctgtggacactgatgagtgccaggaggcggtggaggagtggacggactcggcgggcccgcacccccacggccacgaggctgaaggcagccaggactacccagacggccaactgcccattccggaggatgagccctccgtccttgaggcccatgaccaggaagaagatggtcactactgtgccagcaaagagggctaccaggactactaccccgaggaggccaacgggaacaccggcgcctccccctaccgcctgaggcgtggggatggggacctggaggaccaggaggaggacattgaccagatcgtggcagagatcaagatgagtctgagcatgaccagcatcaccagcgccagtgaggccagccccgagcatgggcctgagccagggcctgaggactctgtagaggcctgcccacccatcaaggccagctgcagccccagcaggcacgaggcgaggcccaagtcgctgaacctccttcccgaggccaagcaccccggagacccccagagaggcttcaagcccaagaccaggaccccagaagagaggctgaagtggccccacgagcaggtttgcaatggtctggagcagccaaggaagcagcagcgctctgatctcaatggacctgttgacaataacaacattccagagacaaagaaggtggcatcatttccaagttttgtggctgttccagggccctgcgaaccagaagacctcatcgacgggatcatctttgctgccaattacctggggtccacccagctgctatcagaacggaacccttccaaaaacatcagaatgatgcaagcgcaggaggccgtcagccgggtcaagaggatgcaaaaggctgctaagatcaagaaaaaagcgaattctgagggggatgcccagacgctgacggaagtggacctcttcatttccacccagaggatcaaggttttaaatgcagacacgcaggaaaccatgatggaccacgccttgcgtaccatctcctacatcgccgacattgggaacattgtagtgctgatggccagacgccgcatgccccggtcagcctctcaggactgcatcgagaccacgcccggggcccaggaaggcaagaagcagtataagatgatctgccatgtgttcgagtcggaggatgcccagctcatcgcccagtctatcggccaggccttcagcgtggcctaccaggagttcctgcgagccaatggcatcaaccccgaagacttgagccagaaggaatacagcgacatcatcaacacccaggagatgtacaacgacgacctcatccacttctcaaactcggagaactgcaaggagctgcagctggagaagcacaagggcgagatcctgggcgtggtggtggtggagtcgggctggggctccatcctgcccacggtgatcctggccaacatgatgaatggcggcccggctgcccgctcggggaagctgagcatcggggaccagatcatgtccatcaatggcaccagcctggtggggctgcccctcgccacctgccaaggcatcatcaagggcctgaagaaccagacacaggtgaagctcaacattgtcagctgtcccccggtcaccacggtccttatcaagcggccagacctcaagtaccagctgggcttcagcgtgcagaatggaattatctgcagcctcatgagagggggcattgctgagcgagggggcgtccgtgtgggccaccgcatcatcgagatcaacgggcagagcgtggtggccacagcccacgagaagatagtccaagctctgtccaactcggtcggagagatccacatgaagaccatgcccgccgccatgttcaggctcctcacgggtcaggagaccccgctgtacatctaggccaccccagcctggccacgcagccaggacaccgggcagggccgcccgggcccagaggagctgggagccgggccgcagacttgaccccgacgccacagcccagccacggacgctggctccccaaagggtgtgccctcaccacccacttgatttttttcattttgccaaaaaggggtatgtctttatcaaaggagagtcacagaacaaatgtttgtttgtaaagcgttccaagtattttgccacgttctggactgtcttctccctgcacaagccagggtgtgtctcggtagctgtgcgtggtgtggagtgtgtgtctttcctccctgaagctgtgcggagcgaactggcgcctccgagggacgcggctcccggggcagggcagccgtcacccctgcctcccgcccccttggctgggacgtctggggtcctgtggggcccccacaatggtcccaaacagctgcctctgccactgactgcagggacacgggcagcctggctcccaggacacgacttgtaatgaaagtttggggacatgtgattgattgattgattgtaaataaaggatgatggccacaacatgaaaa

SEQ ID NO: 1844 - DNA, 2636 bp, Homo sapiens
  source 1..2636: mol_type = unassigned DNA
atgttgtgatggagaagccgcggcggagcccgaaccccgcagcctgagccacctccgtcatctgggcccggggcctcaccgcgcaggagctgccaaggccatgtctgttccatcatcactgagccagtcggccattaatgccaacagccacggaggccccgcactgagcctacccctgcctctgcacgctgcccacaaccagctgctcaacgccaagctgcaggccacagctgtgggacccaaggacctgcgcagcgccatgggggagggtggtgggcctgagccaggccctgccaatgccaagtggctaaaagagggccagaaccagctccggcgggccgccacggcccaccgtgaccagaatcgcaatgtgaccttgaccttggcggaggaggccagccaggagcctgagatggcacccttgggccccaaaggcctgatacacctgtactctgagctggagctctcagctcacaacgcagccaaccgaggcctacgaggacctggcctgatcatcagcactcaagagcaggggccagatgagggagaggagaaggcggccggggaggccgaggaggaggaggaggatgatgatgatgaagaggaggaggaggacttatcttctcccccagggctgcctgagcccctggagagtgtggaggcccctcccaggccccaagcccttacagatggcccccgggaacacagcaagagtgccagcctcctgtttggcatgcggaacagtgcagccagtgatgaggactcaagctgggctaccttatcccagggcagcccctcctatggctccccagaggacacagattccttctggaaccccaacgccttcgagacggattccgacctgccggctggatggatgagggtccaggacacctcagggacctattactggcacatcccaacagggaccacccagtgggaaccccccggccgggcctccccctcacaggggagcagcccccaagaggagtcccagctcacctggacaggttttgctcatggagaaggctttgaggatggagaattttggaaggatgaacccagtgatgaggccccaatggagctgggactgaaggaacctgaggaggggacgttgaccttcccagctcagagcctcagcccagagccgttgccccaagaggaggagaagcttcccccacggaataccaacccagggatcaagtgtttcgccgtgcgctccctaggctgggtagagatgaccgaggaggagctggcccctggacgcagcagtgtggcagtcaacaattgcatccgtcagctctcttaccacaaaaacaacctgcatgaccccatgtctgggggctggggggaaggaaaggatctgctactgcagctggaggatgagacactaaagctagtggagccacagagccaggcactgctgcacgcccaacccatcatcagcatccgcgtgtggggcgtcgggcgggacagtggaagggactttgcctacgtagctcgtgataagctgacccagatgctcaagtgccacgtgtttcgctgtgaggcacctgccaagaacatcgccaccagcctgcatgagatctgctctaagatcatggccgaacggcgtaatgcccgctgcttggtaaatggactctccctggaccactctaaacttgtggatgtccctttccaagtggaattcccagcgcctaagaatgagttggtccagaagttccaagtctattacctggggaatgtacctgttgctaaacctgttggggtagatgtgattaatggggccctcgagtcagtcctgtcctccagcagccgtgaacaatggaccccaagtcatgtcagtgtggcccctgctaccctcaccatcttgcaccagcagacagaggcagtgctgggagagtgtcgggtgcgtttcctctccttcctggccgtgggcagagatgtccacacgtttgcattcatcatggctgccggcccagcctccttctgctgccacatgttctggtgcgagcccaatgctgccagcctctcagaggctgtgcaggctgcgtgcatgcttcgctaccagaagtgtctggatgcccgttcccaggcctccacctcctgcctcccagcaccccctgctgagtctgtggcacggcgtgtagggtggactgtccgcaggggtgttcagtcgctgtggggctccctgaagcccaaacggctgggggcccataccccatgaagaagcccccaccttccctccacctgcttgtgttgggccccagggaactaaagggtgtgggtcagggaggggtctagaggctattcctaggcctcaggcctcccaaatatgcccctccccagtagctacggttccctgcctaggagctggggagggagagatctaatcccttcaaggaagtgataacactggagtggtaacaagaggagcaggaagcaaggccagccctggttctccatccccatgtgtttcaggtggaacaggaggaactggtccaggccaggcctcatcctcctggacccagcaggggcagaaggaggaagggactggtccaggcatgggtcccttccccctgctccatgggcacctctgctgtattgatatcactaataaagtctgtctgcactgc

SEQ ID NO: 1845 - DNA, 2619 bp, Homo sapiens
  source 1..2619: mol_type = unassigned DNA
tcgggctccagccccgtccgcgcgtctcccggcgtgggtgcgggaccagggcgctgcggggcgcgcagggagctgccaaggccatgtctgttccatcatcactgagccagtcggccattaatgccaacagccacggaggccccgcactgagcctacccctgcctctgcacgctgcccacaaccagctgctcaacgccaagctgcaggccacagctgtgggacccaaggacctgcgcagcgccatgggggagggtggtgggcctgagccaggccctgccaatgccaagtggctaaaagagggccagaaccagctccggcgggccgccacggcccaccgtgaccagaatcgcaatgtgaccttgaccttggcggaggaggccagccaggagcctgagatggcacccttgggccccaaaggcctgatacacctgtactctgagctggagctctcagctcacaacgcagccaaccgaggcctacgaggacctggcctgatcatcagcactcaagagcaggggccagatgagggagaggagaaggcggccggggaggccgaggaggaggaggaggatgatgatgatgaagaggaggaggaggacttatcttctcccccagggctgcctgagcccctggagagtgtggaggcccctcccaggccccaagcccttacagatggcccccgggaacacagcaagagtgccagcctcctgtttggcatgcggaacagtgcagccagtgatgaggactcaagctgggctaccttatcccagggcagcccctcctatggctccccagaggacacagattccttctggaaccccaacgccttcgagacggattccgacctgccggctggatggatgagggtccaggacacctcagggacctattactggcacatcccaacagggaccacccagtgggaaccccccggccgggcctccccctcacaggggagcagcccccaagaggagtcccagctcacctggacaggttttgctcatggagaaggctttgaggatggagaattttggaaggatgaacccagtgatgaggccccaatggagctgggactgaaggaacctgaggaggggacgttgaccttcccagctcagagcctcagcccagagccgttgccccaagaggaggagaagcttcccccacggaataccaacccagggatcaagtgtttcgccgtgcgctccctaggctgggtagagatgaccgaggaggagctggcccctggacgcagcagtgtggcagtcaacaattgcatccgtcagctctcttaccacaaaaacaacctgcatgaccccatgtctgggggctggggggaaggaaaggatctgctactgcagctggaggatgagacactaaagctagtggagccacagagccaggcactgctgcacgcccaacccatcatcagcatccgcgtgtggggcgtcgggcgggacagtggaagggactttgcctacgtagctcgtgataagctgacccagatgctcaagtgccacgtgtttcgctgtgaggcacctgccaagaacatcgccaccagcctgcatgagatctgctctaagatcatggccgaacggcgtaatgcccgctgcttggtaaatggactctccctggaccactctaaacttgtggatgtccctttccaagtggaattcccagcgcctaagaatgagttggtccagaagttccaagtctattacctggggaatgtacctgttgctaaacctgttggggtagatgtgattaatggggccctcgagtcagtcctgtcctccagcagccgtgaacaatggaccccaagtcatgtcagtgtggcccctgctaccctcaccatcttgcaccagcagacagaggcagtgctgggagagtgtcgggtgcgtttcctctccttcctggccgtgggcagagatgtccacacgtttgcattcatcatggctgccggcccagcctccttctgctgccacatgttctggtgcgagcccaatgctgccagcctctcagaggctgtgcaggctgcgtgcatgcttcgctaccagaagtgtctggatgcccgttcccaggcctccacctcctgcctcccagcaccccctgctgagtctgtggcacggcgtgtagggtggactgtccgcaggggtgttcagtcgctgtggggctccctgaagcccaaacggctgggggcccataccccatgaagaagcccccaccttccctccacctgcttgtgttgggccccagggaactaaagggtgtgggtcagggaggggtctagaggctattcctaggcctcaggcctcccaaatatgcccctccccagtagctacggttccctgcctaggagctggggagggagagatctaatcccttcaaggaagtgataacactggagtggtaacaagaggagcaggaagcaaggccagccctggttctccatccccatgtgtttcaggtggaacaggaggaactggtccaggccaggcctcatcctcctggacccagcaggggcagaaggaggaagggactggtccaggcatgggtcccttccccctgctccatgggcacctctgctgtattgatatcactaataaagtctgtctgcactgc

SEQ ID NO: 1846 - DNA, 2642 bp, Homo sapiens
  source 1..2642: mol_type = unassigned DNA
atgttgtgatggagaagccgcggcggagcccgaaccccgcagcctgagccacctccgtcatctgggcccggggcctcaccgcgcaggagctgccaaggccatgtctgttccatcatcactgagccagtcggccattaatgccaacagccacggaggccccgcactgagcctacccctgcctctgcacgctgcccacaaccagctgctcaacgccaagctgcaggccacagctgtgggacccaaggacctgcgcagcgccatgggggagggtggtgggcctgagccaggccctgccaatgccaagtggctaaaagagggccagaaccagctccggcgggccgccacggcccaccgtgaccagaatcgcaatgtgaccttgaccttggcggaggaggccagccaggagcctgagatggcacccttgggccccaaaggcctgatacacctgtactctgagctggagctctcagctcacaacgcagccaaccgaggcctacgaggacctggcctgatcatcagcactcaagagcaggggccagatgagggagaggagaaggcggccggggaggccgaggaggaggaggaggatgatgatgatgaagaggaggaggaggacttatcttctcccccagggctgcctgagcccctggagagtgtggaggcccctcccaggccccaagcccttacagatggcccccgggaacacagcaagagtgccagcctcctgtttggcatgcggaacagtgcagccagtgatgaggactcaagctgggctaccttatcccagggcagcccctcctatggctccccagaggacacagattccttctggaaccccaacgccttcgagacggattccgacctgccggctggatggatgagggtccaggacacctcagggacctattactggcacatcccaacagggaccacccagtgggaaccccccggccgggcctccccctcacaggggagcagcccccaagaggagtcccagctcacctggacaggttttgctcatggagaaggctttgaggatggagaattttggaaggatgaacccagtgatgaggccccaatggagctgggactgaaggaacctgaggaggggacgttgaccttcccagctcagagcctcagcccagagccgttgccccaagaggaggagaagcttcccccacggaataccaacccagggatcaagtgtttcgccgtgcgctccctaggctgggtagagatgaccgaggaggagctggcccctggacgcagcagtgtggcagtcaacaattgcatccgtcagctctcttaccacaaaaacaacctgcatgaccccatgtctgggggctggggggaaggaaaggatctgctactgcagctggaggatgagacactaaagctagtggagccacagagccaggcactgctgcacgcccaacccatcatcagcatccgcgtgtggggcgtcgggcgggacagtggaagcaacagggactttgcctacgtagctcgtgataagctgacccagatgctcaagtgccacgtgtttcgctgtgaggcacctgccaagaacatcgccaccagcctgcatgagatctgctctaagatcatggccgaacggcgtaatgcccgctgcttggtaaatggactctccctggaccactctaaacttgtggatgtccctttccaagtggaattcccagcgcctaagaatgagttggtccagaagttccaagtctattacctggggaatgtacctgttgctaaacctgttggggtagatgtgattaatggggccctcgagtcagtcctgtcctccagcagccgtgaacaatggaccccaagtcatgtcagtgtggcccctgctaccctcaccatcttgcaccagcagacagaggcagtgctgggagagtgtcgggtgcgtttcctctccttcctggccgtgggcagagatgtccacacgtttgcattcatcatggctgccggcccagcctccttctgctgccacatgttctggtgcgagcccaatgctgccagcctctcagaggctgtgcaggctgcgtgcatgcttcgctaccagaagtgtctggatgcccgttcccaggcctccacctcctgcctcccagcaccccctgctgagtctgtggcacggcgtgtagggtggactgtccgcaggggtgttcagtcgctgtggggctccctgaagcccaaacggctgggggcccataccccatgaagaagcccccaccttccctccacctgcttgtgttgggccccagggaactaaagggtgtgggtcagggaggggtctagaggctattcctaggcctcaggcctcccaaatatgcccctccccagtagctacggttccctgcctaggagctggggagggagagatctaatcccttcaaggaagtgataacactggagtggtaacaagaggagcaggaagcaaggccagccctggttctccatccccatgtgtttcaggtggaacaggaggaactggtccaggccaggcctcatcctcctggacccagcaggggcagaaggaggaagggactggtccaggcatgggtcccttccccctgctccatgggcacctctgctgtattgatatcactaataaagtctgtctgcactgc

SEQ ID NO: 1847 - DNA, 2128 bp, Homo sapiens
  source 1..2128: mol_type = unassigned DNA
gagacgctgcagcctagctgggccctggcaggtgaggggtggggggtggtgctgggaagccccaagcccagcctcaagcttgctggggctcaggacctcaaagcccacccttgggttcaaactgctgtgcaggtcctggacaggggcgggatccctgaaggccttgaaaccacaccctatttatgctgacagctataggctctgcagggccccaggcagctggggtattccttaggggctgagtctcctggtatccctaagactgggcttggcttaggcactgaggactttttcctggccattatcctgcaggacagcagcgcagattccttctggaaccccaacgccttcgagacggattccgacctgccggctggatggatgagggtccaggacacctcagggacctattactggcacatcccaacagggaccacccagtgggaaccccccggccgggcctccccctcacaggggagcagcccccaagaggagtcccagctcacctggacaggttttgctcatggagaaggctttgaggatggagaattttggaaggatgaacccagtgatgaggccccaatggagctgggactgaaggaacctgaggaggggacgttgaccttcccagctcagagcctcagcccagagccgttgccccaagaggaggagaagcttcccccacggaataccaacccagggatcaagtgtttcgccgtgcgctccctaggctgggtagagatgaccgaggaggagctggcccctggacgcagcagtgtggcagtcaacaattgcatccgtcagctctcttaccacaaaaacaacctgcatgaccccatgtctgggggctggggggaaggaaaggatctgctactgcagctggaggatgagacactaaagctagtggagccacagagccaggcactgctgcacgcccaacccatcatcagcatccgcgtgtggggcgtcgggcgggacagtggaagcaacagggactttgcctacgtagctcgtgataagctgacccagatgctcaagtgccacgtgtttcgctgtgaggcacctgccaagaacatcgccaccagcctgcatgagatctgctctaagatcatggccgaacggcgtaatgcccgctgcttggtaaatggactctccctggaccactctaaacttgtggatgtccctttccaagtggaattcccagcgcctaagaatgagttggtccagaagttccaagtctattacctggggaatgtacctgttgctaaacctgttggggtagatgtgattaatggggccctcgagtcagtcctgtcctccagcagccgtgaacaatggaccccaagtcatgtcagtgtggcccctgctaccctcaccatcttgcaccagcagacagaggcagtgctgggagagtgtcgggtgcgtttcctctccttcctggccgtgggcagagatgtccacacgtttgcattcatcatggctgccggcccagcctccttctgctgccacatgttctggtgcgagcccaatgctgccagcctctcagaggctgtgcaggctgcgtgcatgcttcgctaccagaagtgtctggatgcccgttcccaggcctccacctcctgcctcccagcaccccctgctgagtctgtggcacggcgtgtagggtggactgtccgcaggggtgttcagtcgctgtggggctccctgaagcccaaacggctgggggcccataccccatgaagaagcccccaccttccctccacctgcttgtgttgggccccagggaactaaagggtgtgggtcagggaggggtctagaggctattcctaggcctcaggcctcccaaatatgcccctccccagtagctacggttccctgcctaggagctggggagggagagatctaatcccttcaaggaagtgataacactggagtggtaacaagaggagcaggaagcaaggccagccctggttctccatccccatgtgtttcaggtggaacaggaggaactggtccaggccaggcctcatcctcctggacccagcaggggcagaaggaggaagggactggtccaggcatgggtcccttccccctgctccatgggcacctctgctgtattgatatcactaat

SEQ ID NO: 1848 - DNA, 2089 bp, Homo sapiens
  source 1..2089: mol_type = unassigned DNA
atgtctgttccatcatcactgagccagtcggccattaatgccaacagccacggaggccccgcactgagcctacccctgcctctgcacgctgcccacaaccagctgctcaacgccaagctgcaggccacagctgtgggacccaaggacctgcacagcaagagtgccagcctcctgtttggcatgcggaacagtgcagccagtgatgaggactcaagctgggctaccttatcccagggcagcccctcctatggctccccagaggacacagattccttctggaaccccaacgccttcgagacggattccgacctgccggctggatggatgagggtccaggacacctcagggacctattactggcacatcccaacagggaccacccagtgggaaccccccggccgggcctccccctcacaggggagcagcccccaagaggagtcccagctcacctggacaggttttgctcatggagaaggctttgaggatggagaattttggaaggatgaacccagtgatgaggccccaatggagctgggactgaaggaacctgaggaggggacgttgaccttcccagctcagagcctcagcccagagccgttgccccaagaggaggagaagcttcccccacggaataccaacccagggatcaagtgtttcgccgtgcgctccctaggctgggtagagatgaccgaggaggagctggcccctggacgcagcagtgtggcagtcaacaattgcatccgtcagctctcttaccacaaaaacaacctgcatgaccccatgtctgggggctggggggaaggaaaggatctgctactgcagctggaggatgagacactaaagctagtggagccacagagccaggcactgctgcacgcccaacccatcatcagcatccgcgtgtggggcgtcgggcgggacagtggaagcaacagggactttgcctacgtagctcgtgataagctgacccagatgctcaagtgccacgtgtttcgctgtgaggcacctgccaagaacatcgccaccagcctgcatgagatctgctctaagatcatggccgaacggcgtaatgcccgctgcttggtaaatggactctccctggaccactctaaacttgtggatgtccctttccaagtggaattcccagcgcctaagaatgagttggtccagaagttccaagtctattacctggggaatgtacctgttgctaaacctgttggggtagatgtgattaatggggccctcgagtcagtcctgtcctccagcagccgtgaacaatggaccccaagtcatgtcagtgtggcccctgctaccctcaccatcttgcaccagcagacagaggcagtgctgggagagtgtcgggtgcgtttcctctccttcctggccgtgggcagagatgtccacacgtttgcattcatcatggctgccggcccagcctccttctgctgccacatgttctggtgcgagcccaatgctgccagcctctcagaggctgtgcaggctgcgtgcatgcttcgctaccagaagtgtctggatgcccgttcccaggcctccacctcctgcctcccagcaccccctgctgagtctgtggcacggcgtgtagggtggactgtccgcaggggtgttcagtcgctgtggggctccctgaagcccaaacggctgggggcccataccccatgaagaagcccccaccttccctccacctgcttgtgttgggccccagggaactaaagggtgtgggtcagggaggggtctagaggctattcctaggcctcaggcctcccaaatatgcccctccccagtagctacggttccctgcctaggagctggggagggagagatctaatcccttcaaggaagtgataacactggagtggtaacaagaggagcaggaagcaaggccagccctggttctccatccccatgtgtttcaggtggaacaggaggaactggtccaggccaggcctcatcctcctggacccagcaggggcagaaggaggaagggactggtccaggcatgggtcccttccccctgctccatgggcacctctgctgtattgatatcactaataaagtctgtctgcactgc

SEQ ID NO: 1849 - DNA, 1569 bp, Homo sapiens
  source 1..1569: mol_type = unassigned DNA
gttggagtggtgtggctctgccggcagacaagggtgtatgacacagatgcgagattccttctggaaccccaacgccttcgagacggattccgacctgccggctggatggatgagggtccaggacacctcagggacctattactggcacatcccaacagggaccacccagtgggaaccccccggccgggcctccccctcacaggggagcagcccccaagaggagtcccagctcacctggacaggttttgctcatggagaaggctttgaggatggagaattttggaaggatgaacccagtgatgaggccccaatggagctgggactgaaggaacctgaggaggggacgttgaccttcccagctcagagcctcagcccagagccgttgccccaagaggaggagaagcttcccccacggaataccaacccagggatcaagtgtttcgccgtgcgctccctaggctgggtagagatgaccgaggaggagctggcccctggacgcagcagtgtggcagtcaacaattgcatccgtcagctctcttaccacaaaaacaacctgcatgaccccatgtctgggggctggggggaaggaaaggatctgctactgcagctggaggatgagacactaaagctagtggagccacagagccaggcactgctgcacgcccaacccatcatcagcatccgcgtgtggggcgtcgggcgggacagtggaagcaacagggactttgcctacgtagctcgtgataagctgacccagatgctcaagtgccacgtgtttcgctgtgaggcacctgccaagaacatcgccaccagcctgcatgagatctgctctaagatcatggccgaacggcgtaatgcccgctgcttggtaaatggactctccctggaccactctaaacttgtggatgtccctttccaagtggaattcccagcgcctaagaatgagttggtccagaagttccaagtctattacctggggaatgtacctgttgctaaacctgttggggtagatgtgattaatggggccctcgagtcagtcctgtcctccagcagccgtgaacaatggaccccaagtcatgtcagtgtggcccctgctaccctcaccatcttgcaccagcagacagaggcagtgctgggagagtgtcgggtgcgtttcctctccttcctggccgtgggcagagatgtccacacgtttgcattcatcatggctgccggcccagcctccttctgctgccacatgttctggtgcgagcccaatgctgccagcctctcagaggctgtgcaggctgcgtgcatgcttcgctaccagaagtgtctggatgcccgttcccaggcctccacctcctgcctcccagcaccccctgctgagtctgtggcacggcgtgtagggtggactgtccgcaggggtgttcagtcgctgtggggctccctgaagcccaaacggctgggggcccataccccatgaagaagcccccaccttccctccacctgcttgtgttgggccccagggaactaaagggtgtgggtcagggaggggtctagaggctattcctaggcctcaggcctccc

SEQ ID NO: 1850 - DNA, 8972 bp, Homo sapiens
  source 1..8972: mol_type = unassigned DNA
gccaaagcctggagaagtggaatctcgtcagcgccgctccctgcgcgggactcgcggaacggcactgagcatgctcagttgccggagcccgttctggtctcaagtaggaagctagtgcgctgtaaccgcatctgatctgggcgctccgggaagggcgagactggagcagagccgctgggcgccggagccgaggcgagcgccgcgcgcaccactggttggagttgctgtgggtgagctgctgtggtctgtagccaagcatgctgtggtcggatctgcccagccgtggaacagaaacatttgctggatggaaaatccataaaagaaagctcctgtgaaaagctgaggctgacaataatttaagcaaaatcagatcgatctctttgggctgcctgacctccttgggtgcttgctattaattaacagactttgtggggaaaaaaaggagcttgccttctgagctttgtaccaaagacctgggaaaactaaccatctcagtctttcctgaggacttgggaactgccgaggcctctgccaatgtgttgactgtcgctatgggctcactgttgtccaggcagctcatatttcaaattataacctatttcctgcaccattgctgacgcctggtgatccatgtcagaagtacttccagctgactcaggtgttgacaccttggcagtgtttatggccagcagcggaactacagacgtcacaaatcggaacagcccagccacaccaccaaacacccttaacctccgatcctcccacaatgaactgttgaacgctgaaataaaacacacagaaaccaagaacagcacacctcccaaatgcaggaaaaaatatgcactaactaacatccaggcggccatgggcctctcggatccagctgcacagcccctgctgggaaatggctctgccaacatcaagctggtgaaaaatggggagaaccagctccgtaaggctgcagagcaagggcagcaggaccccaacaaaaacctgagccccactgcagtcatcaacataacttctgagaagttagagggtaaagagccccacccacaggattcctcgagctgtgagattttaccctcccagcccaggagaactaagagcttcctaaattactatgcagatctggaaacctcagccagagaactagagcagaaccgaggcaatcaccatgggactgcggaagagaaatcccagccagtccagggccaggcctccaccatcattgggaatggcgatttgctgctgcagaaaccaaacagaccccagtccagccctgaagacggccaagtagccacagtgtcatccagcccagaaaccaagaaggatcatccgaaaacaggggccaaaaccgactgtgcactgcaccggatccagaacctggcaccgagcgatgaggagtccagctggacaacgttgtcccaagacagtgcctcacccagctccccggatgaaacagatatatggagtgatcactcatttcagactgatccagatttgccgcctggctggaaaagagtcagtgacattgccgggacctattattggcacatcccaacaggaacgactcagtgggaacggcccgtctccatcccagcagatctccagggttctaggaaagggtcacttagttctgtaacgccatctcccaccccagagaacgagaaacagccatggagtgattttgctgttctgaatgggggaaagattaatagtgacatttggaaggatttgcatgcagccactgttaacccggaccccagtttaaaagagtttgaaggagcaaccctacgctatgcatctttgaaactcagaaatgccccacaccctgatgatgatgattcttgtagtatcaacagtgacccagaagccaagtgttttgctgtgcgttctctgggatgggtagagatggcagaagaggacctcgcccccggtaaaagtagtgttgcggtcaacaactgcatcaggcaactttcctactgcaaaaatgacatccgagacacagtcgggatttggggagaggggaaagacatgtacctgatcctggagaatgacatgctcagcctggtggaccccatggaccgcagcgtgctgcactcgcagcccatcgtcagcatccgcgtgtggggcgtgggccgcgacaatggccgggattttgcttatgtagcaagagataaagatacaagaattttgaaatgtcatgtatttcgatgtgacacaccagcaaaagccattgccacaagtctccacgagatctgctccaagattatggctgaacggaagaatgccaaagcgctggcctgcagctccttacaggaaagggccaatgtgaacctcgatgtccctttgcaagtagattttccaacaccaaagactgagctggtccagaagttccacgtgcagtacttgggcatgttacctgtagacaaaccagtcggaatggatattttgaacagtgccatagaaaatcttatgacctcatccaacaaggaggactggctgtcagtgaacatgaacgtggctgatgccactgtgactgtcatcagtgaaaagaatgaagaggaagtcttagtggaatgtcgtgtgcgattcctgtccttcatgggtgttgggaaggacgtccacacatttgccttcatcatggacacggggaaccagcgctttgagtgccacgttttctggtgcgagcctaatgctggtaacgtgtctgaggcggtgcaggccgcctgcatgttacgatatcagaagtgcttggtagccaggccgccttctcagaaagttcgaccacctccaccgccagcagattcagtaaccagaagagtcacaaccaatgtaaaacgaggggtcttatccctcattgacactttgaaacagaaacgccctgtcaccgaaatgccatagctgcacatgcaaaaggactcggctatttacctgaagattgactagctacactaaagaaaatgaactccgccatccgaccttccatccagttgctgatgctttgtcttcagagaatttacccttaaccaagcagtgttagacaagcatgttctctcgtcttgccaccatcatgtgatatgaaaagaagcatgaataattttttttgctgtaagttacatcatgcgcagtggaaggtctttttcttattgtaaatattgtgaacattacttaacttcacacacacacagagaagagtgtggccccacccctcctagtgaactaacgctgcgtccttggaatgaatgatgcgtgagttagtttcactgtcttcttggctggacctgtcacaagcaacctttaagtcctacagcactttgccctgttttcaacattggagtaggcactgcatagcagataccattgaattgctgtaaaaataggatggcgagtttgtgttttaatttttcataaaattgaacctgttggttgacaaaattggctgttggcatcagtatagaaaccaactggcagctttccctgacaagctctttgacacatggacaccatttcatgtctacagctgtttgtgggatgttggaaaaaaatgaaacttcaaaattgatgaaaaactaaattcgaggaattaaaatcgaacaaaacatagcctttcttttccgatggttttcaaactgattatttttaaaagagattaataaaatcataatgcattttgggtgggacatatttcaaacttctgccttatattgtacggtgcagctagagaattatagttcactatggccattctctacataaacattaagatgaaatactcctcatcagcctttcatccttagtttgagaattagctgatatgcaatttgaagttgaggaaatatcattgatatttctatcatgcacgattattttagatttctaccaccgtgtgatttttgctagtccatgtgctagaggtaaacgttctgctggaattctgcatccagctctatccccctctgatgctttttgcccagaaagctgtctgtccatcatgtattgtccatggcaacaaattacattaggttgaacctttccttgattttatgtatttaatattagaatttgttggactcaactagatatattttttaatttatattttttccattttactttgaagatttgaaatgttcatacctgagcaaagtctacacaggagtaatggactgtttaacaagtttcccaaaacagcattttcctgctccttcgtatgtaggtgagaaacttagctggaaagacatacaaatttagactctcgttgacattgtcgttttaaaaggaagttgctaaggcgatcaatctcaatattagtcttgtttacttcttcttaatgtcaaaattaacatttacaacatccaattataaaagtaatgctttatgtttatacactgctatgtacttgtcaaaatggtttccacattcttatcacatctgagccttaccaggtagagaaggtactaaatacactttagaagtaaaaatatgaagtaccgagaggctaaacccactggcctaagatctcaccaaagttcatgaaaaccaggactaggacccacggctcccaaagcccgttcttgctgtgttgtgctgcctccatatccgtcaggaagagcctttccagaatgattctgggcatatactaagaagagcaggtatggaaagatctattgtcagggaatcttagaattccctacacgagtgggagaaagatgtccaaattccttacgcagtggtattcatgatggtgccctatctaagtccaggactgttttcctacagcgtgcctcaaaagtgttgtagagggcaggattctacattcacagcctgttccatctacgagattttccagatgctacttgtggtagacattcctaactcatggtacttagccaccagagatcatgatggaatgagtgggtggcttttctacctgccattccctcagaattcatgaggggtgggggacagggggaccggaattgtcttagcaccccaatgttatgacaaaactatgctactttagaaacgcagtctgtttttcaccaattgacatactactgatctgaagtaaccagtgccatcataagaaattactgcattaagaaaatccttgctgtgccctttgaaaagctgttcagaaatcatttacagtgatctttcatctcggtcgctgtagtgaaacattttagtgtgataaatttcaaaattctaaacaaattacccacttttatattggaaatctctaccagaactccctcttcattttttaaggcatacatttgcttgttttcaagatcaagaattctgagctagctttaagtagcaaactgatttatatgtgcaattataggatgcattaagatgaatgatagcctttacatattgaaaactttgcagacgttttgttttgaaaatggcattgtatagtaaatgcaaattaattttgtaaaattatgttaaagagtatgttcagacactttctgccatggccaaaaagtatgtatgaaagtatgtgtgtatttgtttgtaaaaggatgccaatgttttacctgatatcttagtgacacttcagttatctatgcattctttagatctgtgattcggtaaacaggcagccatgttcacgatgccttctatgtcttaccatatttttaattaacctgttaaatacagcttaaaatatttttattttatttattctatttttactgaaatatactgcattattgtgttaatgtattatctttcctggatattatctcccagtgtatccagatctaagtaatctcagtgaactatacattgcctaaaaagtggttttgtaatgatttgtagtcacatttctattgggatatgtagaagaaaaggcaaaatgcttaaagttccttttattttttaaaagcagctagatagacacagacttgccacctcatacatctgctccttggcaacatcaaggggaacgactagccaacatgcctatggctaaaaactttcctttgcagactaaagcactgcttggtgcttcgtttttctacccttcacaacatgtgtgatttcatctaagagatatatacatgtacacatgccctttgtttccacctggatacaagatcactcatagctaattaggaccattgttttttgttcatctgtcttgttgcatgaagggacattagacccatttccattaaaataagttcttggtgataaactgtggcactgctacttctttttaaatccactttatgatttcaagatggacacttgtaagatgactcgacacaaggccattgcctggaagccccagagctttcctctgtttgtatggcccgttcatgtcccaggcattgcaacacaaactcctcaagatttcaccacaacatgacaagcattttcctaactgatattagcacaatttaactaataagccccttcgctctctagttggccaggcttaacctaatacacatctaacgtgtgtgccacacggccagtagaaagtttaacttcagcttcagggcaaagatacccactcacaccgtgtcaacgcaagcagtagttcctggcctccagagcagcttacttcccctgaaagaacgctttgttttcctttatgcccttttcctgttgaccacttttacacatttaaatgtaatttgttgtgagaataaatttagctgcataaaacgttcggctcatttatctgacatcttagtcacatatacaaggaatagaaatagaaactcggtgtctctagttatttttaaattattcttacctcagacttcttagaaatcactttagtaatggagcattttgctttgattagttactacatatttctgcctggtaagaactaggaagtaacttcaaattttgagtaatcaccctgtacttatttggtgatcaggaaggccagctggccttccggacatagaagcctatttagtcaccaactcgagtcttttgtaagcggtcttgctaggattgtgatattttagcacgaagaagtttatcacttcctttaagaacctgacatcaaagaataaagaatagaggtgtacacacactaaatccaaaatgaaaggtaactagagaaatcagttgaatctggtttagcttaactgttaggcgcaggaaggcagataaacagaatttaaagtatgtccccgctttttgttcatcttgcacttccacagtggtttctctctagtcagtaacaaaatttcattatggtttcaggcattatatggtggtaaataatttcagattaaaaatgtgtttgctattggagtatctgaatactagtaatttcattatttagaattttgcagcacttttatctcaagaagaagtccaagaatgtaaaatgccaaatgaaacatgtcagtggaatcaatattctccttcattagaattccctcatattgctttttttttttttcttcagacagaggagtcttactctggagtgcagtggtgtaatttcagctcaccacaacctccacctcccaagttcaagcaattctcgcctcagcctcctgagtagctgggattacaggcatgcaccgccacgcctggccaatttgtatatttttagtagagacagggtttcgccacgttggccaggctggtctcgaactcctgacctcaggtgatccgcccgccccaacctcccaaagtatgtgagccaccacgtccggcctcatattgcttttatccaaaattcttttcccttttcactctaccaaagtatttaaataatcctgtccttcatagaagattctcaaagaagaaaactgcagtgtaattaatgaatggtttaattcagaatcttcatatacttctaaagagaaaaataatttagtgccaaatgcatgttaggagataatcaatgtaagtggcaacaaattgtgacttcacatgctactgtagagatcagaaaattatcctaaactattccataacaatgagacaacatcacagaaaatacacttgaaaataaaaatctcaagaccagctacttctggacaatggaatacttttcagtctggtatggtggagggcccgaaaaggataagggattcttatgatacacaatgggattctttactgaacaatatgttaaattaagctgcaccgccttccttgaggcatggactaccctaaccaaccagatagaaatctgggtgggataagaggatgagccacacgctataattttagggcaaggagatagtgtttgattttcaaaatcagcaaaataagctgagcactttatatctttctgtacaagagtgataacatgaagaattcttcttcagggatttaaaatacaataagcctggttcaactataaaaagtcttgtttcctttcttcattgacacttttttttttttttttttttttttgaggcaaggtctcactctgcttcccaggctggagtgcagtggggcaatattggctcactgcaacctgcacctcctggactcaagagatcctcgtacctcagcctcctaagtagctgggactacaggcgtgtcccaccacacccagctaatttttgtattttttgtagagatggggttttggggtttcgccatgttgtccaggctcgtctggaactccggtgctcaagtggcgtgcccacctcagcctcccaaactgctgagattacagatgtgagccactgcacccagcccactgacacgttttactgataaatgtaaatctaagctaaaataaaaataatgtattaccgctataatacaattcaccattctcttttctcacttcaagtaagaaagtaaaaatagaatatcagagctgaagtagacctaagtattcatcttgaagaagataatattctaaaaatcatgccacctgaattgagcatttaggaatttatgtaacatttctatacaactgaattgcaaaaataaaactttaaattcaaacttta

SEQ ID NO: 1851 - DNA, 8338 bp, Homo sapiens
  source 1..8338: mol_type = unassigned DNA
tcacactgtataccagctgactcaggtgttgacaccttggcagtgtttatggccagcagcggaactacagacgtcacaaatcggaacagcccagccacaccaccaaacacccttaacctccgatcctcccacaatgaactgttgaacgctgaaataaaacacacagaaaccaagaacagcacacctcccaaatgcaggaaaaaatatgcactaactaacatccaggcggccatgggcctctcggatccagctgcacagcccctgctgggaaatggctctgccaacatcaagctggtgaaaaatggggagaaccagctccgtaaggctgcagagcaagggcagcaggaccccaacaaaaacctgagccccactgcagtcatcaacataacttctgagaagttagagggtaaagagccccacccacaggattcctcgagctgtgagattttaccctcccagcccaggagaactaagagcttcctaaattactatgcagatctggaaacctcagccagagaactagagcagaaccgaggcaatcaccatgggactgcggaagagaaatcccagccagtccagggccaggcctccaccatcattgggaatggcgatttgctgctgcagaaaccaaacagaccccagtccagccctgaagacggccaagtagccacagtgtcatccagcccagaaaccaagaaggatcatccgaaaacaggggccaaaaccgactgtgcactgcaccggatccagaacctggcaccgagcgatgaggagtccagctggacaacgttgtcccaagacagtgcctcacccagctccccggatgaaacagatatatggagtgatcactcatttcagactgatccagatttgccgcctggctggaaaagagtcagtgacattgccgggacctattattggcacatcccaacaggaacgactcagtgggaacggcccgtctccatcccagcagatctccagggttctaggaaagggtcacttagttctgtaacgccatctcccaccccagagaacgagaaacagccatggagtgattttgctgttctgaatgggggaaagattaatagtgacatttggaaggatttgcatgcagccactgttaacccggaccccagtttaaaagagtttgaaggagcaaccctacgctatgcatctttgaaactcagaaatgccccacaccctgatgatgatgattcttgtagtatcaacagtgacccagaagccaagtgttttgctgtgcgttctctgggatgggtagagatggcagaagaggacctcgcccccggtaaaagtagtgttgcggtcaacaactgcatcaggcaactttcctactgcaaaaatgacatccgagacacagtcgggatttggggagaggggaaagacatgtacctgatcctggagaatgacatgctcagcctggtggaccccatggaccgcagcgtgctgcactcgcagcccatcgtcagcatccgcgtgtggggcgtgggccgcgacaatggccgggattttgcttatgtagcaagagataaagatacaagaattttgaaatgtcatgtatttcgatgtgacacaccagcaaaagccattgccacaagtctccacgagatctgctccaagattatggctgaacggaagaatgccaaagcgctggcctgcagctccttacaggaaagggccaatgtgaacctcgatgtccctttgcaagtagattttccaacaccaaagactgagctggtccagaagttccacgtgcagtacttgggcatgttacctgtagacaaaccagtcggaatggatattttgaacagtgccatagaaaatcttatgacctcatccaacaaggaggactggctgtcagtgaacatgaacgtggctgatgccactgtgactgtcatcagtgaaaagaatgaagaggaagtcttagtggaatgtcgtgtgcgattcctgtccttcatgggtgttgggaaggacgtccacacatttgccttcatcatggacacggggaaccagcgctttgagtgccacgttttctggtgcgagcctaatgctggtaacgtgtctgaggcggtgcaggccgcctgcatgttacgatatcagaagtgcttggtagccaggccgccttctcagaaagttcgaccacctccaccgccagcagattcagtaaccagaagagtcacaaccaatgtaaaacgaggggtcttatccctcattgacactttgaaacagaaacgccctgtcaccgaaatgccatagctgcacatgcaaaaggactcggctatttacctgaagattgactagctacactaaagaaaatgaactccgccatccgaccttccatccagttgctgatgctttgtcttcagagaatttacccttaaccaagcagtgttagacaagcatgttctctcgtcttgccaccatcatgtgatatgaaaagaagcatgaataattttttttgctgtaagttacatcatgcgcagtggaaggtctttttcttattgtaaatattgtgaacattacttaacttcacacacacacagagaagagtgtggccccacccctcctagtgaactaacgctgcgtccttggaatgaatgatgcgtgagttagtttcactgtcttcttggctggacctgtcacaagcaacctttaagtcctacagcactttgccctgttttcaacattggagtaggcactgcatagcagataccattgaattgctgtaaaaataggatggcgagtttgtgttttaatttttcataaaattgaacctgttggttgacaaaattggctgttggcatcagtatagaaaccaactggcagctttccctgacaagctctttgacacatggacaccatttcatgtctacagctgtttgtgggatgttggaaaaaaatgaaacttcaaaattgatgaaaaactaaattcgaggaattaaaatcgaacaaaacatagcctttcttttccgatggttttcaaactgattatttttaaaagagattaataaaatcataatgcattttgggtgggacatatttcaaacttctgccttatattgtacggtgcagctagagaattatagttcactatggccattctctacataaacattaagatgaaatactcctcatcagcctttcatccttagtttgagaattagctgatatgcaatttgaagttgaggaaatatcattgatatttctatcatgcacgattattttagatttctaccaccgtgtgatttttgctagtccatgtgctagaggtaaacgttctgctggaattctgcatccagctctatccccctctgatgctttttgcccagaaagctgtctgtccatcatgtattgtccatggcaacaaattacattaggttgaacctttccttgattttatgtatttaatattagaatttgttggactcaactagatatattttttaatttatattttttccattttactttgaagatttgaaatgttcatacctgagcaaagtctacacaggagtaatggactgtttaacaagtttcccaaaacagcattttcctgctccttcgtatgtaggtgagaaacttagctggaaagacatacaaatttagactctcgttgacattgtcgttttaaaaggaagttgctaaggcgatcaatctcaatattagtcttgtttacttcttcttaatgtcaaaattaacatttacaacatccaattataaaagtaatgctttatgtttatacactgctatgtacttgtcaaaatggtttccacattcttatcacatctgagccttaccaggtagagaaggtactaaatacactttagaagtaaaaatatgaagtaccgagaggctaaacccactggcctaagatctcaccaaagttcatgaaaaccaggactaggacccacggctcccaaagcccgttcttgctgtgttgtgctgcctccatatccgtcaggaagagcctttccagaatgattctgggcatatactaagaagagcaggtatggaaagatctattgtcagggaatcttagaattccctacacgagtgggagaaagatgtccaaattccttacgcagtggtattcatgatggtgccctatctaagtccaggactgttttcctacagcgtgcctcaaaagtgttgtagagggcaggattctacattcacagcctgttccatctacgagattttccagatgctacttgtggtagacattcctaactcatggtacttagccaccagagatcatgatggaatgagtgggtggcttttctacctgccattccctcagaattcatgaggggtgggggacagggggaccggaattgtcttagcaccccaatgttatgacaaaactatgctactttagaaacgcagtctgtttttcaccaattgacatactactgatctgaagtaaccagtgccatcataagaaattactgcattaagaaaatccttgctgtgccctttgaaaagctgttcagaaatcatttacagtgatctttcatctcggtcgctgtagtgaaacattttagtgtgataaatttcaaaattctaaacaaattacccacttttatattggaaatctctaccagaactccctcttcattttttaaggcatacatttgcttgttttcaagatcaagaattctgagctagctttaagtagcaaactgatttatatgtgcaattataggatgcattaagatgaatgatagcctttacatattgaaaactttgcagacgttttgttttgaaaatggcattgtatagtaaatgcaaattaattttgtaaaattatgttaaagagtatgttcagacactttctgccatggccaaaaagtatgtatgaaagtatgtgtgtatttgtttgtaaaaggatgccaatgttttacctgatatcttagtgacacttcagttatctatgcattctttagatctgtgattcggtaaacaggcagccatgttcacgatgccttctatgtcttaccatatttttaattaacctgttaaatacagcttaaaatatttttattttatttattctatttttactgaaatatactgcattattgtgttaatgtattatctttcctggatattatctcccagtgtatccagatctaagtaatctcagtgaactatacattgcctaaaaagtggttttgtaatgatttgtagtcacatttctattgggatatgtagaagaaaaggcaaaatgcttaaagttccttttattttttaaaagcagctagatagacacagacttgccacctcatacatctgctccttggcaacatcaaggggaacgactagccaacatgcctatggctaaaaactttcctttgcagactaaagcactgcttggtgcttcgtttttctacccttcacaacatgtgtgatttcatctaagagatatatacatgtacacatgccctttgtttccacctggatacaagatcactcatagctaattaggaccattgttttttgttcatctgtcttgttgcatgaagggacattagacccatttccattaaaataagttcttggtgataaactgtggcactgctacttctttttaaatccactttatgatttcaagatggacacttgtaagatgactcgacacaaggccattgcctggaagccccagagctttcctctgtttgtatggcccgttcatgtcccaggcattgcaacacaaactcctcaagatttcaccacaacatgacaagcattttcctaactgatattagcacaatttaactaataagccccttcgctctctagttggccaggcttaacctaatacacatctaacgtgtgtgccacacggccagtagaaagtttaacttcagcttcagggcaaagatacccactcacaccgtgtcaacgcaagcagtagttcctggcctccagagcagcttacttcccctgaaagaacgctttgttttcctttatgcccttttcctgttgaccacttttacacatttaaatgtaatttgttgtgagaataaatttagctgcataaaacgttcggctcatttatctgacatcttagtcacatatacaaggaatagaaatagaaactcggtgtctctagttatttttaaattattcttacctcagacttcttagaaatcactttagtaatggagcattttgctttgattagttactacatatttctgcctggtaagaactaggaagtaacttcaaattttgagtaatcaccctgtacttatttggtgatcaggaaggccagctggccttccggacatagaagcctatttagtcaccaactcgagtcttttgtaagcggtcttgctaggattgtgatattttagcacgaagaagtttatcacttcctttaagaacctgacatcaaagaataaagaatagaggtgtacacacactaaatccaaaatgaaaggtaactagagaaatcagttgaatctggtttagcttaactgttaggcgcaggaaggcagataaacagaatttaaagtatgtccccgctttttgttcatcttgcacttccacagtggtttctctctagtcagtaacaaaatttcattatggtttcaggcattatatggtggtaaataatttcagattaaaaatgtgtttgctattggagtatctgaatactagtaatttcattatttagaattttgcagcacttttatctcaagaagaagtccaagaatgtaaaatgccaaatgaaacatgtcagtggaatcaatattctccttcattagaattccctcatattgctttttttttttttcttcagacagaggagtcttactctggagtgcagtggtgtaatttcagctcaccacaacctccacctcccaagttcaagcaattctcgcctcagcctcctgagtagctgggattacaggcatgcaccgccacgcctggccaatttgtatatttttagtagagacagggtttcgccacgttggccaggctggtctcgaactcctgacctcaggtgatccgcccgccccaacctcccaaagtatgtgagccaccacgtccggcctcatattgcttttatccaaaattcttttcccttttcactctaccaaagtatttaaataatcctgtccttcatagaagattctcaaagaagaaaactgcagtgtaattaatgaatggtttaattcagaatcttcatatacttctaaagagaaaaataatttagtgccaaatgcatgttaggagataatcaatgtaagtggcaacaaattgtgacttcacatgctactgtagagatcagaaaattatcctaaactattccataacaatgagacaacatcacagaaaatacacttgaaaataaaaatctcaagaccagctacttctggacaatggaatacttttcagtctggtatggtggagggcccgaaaaggataagggattcttatgatacacaatgggattctttactgaacaatatgttaaattaagctgcaccgccttccttgaggcatggactaccctaaccaaccagatagaaatctgggtgggataagaggatgagccacacgctataattttagggcaaggagatagtgtttgattttcaaaatcagcaaaataagctgagcactttatatctttctgtacaagagtgataacatgaagaattcttcttcagggatttaaaatacaataagcctggttcaactataaaaagtcttgtttcctttcttcattgacacttttttttttttttttttttttttgaggcaaggtctcactctgcttcccaggctggagtgcagtggggcaatattggctcactgcaacctgcacctcctggactcaagagatcctcgtacctcagcctcctaagtagctgggactacaggcgtgtcccaccacacccagctaatttttgtattttttgtagagatggggttttggggtttcgccatgttgtccaggctcgtctggaactccggtgctcaagtggcgtgcccacctcagcctcccaaactgctgagattacagatgtgagccactgcacccagcccactgacacgttttactgataaatgtaaatctaagctaaaataaaaataatgtattaccgctataatacaattcaccattctcttttctcacttcaagtaagaaagtaaaaatagaatatcagagctgaagtagacctaagtattcatcttgaagaagataatattctaaaaatcatgccacctgaattgagcatttaggaatttatgtaacatttctatacaactgaattgcaaaaataaaactttaaattcaaacttt

SEQ ID NO: 1852 - DNA, 1681 bp, Homo sapiens
  source 1..1681: mol_type = unassigned DNA
aacttgagcccggggcagtgcgcgcggctgcttgagcgacggcaccgctggctggtgccggcaccctggggcttgtcgtagcacctggggcggcatccccgcccgacttcggaaggaccgggaggcaaaggtgaggaagttggcgaaggaacggctctcctttgtttgcagggattttgcttatgtagcaagagataaagatacaagaattttgaaatgtcatgtatttcgatgtgacacaccagcaaaagccattgccacaagtctccacgagatctgctccaagattatggctgaacggaagaatgccaaagcgctggcctgcagctccttacaggaaagggccaatgtgaacctcgatgtccctttgcaagtagattttccaacaccaaagactgagctggtccagaagttccacgtgcagtacttgggcatgttacctgtagacaaaccagtcggaatggatattttgaacagtgccatagaaaatcttatgacctcatccaacaaggaggactggctgtcagtgaacatgaacgtggctgatgccactgtgactgtcatcagtgaaaagaatgaagaggaagtcttagtggaatgtcgtgtgcgattcctgtccttcatgggtgttgggaaggacgtccacacatttgccttcatcatggacacggggaaccagcgctttgagtgccacgttttctggtgcgagcctaatgctggtaacgtgtctgaggcggtgcaggccgcctgcatgttacgatatcagaagtgcttggtagccaggccgccttctcagaaagttcgaccacctccaccgccagcagattcagtaaccagaagagtcacaaccaatgtaaaacgaggggtcttatccctcattgacactttgaaacagaaacgccctgtcaccgaaatgccatagctgcacatgcaaaaggactcggctatttacctgaagattgactagctacactaaagaaaatgaactccgccatccgaccttccatccagttgctgatgctttgtcttcagagaatttacccttaaccaagcagtgttagacaagcatgttctctcgtcttgccaccatcatgtgatatgaaaagaagcatgaataattttttttgctgtaagttacatcatgcgcagtggaaggtctttttcttattgtaaatattgtgaacattacttaacttcacacacacacagagaagagtgtggccccacccctcctagtgaactaacgctgcgtccttggaatgaatgatgcgtgagttagtttcactgtcttcttggctggacctgtcacaagcaacctttaagtcctacagcactttgccctgttttcaacattggagtaggcactgcatagcagataccattgaattgctgtaaaaataggatggcgagtttgtgttttaatttttcataaaattgaacctgttggttgacaaaattggctgttggcatcagtatagaaaccaactggcagctttccctgacaagctctttgacacatggacaccatttcatgtctacagctgtttgtgggatgttggaaaaaaatgaaacttcaaaattgatgaaaaactaaattcgaggaattaaaatcgaacaaaacatagcctttcttttccgatggttttcaaactgattatttttaaaagagattaataaaatc

SEQ ID NO: 1853 - DNA, 544 bp, Homo sapiens
  source 1..544: mol_type = unassigned DNA
gatctgggcgctccgggaagggcgagactggagcagagccgctgggcgccggagccgaggcgagcgccgcgcgcaccactggttggagttgctgtgggtgagctgctgtggtctgtagccaagcatgctgtggtcggatctgcccagccgtggaacagaaacatttgctggatggaaaatccataaaagaaagctcctgtgaaaagctgaggctgacaataatttaagcaaaatcagtctcactctgtcaccaggctggagtgcagtgacgtgatctcggctcacagcaaccgctgtctgccaggttcaagtgattctcctgcctcagcctctcgagtaactggaactacagatcgatctctttgggctgcctgacctccttgggtgcttgctattaattaacagactttgtggggaaaaaaaggagcttgccttctgagctttgtaccaaagacctgggaaaaatttcaaattataacctatttcctgcaccattgctgacgcctggtgatccatgtcagaagtacttccagctgactcaggt

SEQ ID NO: 1854 - DNA, 1274 bp, Homo sapiens
  source 1..1274: mol_type = unassigned DNA
aacttgagcccggggcagtgcgcgcggctgcttgagcgacggcaccgctggctggtgccggcaccctggggcttgtcgtagcacctggggcggcatccccgcccgacttcggaaggaccgggaggcaaaggtgaggaagttggcgaaggaacggctctcctttgtttgcagagagagggattttgcttatgtagcaagagataaagatacaagaattttgaaatgtcatgtatttcgatgtgacacaccagcaaaagccattgccacaagtctccacgagatctgctccaagattatggctgaacggaagaatgccaaagcgctggcctgcagctccttacaggaaagggccaatgtgaacctcgatgtccctttgcaagtagattttccaacaccaaagactgagctggtccagaagttccacgtgcagtacttgggcatgttacctgtagacaaaccagtcggaatggatattttgaacagtgccatagaaaatcttatgacctcatccaacaaggaggactggctgtcagtgaacatgaacgtggctgatgccactgtgactgtcatcagtgaaaagaatgaagaggaagtcttagtggaatgtcgtgtgcgattcctgtccttcatgggtgttgggaaggacgtccacacatttgccttcatcatggacacggggaaccagcgctttgagtgccacgttttctggtgcgagcctaatgctggtaacgtgtctgaggcggtgcaggccgcctgcatgttacgatatcagaagtgcttggtagccaggccgccttctcagaaagttcgaccacctccaccgccagcagattcagtaaccagaagagtcacaaccaatgtaaaacgaggggtcttatccctcattgacactttgaaacagaaacgccctgtcaccgaaatgccatagctgcacatgcaaaaggactcggctatttacctgaagattgactagctacactaaagaaaatgaactccgccatccgaccttccatccagttgctgatgctttgtcttcagagaatttacccttaaccaagcagtgttagacaagcatgttctctcgtcttgccaccatcatgtgatatgaaaagaagcatgaataattttttttgctgtaagttacatcatgcgcagtggaaggtctttttcttattgtaaatattgtgaacattacttaacttcacacacacacagagaagagtgtggccccacccctcctagtgaactaacgctgcgtccttggaatgaatgat

SEQ ID NO: 1855 - DNA, 3316 bp, Homo sapiens
  source 1..3316: mol_type = unassigned DNA
aaagcctggagaagtggaatctcgtcagcgccgctccctgcgcgggactcgcggaacggcactgagcatgctcagttgccggagcccgttctggtctcaagtaggaagctagtgcgctgtaaccgcatctgatctgggcgctccgggaagggcgagactggagcagagccgctgggcgccggagccgaggcgagcgccgcgcgcaccactggttggagttgctgtgggtgagctgctgtggtctgtagccaagcatgctgtggtcggatctgcccagccgtggaacagaaacatttgctggatggaaaatccataaaagaaagctcctgtgaaaagctgaggctgacaataatttaagcaaaatcagatcgatctctttgggctgcctgacctccttgggtgcttgctattaattaacagactttgtggggaaaaaaaggagcttgccttctgagctttgtaccaaagacctgggaaaactaaccatctcagtctttcctgaggacttgggaactgccgaggcctctgccaatgtgttgactgtcgctatgggctcactgttgtccaggcagctcatatttcaaattataacctatttcctgcaccattgctgacgcctggtgatccatgtcagaagtacttccagctgactcaggtgttgacaccttggcagtgtttatggccagcagcggaactacagacgtcacaaatcggaacagcccagccacaccaccaaacacccttaacctccgatcctcccacaatgaactgttgaacgctgaaataaaacacacagaaaccaagaacagcacacctcccaaatgcaggaaaaaatatgcactaactaacatccaggcggccatgggcctctcggatccagctgcacagcccctgctgggaaatggctctgccaacatcaagctggtgaaaaatggggagaaccagctccgtaaggctgcagagcaagggcagcaggaccccaacaaaaacctgagccccactgcagtcatcaacataacttctgagaagttagagggtaaagagccccacccacaggattcctcgagctgtgagattttaccctcccagcccaggagaactaagagcttcctaaattactatgcagatctggaaacctcagccagagaactagagcagaaccgaggcaatcaccatgggactgcggaagagaaatcccagccagtccagggccaggcctccaccatcattgggaatggcgatttgctgctgcagaaaccaaacagaccccagtccagccctgaagacggccaagtagccacagtgtcatccagcccagaaaccaagaaggatcatccgaaaacaggggccaaaaccgactgtgcactgcaccggatccagaacctggcaccgagcgatgaggagtccagctggacaacgttgtcccaagacagtgcctcacccagctccccggatgaaacagatatatggagtgatcactcatttcagactgatccagatttgccgcctggctggaaaagagtcagtgacattgccgggacctattattggcacatcccaacaggaacgactcagtgggaacggcccgtctccatcccagcagatctccagggttctaggaaagggtcacttagttctgtaacgccatctcccaccccagagaacgaggatttgcatgcagccactgttaacccggaccccagtttaaaagagtttgaaggagcaaccctacgctatgcatctttgaaactcagaaatgccccacaccctgatgatgatgattcttgtagtatcaacagtgacccagaagccaagtgttttgctgtgcgttctctgggatgggtagagatggcagaagaggacctcgcccccggtaaaagtagtgttgcggtcaacaactgcatcaggcaactttcctactgcaaaaatgacatccgagacacagtcgggatttggggagaggggaaagacatgtacctgatcctggagaatgacatgctcagcctggtggaccccatggaccgcagcgtgctgcactcgcagcccatcgtcagcatccgcgtgtggggcgtgggccgcgacaatggccgggattttgcttatgtagcaagagataaagatacaagaattttgaaatgtcatgtatttcgatgtgacacaccagcaaaagccattgccacaagtctccacgagatctgctccaagattatggctgaacggaagaatgccaaagcgctggcctgcagctccttacaggaaagggccaatgtgaacctcgatgtccctttgcaagtagattttccaacaccaaagactgagctggtccagaagttccacgtgcagtacttgggcatgttacctgtagacaaaccagtcggaatggatattttgaacagtgccatagaaaatcttatgacctcatccaacaaggaggactggctgtcagtgaacatgaacgtggctgatgccactgtgactgtcatcagtgaaaagaatgaagaggaagtcttagtggaatgtcgtgtgcgattcctgtccttcatgggtgttgggaaggacgtccacacatttgccttcatcatggacacggggaaccagcgctttgagtgccacgttttctggtgcgagcctaatgctggtaacgtgtctgaggcggtgcaggccgcctgcatgttacgatatcagaagtgcttggtagccaggccgccttctcagaaagttcgaccacctccaccgccagcagattcagtaaccagaagagtcacaaccaatgtaaaacgaggggtcttatccctcattgacactttgaaacagaaacgccctgtcaccgaaatgccatagctgcacatgcaaaaggactcggctatttacctgaagattgactagctacactaaagaaaatgaactccgccatccgaccttccatccagttgctgatgctttgtcttcagagaatttacccttaaccaagcagtgttagacaagcatgttctctcgtcttgccaccatcatgtgatatgaaaagaagcatgaataattttttttgctgtaagttacatcatgcgcagtggaaggtctttttcttattgtaaatattgtgaacattacttaacttcacacacacacagagaagagtgtggccccacccctcctagtgaactaacgctgcgtccttggaatgaatgatgcgtgagttagtttcactgtcttcttggctggacctgtcacaagcaacctttaagtcctacagcactttgccctgttttcaacattggagtaggcactgcatagcagataccattgaattgctgtaaaa

SEQ ID NO: 1856 - DNA, 3592 bp, Homo sapiens
  source 1..3592: mol_type = unassigned DNA
gcccgttctggtctcaagtaggaagctagtgcgctgtaaccgcatctgatctgggcgctccgggaagggcgagactggagcagagccgctgggcgccggagccgaggcgagcgccgcgcgcaccactggttggagttgctgtgggtgagctgctgtggtctgtagccaagcatgctgtggtcggatctgcccagccgtggaacagaaacatttgctggatggaaaatccataaaagaaagctcctgtgaaaagctgaggctgacaataatttaagcaaaatcagatcgatctctttgggctgcctgacctccttgggtgcttgctattaattaacagactttgtggggaaaaaaaggagcttgccttctgagctttgtaccaaagacctgggaaaactaaccatctcagtctttcctgaggacttgggaactgccgaggcctctgccaatgtgttgactgtcgctatgggctcactgttgtccaggcagctcatatttcaaattataacctatttcctgcaccattgctgacgcctggtgatccatgtcagaagtacttccagctgactcaggtgttgacaccttggcagtgtttatggccagcagcggaactacagacgtcacaaatcggaacagcccagccacaccaccaaacacccttaacctccgatcctcccacaatgaactgttgaacgctgaaataaaacacacagaaaccaagaacagcacacctcccaaatgcaggaaaaaatatgcactaactaacatccaggcggccatgggcctctcggatccagctgcacagcccctgctgggaaatggctctgccaacatcaagctggtgaaaaatggggagaaccagctccgtaaggctgcagagcaagggcagcaggaccccaacaaaaacctgagccccactgcagtcatcaacataacttctgagaagttagagggtaaagagccccacccacaggattcctcgagctgtgagattttaccctcccagcccaggagaactaagagcttcctaaattactatgcagatctggaaacctcagccagagaactagagcagaaccgaggcaatcaccatgggactgcggaagagaaatcccagccagtccagggccaggcctccaccatcattgggaatggcgatttgctgctgcagaaaccaaacagaccccagtccagccctgaagacggccaagtagccacagtgtcatccagcccagaaaccaagaaggatcatccgaaaacaggggccaaaaccgactgtgcactgcaccggatccagaacctggcaccgagcgatgaggagtccagctggacaacgttgtcccaagacagtgcctcacccagctccccggatgaaacagcagatatatggagtgatcactcatttcagactgatccagatttgccgcctggctggaaaagagtcagtgacattgccgggacctattattggcacatcccaacaggaacgactcagtgggaacggcccgtctccatcccagcagatctccagggttctaggaaagggtcacttagttctgtaacgccatctcccaccccagagaacgagaaacagccatggagtgattttgctgttctgaatgggggaaagattaatagtgacatttggaaggatttgcatgcagccactgttaacccggaccccagtttaaaagagtttgaaggagcaaccctacgctatgcatctttgaaactcagaaatgccccacaccctgatgatgatgattcttgtagtatcaacagtgacccagaagccaagtgttttgctgtgcgttctctgggatgggtagagatggcagaagaggacctcgcccccggtaaaagtagtgttgcggtcaacaactgcatcaggcaactttcctactgcaaaaatgacatccgagacacagtcgggatttggggagaggggaaagacatgtacctgatcctggagaatgacatgctcagcctggtggaccccatggaccgcagcgtgctgcactcgcagcccatcgtcagcatccgcgtgtggggcgtgggccgcgacaatggccgggattttgcttatgtagcaagagataaagatacaagaattttgaaatgtcatgtatttcgatgtgacacaccagcaaaagccattgccacaagtctccacgagatctgctccaagattatggctgaacggaagaatgccaaagcgctggcctgcagctccttacaggaaagggccaatgtgaacctcgatgtccctttgcaagtagattttccaacaccaaagactgagctggtccagaagttccacgtgcagtacttgggcatgttacctgtagacaaaccagtcggaatggatattttgaacagtgccatagaaaatcttatgacctcatccaacaaggaggactggctgtcagtgaacatgaacgtggctgatgccactgtgactgtcatcagtgaaaagaatgaagaggaagtcttagtggaatgtcgtgtgcgattcctgtccttcatgggtgttgggaaggacgtccacacatttgccttcatcatggacacggggaaccagcgctttgagtgccacgttttctggtgcgagcctaatgctggtaacgtgtctgaggcggtgcaggccgcctgcatgttacgatatcagaagtgcttggtagccaggccgccttctcagaaagttcgaccacctccaccgccagcagattcagtaaccagaagagtcacaaccaatgtaaaacgaggggtcttatccctcattgacactttgaaacagaaacgccctgtcaccgaaatgccatagctgcacatgcaaaaggactcggctatttacctgaagattgactagctacactaaagaaaatgaactccgccatccgaccttccatccagttgctgatgctttgtcttcagagaatttacccttaaccaagcagtgttagacaagcatgttctctcgtcttgccaccatcatgtgatatgaaaagaagcatgaataattttttttgctgtaagttacatcatgcgcagtggaaggtctttttcttattgtaaatattgtgaacattacttaacttcacacacacacagagaagagtgtggccccacccctcctagtgaactaacgctgcgtccttggaatgaatgatgcgtgagttagtttcactgtcttcttggctggacctgtcacaagcaacctttaagtcctacagcactttgccctgttttcaacattggagtaggcactgcatagcagataccattgaattgctgtaaaaataggatggcgagtttgtgttttaatttttcataaaattgaacctgttggttgacaaaattggctgttggcatcagtatagaaaccaactggcagctttccctgacaagctctttgacacatggacaccatttcatgtctacagctgtttgtgggatgttggaaaaaaatgaaacttcaaaattgatgaaaaactaaattcgaggaattaaaatcgaacaaaacatagcctttcttttccgatggttttcaaactgattatttttaaaagagattaataaaatcataatgcat

SEQ ID NO: 1857 - DNA, 604 bp, Homo sapiens
  source 1..604: mol_type = unassigned DNA
ggagaagtggaatctcgtcagcgccgctccctgcgcgggactcgcggaacggcactgagcatgctcagttgccggagcccgttctggtctcaagtaggaagctagtgcgctgtaaccgcatctgatctgggcgctccgggaagggcgagactggagcagagccgctgggcgccggagccgaggcgagcgccgcgcgcaccactggttggagttgctgtgggtgagctgctgtggtctgtagccaagcatgctgtggtcggatctgcccagccgtggaacagaaacatttgctggatggaaaatccataaaagaaagctcctgtgaaaagctgaggctgacaataatttaagcaaaatcagatcgatctctttgggctgcctgacctccttgggtgcttgctattaattaacagactttgtggggaaaaaaaggagcttgccttctgagctttgtaccaaagacctgggaaaaatttcaaattataacctatttcctgcaccattgctgacgcctggtgatccatgtcagaagtacttccagctgactcaggtgttgacaccttggcagtgtttatggccagcagcggaactacagacgtcacaa

SEQ ID NO: 1858 - DNA, 639 bp, Homo sapiens
  source 1..639: mol_type = unassigned DNA
ctcaagtaggaagctagtgcgctgtaaccgcatctgatctgggcgctccgggaagggcgagactggagcagagccgctgggcgccggagccgaggcgagcgccgcgcgcaccactggttggagttgctgtgggtgagctgctgtggtctgtagccaagcatgctgtggtcggatctgcccagccgtggaacagaaacatttgctggatggaaaatccataaaagaaagctcctgtgaaaagctgaggctgacaataatttaagcaaaatcagatcgatctctttgggctgcctgacctccttgggtgcttgctattaattaacagactttgtggggaaaaaaaggagcttgccttctgagctttgtaccaaagacctgggaaaaatttcaaattataacctatttcctgcaccattgctgacgcctggtgatccatgtcagaagtacttccagctgactcaggtgttgacaccttggcagtgtttatggccagcagcggaactacagacgtcacaaatcggaacagcccagccacaccaccaaacacccttaacctccgatcctcccacaatgaactgttgaacgctgaaataaaacacacagaaaccaagaacagcacacctcccaaatgcaggaaaa

SEQ ID NO: 1859 - DNA, 4166 bp, Homo sapiens
  source 1..4166: mol_type = unassigned DNA
ctggagcagagccgctgggcgccggagccgaggcgagcgccgcgcgcaccactggttggagttgctgtgggtgagctgctgtggtctgtagccaagcatgctgtggtcggatctgcccagccgtggaacagaaacatttgctggatggaaaatccataaaagaaagctcctgtgaaaagctgaggctgacaataatttaagcaaaatcagatcgatctctttgggctgcctgacctccttgggtgcttgctattaattaacagactttgtggggaaaaaaaggagcttgccttctgagctttgtaccaaagacctgggaaaactaaccatctcagtctttcctgaggacttgggaactgccgaggcctctgccaatgtgttgactgtcgctatgggctcactgttgtccaggcagctcatatttcaaattataacctatttcctgcaccattgctgacgcctggtgatccatgtcagaagtacttccagctgactcaggtgttgacaccttggcagtgtttatggccagcagcggaactacagacgtcacaaatcggaacagcccagccacaccaccaaacacccttaacctccgatcctcccacaatgaactgttgaacgctgaaataaaacacacagaaaccaagaacagcacacctcccaaatgcaggaaaaaatatgcactaactaacatccaggcggccatgggcctctcggatccagctgcacagcccctgctgggaaatggctctgccaacatcaagctggtgaaaaatggggagaaccagctccgtaaggctgcagagcaagggcagcaggaccccaacaaaaacctgagccccactgcagtcatcaacataacttctgagaagttagagggtaaagagccccacccacaggattcctcgagctgtgagattttaccctcccagcccaggagaactaagagcttcctaaattactatgcagatctggaaacctcagccagagaactagagcagaaccgaggcaatcaccatgggactgcggaagagaaatcccagccagtccagggccaggcctccaccatcattgggaatggcgatttgctgctgcagaaaccaaacagaccccagtccagccctgaagacggccaagtagccacagtgtcatccagcccagaaaccaagaaggatcatccgaaaacaggggccaaaaccgactgtgcactgcaccggatccagaacctggcaccgagcgatgaggagtccagctggacaacgttgtcccaagacagtgcctcacccagctccccggatgaaacagatatatggagtgatcactcatttcagactgatccagatttgccgcctggctggaaaagagtcagtgacattgccgggacctattattggcacatcccaacaggaacgactcagtgggaacggcccgtctccatcccagcagatctccagggttctaggaaagggtcacttagttctgtaacgccatctcccaccccagagaacgaggatttgcatgcagccactgttaacccggaccccagtttaaaagagtttgaaggagcaaccctacgctatgcatctttgaaactcagaaatgccccacaccctgatgatgatgattcttgtagtatcaacagtgacccagaagccaagtgttttgctgtgcgttctctgggatgggtagagatggcagaagaggacctcgcccccggtaaaagtagtgttgcggtcaacaactgcatcaggcaactttcctactgcaaaaatgacatccgagacacagtcgggatttggggagaggggaaagacatgtacctgatcctggagaatgacatgctcagcctggtggaccccatggaccgcagcgtgctgcactcgcagcccatcgtcagcatccgcgtgtggggcgtgggccgcgacaatggccgggattttgcttatgtagcaagagataaagatacaagaattttgaaatgtcatgtatttcgatgtgacacaccagcaaaagccattgccacaagtctccacgagatctgctccaagattatggctgaacggaagaatgccaaagcgctggcctgcagctccttacaggaaagggccaatgtgaacctcgatgtccctttgcaagattttccaacaccaaagactgagctggtccagaagttccacgtgcagtacttgggcatgttacctgtagacaaaccagtcggaatggatattttgaacagtgccatagaaaatcttatgacctcatccaacaaggaggactggctgtcagtgaacatgaacgtggctgatgccactgtgactgtcatcagtgaaaagaatgaagaggaagtcttagtggaatgtcgtgtgcgattcctgtccttcatgggtgttgggaaggacgtccacacatttgccttcatcatggacacggggaaccagcgctttgagtgccacgttttctggtgcgagcctaatgctggtaacgtgtctgaggcggtgcaggccgcctgcatgttacgatatcagaagtgcttggtagccaggccgccttctcagaaagttcgaccacctccaccgccagcagattcagtaaccagaagagtcacaaccaatgtaaaacgaggggtcttatccctcattgacactttgaaacagaaacgccctgtcaccgaaatgccatagctgcacatgcaaaaggactcggctatttacctgaagattgactagctacactaaagaaaatgaactccgccatccgaccttccatccagttgctgatgctttgtcttcagagaatttacccttaaccaagcagtgttagacaagcatgttctctcgtcttgccaccatcatgtgatatgaaaagaagcatgaataattttttttgctgtaagttacatcatgcgcagtggaaggtctttttcttattgtaaatattgtgaacattacttaacttcacacacacacagagaagagtgtggccccacccctcctagtgaactaacgctgcgtccttggaatgaatgatgcgtgagttagtttcactgtcttcttggctggacctgtcacaagcaacctttaagtcctacagcactttgccctgttttcaacattggagtaggcactgcatagcagataccattgaattgctgtaaaaataggatggcgagtttgtgttttaatttttcataaaattgaacctgttggttgacaaaattggctgttggcatcagtatagaaaccaactggcagctttccctgacaagctctttgacacatggacaccatttcatgtctacagctgtttgtgggatgttggaaaaaaatgaaacttcaaaattgatgaaaaactaaattcgaggaattaaaatcgaacaaaacatagcctttcttttccgatggttttcaaactgattatttttaaaagagattaataaaatcataatgcattttgggtgggacatatttcaaacttctgccttatattgtacggtgcagctagagaattatagttcactatggccattctctacataaacattaagatgaaatactcctcatcagcctttcatccttagtttgagaattagctgatatgcaatttgaagttgaggaaatatcattgatatttctatcatgcacgattattttagatttctaccaccgtgtgatttttgctagtccatgtgctagaggtaaacgttctgctggaattctgcatccagctctatccccctctgatgctttttgcccagaaagctgtctgtccatcatgtattgtccatggcaacaaattacattaggttgaacctttccttgattttatgtatttaatattagaatttgttggactcaactagatatattttttaatttatattttttccattttactttgaagatttgaaatgttcatacctgagcaaagtctacacaggagtaatggactgtttaacaagtttcccaaaacagcattttcctgctccttcgtatgtaggtgagaaacttagctggaaagacatacaaatttagactctcgttgacattgtcgttttaaaaggaagttgctaaggcgatcaatctcaatattagtcttgtttacttcttcttaatgtcaaaattaacatttacaacatccaattataaaagtaatgctttatgtttata

SEQ ID NO: 1860 - DNA, 2964 bp, Homo sapiens
  source 1..2964: mol_type = unassigned DNA
tgacaccttggcagtgtttatggccagcagcggaactacagacgtcacaaatcggaacagcccagccacaccaccaaacacccttaacctccgatcctcccacaatgaactgttgaacgctgaaataaaacacacagaaaccaagaacagcacacctcccaaatgcaggaaaaaatatgcactaactaacatccaggcggccatgggcctctcggatccagctgcacagcccctgctgggaaatggctctgccaacatcaagctggtgaaaaatggggagaaccagctccgtaaggctgcagagcaagggcagcaggaccccaacaaaaacctgagccccactgcagtcatcaacataacttctgagaagttagagggtaaagagccccacccacaggattcctcgagctgtgagattttaccctcccagcccaggagaactaagagcttcctaaattactatgcagatctggaaacctcagccagagaactagagcagaaccgaggcaatcaccatgggactgcggaagagaaatcccagccagtccagggccaggcctccaccatcattgggaatggcgatttgctgctgcagaaaccaaacagaccccagtccagccctgaagacggccaagtagccacagtgtcatccagcccagaaaccaagaaggatcatccgaaaacaggggccaaaaccgactgtgcactgcaccggatccagaacctggcaccgagcgatgaggagtccagctggacaacgttgtcccaagacagtgcctcacccagctccccggatgaaacagcagatatatggagtgatcactcatttcagactgatccagatttgccgcctggctggaaaagagtcagtgacattgccgggacctattattggcacatcccaacaggaacgactcagtgggaacggcccgtctccatcccagcagatctccagggttctaggaaagggtcacttagttctgtaacgccatctcccaccccagagaacgaggatttgcatgcagccactgttaacccggaccccagtttaaaagagtttgaaggagcaaccctacgctatgcatctttgaaactcagaaatgccccacaccctgatgatgatgattcttgtagtatcaacagtgacccagaagccaagtgttttgctgtgcgttctctgggatgggtagagatggcagaagaggacctcgcccccggtaaaagtagtgttgcggtcaacaactgcatcaggcaactttcctactgcaaaaatgacatccgagacacagtcgggatttggggagaggggaaagacatgtacctgatcctggagaatgacatgctcagcctggtggaccccatggaccgcagcgtgctgcactcgcagcccatcgtcagcatccgcgtgtggggcgtgggccgcgacaatggccgggattttgcttatgtagcaagagataaagatacaagaattttgaaatgtcatgtatttcgatgtgacacaccagcaaaagccattgccacaagtctccacgagatctgctccaagattatggctgaacggaagaatgccaaagcgctggcctgcagctccttacaggaaagggccaatgtgaacctcgatgtccctttgcaagtagattttccaacaccaaagactgagctggtccagaagttccacgtgcagtacttgggcatgttacctgtagacaaaccagtcggaatggatattttgaacagtgccatagaaaatcttatgacctcatccaacaaggaggactggctgtcagtgaacatgaacgtggctgatgccactgtgactgtcatcagtgaaaagaatgaagaggaagtcttagtggaatgtcgtgtgcgattcctgtccttcatgggtgttgggaaggacgtccacacatttgccttcatcatggacacggggaaccagcgctttgagtgccacgttttctggtgcgagcctaatgctggtaacgtgtctgaggcggtgcaggccgcctgcatgttacgatatcagaagtgcttggtagccaggccgccttctcagaaagttcgaccacctccaccgccagcagattcagtaaccagaagagtcacaaccaatgtaaaacgaggggtcttatccctcattgacactttgaaacagaaacgccctgtcaccgaaatgccatagctgcacatgcaaaaggactcggctatttacctgaagattgactagctacactaaagaaaatgaactccgccatccgaccttccatccagttgctgatgctttgtcttcagagaatttacccttaaccaagcagtgttagacaagcatgttctctcgtcttgccaccatcatgtgatatgaaaagaagcatgaataattttttttgctgtaagttacatcatgcgcagtggaaggtctttttcttattgtaaatattgtgaacattacttaacttcacacacacacagagaagagtgtggccccacccctcctagtgaactaacgctgcgtccttggaatgaatgatgcgtgagttagtttcactgtcttcttggctggacctgtcacaagcaacctttaagtcctacagcactttgccctgttttcaacattggagtaggcactgcatagcagataccattgaattgctgtaaaaataggatggcgagtttgtgttttaatttttcataaaattgaacctgttggttgacaaaattggctgttggcatcagtatagaaaccaactggcagctttccctgacaagctctttgacacatggacaccatttcatgtctacagctgtttgtgggatgttggaaaaaaatgaaacttcaaaattgatgaaaaactaaattcgaggaattaaaatcgaacaaaacatagcctttcttttccgatggttttcaaactgattatttttaaaagagattaataaaatcataatgcattttgggtggga

SEQ ID NO: 1861 - DNA, 6992 bp, Homo sapiens
  source 1..6992: mol_type = unassigned DNA
aacttgagcccggggcagtgcgcgcggctgcttgagcgacggcaccgctggctggtgccggcaccctggggcttgtcgtagcacctggggcggcatccccgcccgacttcggaaggaccgggaggcaaaggtgaggaagttggcgaaggaacggctctcctttgtttgcaggcacagggattttgcttatgtagcaagagataaagatacaagaattttgaaatgtcatgtatttcgatgtgacacaccagcaaaagccattgccacaagtctccacgagatctgctccaagattatggctgaacggaagaatgccaaagcgctggcctgcagctccttacaggaaagggccaatgtgaacctcgatgtccctttgcaagtagattttccaacaccaaagactgagctggtccagaagttccacgtgcagtacttgggcatgttacctgtagacaaaccagtcggaatggatattttgaacagtgccatagaaaatcttatgacctcatccaacaaggaggactggctgtcagtgaacatgaacgtggctgatgccactgtgactgtcatcagtgaaaagaatgaagaggaagtcttagtggaatgtcgtgtgcgattcctgtccttcatgggtgttgggaaggacgtccacacatttgccttcatcatggacacggggaaccagcgctttgagtgccacgttttctggtgcgagcctaatgctggtaacgtgtctgaggcggtgcaggccgcctgcatgttacgatatcagaagtgcttggtagccaggccgccttctcagaaagttcgaccacctccaccgccagcagattcagtaaccagaagagtcacaaccaatgtaaaacgaggggtcttatccctcattgacactttgaaacagaaacgccctgtcaccgaaatgccatagctgcacatgcaaaaggactcggctatttacctgaagattgactagctacactaaagaaaatgaactccgccatccgaccttccatccagttgctgatgctttgtcttcagagaatttacccttaaccaagcagtgttagacaagcatgttctctcgtcttgccaccatcatgtgatatgaaaagaagcatgaataattttttttgctgtaagttacatcatgcgcagtggaaggtctttttcttattgtaaatattgtgaacattacttaacttcacacacacacagagaagagtgtggccccacccctcctagtgaactaacgctgcgtccttggaatgaatgatgcgtgagttagtttcactgtcttcttggctggacctgtcacaagcaacctttaagtcctacagcactttgccctgttttcaacattggagtaggcactgcatagcagataccattgaattgctgtaaaaataggatggcgagtttgtgttttaatttttcataaaattgaacctgttggttgacaaaattggctgttggcatcagtatagaaaccaactggcagctttccctgacaagctctttgacacatggacaccatttcatgtctacagctgtttgtgggatgttggaaaaaaatgaaacttcaaaattgatgaaaaactaaattcgaggaattaaaatcgaacaaaacatagcctttcttttccgatggttttcaaactgattatttttaaaagagattaataaaatcataatgcattttgggtgggacatatttcaaacttctgccttatattgtacggtgcagctagagaattatagttcactatggccattctctacataaacattaagatgaaatactcctcatcagcctttcatccttagtttgagaattagctgatatgcaatttgaagttgaggaaatatcattgatatttctatcatgcacgattattttagatttctaccaccgtgtgatttttgctagtccatgtgctagaggtaaacgttctgctggaattctgcatccagctctatccccctctgatgctttttgcccagaaagctgtctgtccatcatgtattgtccatggcaacaaattacattaggttgaacctttccttgattttatgtatttaatattagaatttgttggactcaactagatatattttttaatttatattttttccattttactttgaagatttgaaatgttcatacctgagcaaagtctacacaggagtaatggactgtttaacaagtttcccaaaacagcattttcctgctccttcgtatgtaggtgagaaacttagctggaaagacatacaaatttagactctcgttgacattgtcgttttaaaaggaagttgctaaggcgatcaatctcaatattagtcttgtttacttcttcttaatgtcaaaattaacatttacaacatccaattataaaagtaatgctttatgtttatacactgctatgtacttgtcaaaatggtttccacattcttatcacatctgagccttaccaggtagagaaggtactaaatacactttagaagtaaaaatatgaagtaccgagaggctaaacccactggcctaagatctcaccaaagttcatgaaaaccaggactaggacccacggctcccaaagcccgttcttgctgtgttgtgctgcctccatatccgtcaggaagagcctttccagaatgattctgggcatatactaagaagagcaggtatggaaagatctattgtcagggaatcttagaattccctacacgagtgggagaaagatgtccaaattccttacgcagtggtattcatgatggtgccctatctaagtccaggactgttttcctacagcgtgcctcaaaagtgttgtagagggcaggattctacattcacagcctgttccatctacgagattttccagatgctacttgtggtagacattcctaactcatggtacttagccaccagagatcatgatggaatgagtgggtggcttttctacctgccattccctcagaattcatgaggggtgggggacagggggaccggaattgtcttagcaccccaatgttatgacaaaactatgctactttagaaacgcagtctgtttttcaccaattgacatactactgatctgaagtaaccagtgccatcataagaaattactgcattaagaaaatccttgctgtgccctttgaaaagctgttcagaaatcatttacagtgatctttcatctcggtcgctgtagtgaaacattttagtgtgataaatttcaaaattctaaacaaattacccacttttatattggaaatctctaccagaactccctcttcattttttaaggcatacatttgcttgttttcaagatcaagaattctgagctagctttaagtagcaaactgatttatatgtgcaattataggatgcattaagatgaatgatagcctttacatattgaaaactttgcagacgttttgttttgaaaatggcattgtatagtaaatgcaaattaattttgtaaaattatgttaaagagtatgttcagacactttctgccatggccaaaaagtatgtatgaaagtatgtgtgtatttgtttgtaaaaggatgccaatgttttacctgatatcttagtgacacttcagttatctatgcattctttagatctgtgattcggtaaacaggcagccatgttcacgatgccttctatgtcttaccatatttttaattaacctgttaaatacagcttaaaatatttttattttatttattctatttttactgaaatatactgcattattgtgttaatgtattatctttcctggatattatctcccagtgtatccagatctaagtaatctcagtgaactatacattgcctaaaaagtggttttgtaatgatttgtagtcacatttctattgggatatgtagaagaaaaggcaaaatgcttaaagttccttttattttttaaaagcagctagatagacacagacttgccacctcatacatctgctccttggcaacatcaaggggaacgactagccaacatgcctatggctaaaaactttcctttgcagactaaagcactgcttggtgcttcgtttttctacccttcacaacatgtgtgatttcatctaagagatatatacatgtacacatgccctttgtttccacctggatacaagatcactcatagctaattaggaccattgttttttgttcatctgtcttgttgcatgaagggacattagacccatttccattaaaataagttcttggtgataaactgtggcactgctacttctttttaaatccactttatgatttcaagatggacacttgtaagatgactcgacacaaggccattgcctggaagccccagagctttcctctgtttgtatggcccgttcatgtcccaggcattgcaacacaaactcctcaagatttcaccacaacatgacaagcattttcctaactgatattagcacaatttaactaataagccccttcgctctctagttggccaggcttaacctaatacacatctaacgtgtgtgccacacggccagtagaaagtttaacttcagcttcagggcaaagatacccactcacaccgtgtcaacgcaagcagtagttcctggcctccagagcagcttacttcccctgaaagaacgctttgttttcctttatgcccttttcctgttgaccacttttacacatttaaatgtaatttgttgtgagaataaatttagctgcataaaacgttcggctcatttatctgacatcttagtcacatatacaaggaatagaaatagaaactcggtgtctctagttatttttaaattattcttacctcagacttcttagaaatcactttagtaatggagcattttgctttgattagttactacatatttctgcctggtaagaactaggaagtaacttcaaattttgagtaatcaccctgtacttatttggtgatcaggaaggccagctggccttccggacatagaagcctatttagtcaccaactcgagtcttttgtaagcggtcttgctaggattgtgatattttagcacgaagaagtttatcacttcctttaagaacctgacatcaaagaataaagaatagaggtgtacacacactaaatccaaaatgaaaggtaactagagaaatcagttgaatctggtttagcttaactgttaggcgcaggaaggcagataaacagaatttaaagtatgtccccgctttttgttcatcttgcacttccacagtggtttctctctagtcagtaacaaaatttcattatggtttcaggcattatatggtggtaaataatttcagattaaaaatgtgtttgctattggagtatctgaatactagtaatttcattatttagaattttgcagcacttttatctcaagaagaagtccaagaatgtaaaatgccaaatgaaacatgtcagtggaatcaatattctccttcattagaattccctcatattgctttttttttttttcttcagacagaggagtcttactctggagtgcagtggtgtaatttcagctcaccacaacctccacctcccaagttcaagcaattctcgcctcagcctcctgagtagctgggattacaggcatgcaccgccacgcctggccaatttgtatatttttagtagagacagggtttcgccacgttggccaggctggtctcgaactcctgacctcaggtgatccgcccgccccaacctcccaaagtatgtgagccaccacgtccggcctcatattgcttttatccaaaattcttttcccttttcactctaccaaagtatttaaataatcctgtccttcatagaagattctcaaagaagaaaactgcagtgtaattaatgaatggtttaattcagaatcttcatatacttctaaagagaaaaataatttagtgccaaatgcatgttaggagataatcaatgtaagtggcaacaaattgtgacttcacatgctactgtagagatcagaaaattatcctaaactattccataacaatgagacaacatcacagaaaatacacttgaaaataaaaatctcaagaccagctacttctggacaatggaatacttttcagtctggtatggtggagggcccgaaaaggataagggattcttatgatacacaatgggattctttactgaacaatatgttaaattaagctgcaccgccttccttgaggcatggactaccctaaccaaccagatagaaatctgggtgggataagaggatgagccacacgctataattttagggcaaggagatagtgtttgattttcaaaatcagcaaaataagctgagcactttatatctttctgtacaagagtgataacatgaagaattcttcttcagggatttaaaatacaataagcctggttcaactataaaaagtcttgtttcctttcttcattgacacttttttttttttttttttttttttgaggcaaggtctcactctgcttcccaggctggagtgcagtggggcaatattggctcactgcaacctgcacctcctggactcaagagatcctcgtacctcagcctcctaagtagctgggactacaggcgtgtcccaccacacccagctaatttttgtattttttgtagagatggggttttggggtttcgccatgttgtccaggctcgtctggaactccggtgctcaagtggcgtgcccacctcagcctcccaaactgctgagattacagatgtgagccactgcacccagcccactgacacgttttactgataaatgtaaatctaagctaaaataaaaataatgtattaccgctataatacaattcaccattctcttttctcacttcaagtaagaaagtaaaaatagaatatcagagctgaagtagacctaagtattcatcttgaagaagataatattctaaaaatcatgccacctgaattgagcatttaggaatttatgtaacatttctatacaactgaattgcaaaaataaaactttaaattcaaacttt

SEQ ID NO: 1862 - DNA, 1804 bp, Homo sapiens
  source 1..1804: mol_type = unassigned DNA
ggagcagccggggttatgctgggcaaggattacatgctggccatcattctggtcaactgcgatgatgacttgtggggggaccacagtctggaggtggaggctggcctgcctcctggctggaggaagatccacgatgctgcaggtacttactactggcatgtacccagcggtagcacccagtggcagcgcccaacctgggaactaggagatgcagaggacccaggcacgggaacggaggggatctggggactgcggccccccaaagggagatccttctccagcctggagagttcactggaccggagtaactctctgtcctggtatggtggggaatcctacatccagagcatggagccaggggctaagtgctttgcagtccgctctctgggctgggtagaggtacctgaagaggacctggcaccggggaagagcagtattgcagtcaataactgtatccagcagctggcccagacccgcagccggagccagcctccagatggtgcctggggtgagggccagaacatgctgatgatcctgaagaaggatgccatgagcctagtgaatcccctggaccacagtctgatccactgccagcctctggtgcacatccgtgtgtggggcgtggggagctccaagggccgccccatctctgcccctgctagggacttcgcttttgtggcaagtgacaaagatagctgtatgctcaagtgccatgtgttttgctgtgatgtccctgccaaggccattgccagtgccctacatgggctttgtgcccagatcttgtcagagcgagtagaggtcagtggtgatgcctcttgctgctccccagaccccatctctcctgaagacctgccacggcaagtggagctgctggatgcggtaagccaagctgctcagaagtacgaggcactgtatatggggacactgccagtcaccaaggccatgggcatggatgtgctgaacgaggccattggtaccctcaccgccaggggggaccggaatgcctgggtccccaccatgctcagtgtgtctgactctctcatgactgcacaccccattcaggcagaggccagtacagaggaggagccattgtggcagtgccctgtgcgccttgtgacatttattggtgttggccgcgacccacacacctttggcctcatcgctgacctgggccgtcagagcttccagtgcgcagccttctggtgccagccccatgcagggggactctctgaagctgtgcaggctgcctgtatggttcagtaccagaagtgtcttgtggcctctgcagctcgaggcaaggcctggggtgcccaggcccgtgcccgcctgcggctcaagcggaccagctccatggattccccaggaggtcccctgcccctccccctgctcaaaggaggggttggcggtgcaggggcaacccctcgaaagcggggtgtcttctcttttcttgatgccttccggctgaaaccctctctgctccatatgccctaaacttatctgggaaggctggggaagtaggctctgggtccatgcctaactctgtaccgttttattcctcaaggcctatagcctgtcactccttgaagccttctctgcctgtccctccgatccttgtccaccgtctatttattgcccaatttattgtttatacggatgactgggaggcactgcaccacaacgtaggaccctggctcccctttccttgggtccttgtgttccttgcccctgtccaaccctggacagttggctctacctcagtaacactttatagcaaaatcagtgcaaataaaaatccctcagtgac

SEQ ID NO: 1863 - DNA, 2218 bp, Homo sapiens
  source 1..2218: mol_type = unassigned DNA
acgtgaccccctcccgtcgagtctcaggctgcgtgtgagcgcactcacgaccggggcgcgatgatctcactcgtgcgcgagtgcgcgcggcgcatgttcggcgtgtcggtcttcaggcgcctgatgagttcatagttgggcggtggtgtcagcggtttcgctggcgttcgtgggcctcccccggacccacacacggaaacacgcaaccattcggggatccagacgcccgtttacacgcaccacccctgggcgggctgtgcggctcaggccctcccccgggaccggcccgtgtcccgccccgtgtcccgccccgtatttgtgcggcgccagctggccccgcagcctgcggcgcagagaggctgggcttgcaggcgcagtagctccagaggtcgcgctgggctgagagtgcgggccggcagaggctggcggggagcagccggggttatgctgggcaaggattacatgctggccatcattctggtcaactgcgatgatgacttgtggggggaccacagtctggaggtggaggctggcctgcctcctggctggaggaagatccacgatgctgcaggtacttactactggcatgtacccagcggtagcacccagtggcagcgcccaacctgggaactaggagatgcagaggacccaggcacgggaacggaggggatctggggactgcggccccccaaagggagatccttctccagcctggagagttcactggaccggagtaactctctgtcctggtatggtggggaatcctacatccagagcatggagccaggggctaagtgctttgcagtccgctctctgggctgggtagaggtacctgaagaggacctggcaccggggaagagcagtattgcagtcaataactgtatccagcagctggcccagacccgcagccggagccagcctccagatggtgcctggggtgagggccagaacatgctgatgatcctgaagaaggatgccatgagcctagtgaatcccctggaccacagtctgatccactgccagcctctggtgcacatccgtgtgtggggcgtggggagctccaagggccgtgacagggacttcgcttttgtggcaagtgacaaagatagctgtatgctcaagtgccatgtgttttgctgtgatgtccctgccaaggccattgccagtgccctacatgggctttgtgcccagatcttgtcagagcgagtagaggtcagtggtgatgcctcttgctgctccccagaccccatctctcctgaagacctgccacggcaagtggagctgctggatgcggtaagccaagctgctcagaagtacgaggcactgtatatggggacactgccagtcaccaaggccatgggcatggatgtgctgaacgaggccattggtaccctcaccgccaggggggaccggaatgcctgggtccccaccatgctcagtgtgtctgactctctcatgactgcacaccccattcaggcagaggccagtacagaggaggagccattgtggcagtgccctgtgcgccttgtgacatttattggtgttggccgcgacccacacacctttggcctcatcgctgacctgggccgtcagagcttccagtgcgcagccttctggtgccagccccatgcagggggactctctgaagctgtgcaggctgcctgtatggttcagtaccagaagtgtcttgtggcctctgcagctcgaggcaaggcctggggtgcccaggcccgtgcccgcctgcggctcaagcggaccagctccatggattccccaggaggtcccctgcccctccccctgctcaaaggaggggttggcggtgcaggggcaacccctcgaaagcggggtgtcttctcttttcttgatgccttccggctgaaaccctctctgctccatatgccctaaacttatctgggaaggctggggaagtaggctctgggtccatgcctaactctgtaccgttttattcctcaaggcctatagcctgtcactccttgaagccttctctgcctgtccctccgatccttgtccaccgtctatttattgcccaatttattgtttatacggatgactgggaggcactgcaccacaacgtaggaccctggctcccctttccttgggtccttgtgttccttgcccctgtccaaccctggacagttggctctacctcagtaacactttatagcaaaatcagtgcaaataaaaatccctcagtgac

SEQ ID NO: 1864 - DNA, 1748 bp, Homo sapiens
  source 1..1748: mol_type = unassigned DNA
ggctgggcttgcaggcgcagtagctccagaggtcgcgctgggctgagagtgcgggccggcagaggctggcggggagcagccggggttatgctgggcaaggattacatgctggccatcattctggtcaactgcgatgatgacttgtggggggaccacagtctggaggtggaggctggcctgcctcctggctggaggaagatccacgatgctgcaggtacttactactggcatgtacccagcggtagcacccagtggcagcgcccaacctgggaactaggagatgcagaggacccaggcacgggaacggaggggatctggggactgcggccccccaaagggagatccttctccagcctggagagttcactggaccggagtaactctctgtcctggtatggtggggaatcctacatccagagcatggagccaggggctaagtgctttgcagtccgctctctgggctgggtagaggtacctgaagaggacctggcaccggggaagagcagtattgcagtcaataactgtatccagcagctggcccagacccgcagccggagccagcctccagatggtgcctggggtgagggccagaacatgctgatgatcctgaagaaggatgccatgagcctagtgaatcccctggaccacagtctgatccactgccagcctctggtgcacatccgtgtgtggggcgtggggagctccaagggccgtgacagggacttcgcttttgtggcaagtgacaaagatagctgtatgctcaagtgccatgtgttttgctgtgatgtccctgccaaggccattgccagtgccctacatgggctttgtgcccagatcttgtcagagcgagtagaggtcagtggtgatgcctcttgctgctccccagaccccatctctcctgaagacctgccacggcaagtggagctgctggatgcggtaagccaagctgctcagaagtacgaggcactgtatatggggacactgccagtcaccaaggccatgggcagaggccagtacagaggaggagccattgtggcagtgccctgtgcgccttgtgacatttattggtgttggccgcgacccacacacctttggcctcatcgctgacctgggccgtcagagcttccagtgcgcagccttctggtgccagccccatgcagggggactctctgaagctgtgcaggctgcctgtatggttcagtaccagaagtgtcttgtggcctctgcagctcgaggcaaggcctggggtgcccaggcccgtgcccgcctgcggctcaagcggaccagctccatggattccccaggaggtcccctgcccctccccctgctcaaaggaggggttggcggtgcaggggcaacccctcgaaagcggggtgtcttctcttttcttgatgccttccggctgaaaccctctctgctccatatgccctaaacttatctgggaaggctggggaagtaggctctgggtccatgcctaactctgtaccgttttattcctcaaggcctatagcctgtcactccttgaagccttctctgcctgtccctccgatccttgtccaccgtctatttattgcccaatttattgtttatacggatgactgggaggcactgcaccacaacgtaggaccctggctcccctttccttgggtccttgtgttccttgcccctgtccaaccctggacagttggctctacctcagtaacactttatagcaaaatcagtgcaaataaaaatccctcagtgacctc

SEQ ID NO: 1865 - DNA, 1455 bp, Homo sapiens
  source 1..1455: mol_type = unassigned DNA
atgctgggcaaggattacatgctggccatcattctggtcaactgcgatgatgacttgtggggggaccacagtctggaggtggaggctggcctgcctcctggctggaggaagatccacgatgctgcaggtacttactactggcatgtacccagcggtagcacccagtggcagcgcccaacctgggaactaggagatgcagaggacccaggcacgggaacggaggggatctggggactgcggccccccaaagggagatccttctccagcctggagagttcactggaccggagtaactctctgtcctggtatggtggggaatcctacatccagagcatggagccaggggctaagtgctttgcagtccgctctctgggctgggtagaggtacctgaagaggacctggcaccggggaagagcagtattgcagtcaataactgtatccagcagctggcccagacccgcagccggagccagcctccagatggtgcctggggtgagggccagaacatgctgatgatcctgaagaaggatgccatgagcctagtgaatcccctggaccacagtctgatccactgccagcctctggtgcacatccgtgtgtggggcgtggggagctccaagggccgggacttcgcttttgtggcaagtgacaaagatagctgtatgctcaagtgccatgtgttttgctgtgatgtccctgccaaggccattgccagtgccctacatgggctttgtgcccagatcttgtcagagcgagtagaggtcagtggtgatgcctcttgctgctccccagaccccatctctcctgaagacctgccacggcaagtggagctgctggatgcggtaagccaagctgctcagaagtacgaggcactgtatatggggacactgccagtcaccaaggccatgggcatggatgtgctgaacgaggccattggtaccctcaccgccaggggggaccggaatgcctgggtccccaccatgctcagtgtgtctgactctctcatgactgcacaccccattcaggcagaggccagtacagaggaggagccattgtggcagtgccctgtgcgccttgtgacatttattggtgttggccgcgacccacacacctttggcctcatcgctgacctgggccgtcagagcttccagtgcgcagccttctggtgccagccccatgcagggggactctctgaagctgtgcaggctgcctgtatggttcagtaccagaagtgtcttgtggcctctgcagctcgaggcaaggcctggggtgcccaggcccgtgcccgcctgcggctcaagcggaccagctccatggattccccaggaggtcccctgcccctccccctgctcaaaggaggggttggcggtgcaggggcaacccctcgaaagcggggtgtcttctcttttcttgatgccttccggctgaaaccctctctgctccatatgccctaa

SEQ ID NO: 1866 - DNA, 1920 bp, Homo sapiens
  source 1..1920: mol_type = unassigned DNA
atgctgggcaaggattacatgctggccatcattctggtcaactgcgatgatgacttgtggggggaccacagtctggaggtggaggctggcctgcctcctggctggaggaagatccacgatgctgcaggtacttactactggcatgtacccagcggtagcacccagtggcagcgcccaacctgggaactaggagatgcagaggacccaggcacgggaacggaggggatctggggactgcggccccccaaagggagatccttctccagcctggagagttcactggaccggagtaactctctgtcctggtatggtggggaatcctacatccagagcatggagccaggggctaagtgctttgcagtccgctctctgggctgggtagaggtacctgaagaggacctggcaccggggaagagcagtattgcagtcaataactgtatccagcagctggcccagacccgcagccggagccagcctccagatggtgcctggggtgagggccagaacatgctgatgatcctgaagaaggatgccatgagcctagtgaatcccctggaccacagtctgatccactgccagcctctggtgcacatccgtgtgtggggcgtggggagctccaagggccgatcctctgatgtggacccaggactgcttcccctgcctggtccagccctggttggggagggtgggcccagctcagcagggacagtttggggagagtccgagaggctgggctgattcccttctgtgctcccacatgcttccggaacagtgacagggacttcgcttttgtggcaagtgacaaagatagctgtatgctcaagtgccatgtgttttgctgtgatgtccctgccaaggccattgccagtgccctacatgggctttgtgcccagatcttgtcagagcgagtagaggtcagtggtgatgcctcttgctgctccccagaccccatctctcctgaagacctgccacggcaagtggagctgctggatgcggtaagccaagctgctcagaagtacgaggcactgtatatggggacactgccagtcaccaaggccatgggcatggatgtgctgaacgaggccattggtaccctcaccgccaggggggaccggaatgcctgggtccccaccatgctcagtgtgtctgactctctcatgactgcacaccccattcaggcagaggccagtacagaggaggagccattgtggcagtgccctgtgcgccttgtgacatttattggtgttggccgcgacccacacacctttggcctcatcgctgacctgggccgtcagagcttccagtgcgcagccttctggtgccagccccatgcagggggactctctgaagctgtgcaggctgcctgtatggttcagtaccagaagtgtcttgtggcctctgcagctcgaggcaaggcctggggtgcccaggcccgtgcccgcctgcggctcaagcggaccagctccatggattccccaggaggtcccctgcccctccccctgctcaaaggaggggttggcggtgcaggggcaacccctcgaaagcggggtgtcttctcttttcttgatgccttccggctgaaaccctctctgctccatatgccctaaacttatctgggaaggctggggaagtaggctctgggtccatgcctaactctgtaccgttttattcctcaaggcctatagcctgtcactccttgaagccttctctgcctgtccctccgatccttgtccaccgtctatttattgcccaatttattgtttatacggatgactgggaggcactgcaccacaacgtaggaccctggctcccctttccttgggtccttgtgttccttgcccctgtccaaccctggacagttggctctacctcagtaacactttatagcaaaatcagtgcaaataaaaatccctcagtgac

SEQ ID NO: 1867 - DNA, 2032 bp, Homo sapiens
  source 1..2032: mol_type = unassigned DNA
gtgcggcgccagctggccccgcagcctgcggcgcagagaggctgggcttgcaggcgcagtagctccagaggtcgcgctgggctgagagtgcgggccggcagaggctggcggggagcagccggggttatgctgggcaaggattacatgctggccatcattctggtcaactgcgatgatgacttgtggggggaccacagtctggaggtggaggctggcctgcctcctggctggaggaagatccacgatgctgcaggtacttactactggcatgtacccagcggtagcacccagtggcagcgcccaacctgggaactaggagatgcagaggacccaggcacgtgctttgcagtccgctctctgggctgggtagaggtacctgaagaggacctggcaccggggaagagcagtattgcagtcaataactgtatccagcagctggcccagacccgcagccggagccagcctccagatggtgcctggggtgagggccagaacatgctgatgatcctgaagaaggatgccatgagcctagtgaatcccctggaccacagtctgatccactgccagcctctggtgcacatccgtgtgtggggcgtggggagctccaagggccggtgaggatgcctacatcccccaagcaagagctacttctccctcccggctgcaggctgtgatccccactgatgctgatccccagtacttgaacccctggacacagatcctctgatgtggacccaggactgcttcccctgcctggtccagccctggttggggagggtgggcccagctcagcagggacagtttggggagagtccgagaggctgggctgattcccttctgtgctcccacatgcttccggaacagtgacaggtgagtgaaaaccaggtatcctgagccccatccctgatgtccctactccatccctgctatatccctagcctgactttccagcctcctgcaggctcctgcctctaaccagcttctaccccagccccatctctgcccctgctagggacttcgcttttgtggcaagtgacaaagatagctgtatgctcaagtgccatgtgttttgctgtgatgtccctgccaaggccattgccagtgccctacatgggctttgtgcccagatcttgtcagagcgagtagaggtcagtggtgatgcctcttgctgctccccagaccccatctctcctgaagacctgccacggcaagtggagctgctggatgcggtaagccaagctgctcagaagtacgaggcactgtatatggggacactgccagtcaccaaggccatgggcatggatgtgctgaacgaggccattggtaccctcaccgccaggggggaccggaatgcctgggtccccaccatgctcagtgtgtctgactctctcatgactgcacaccccattcaggcagaggccagtacagaggaggagccattgtggcagtgccctgtgcgccttgtgacatttattggtgttggccgcgacccacacacctttggcctcatcgctgacctgggccgtcagagcttccagtgcgcagccttctggtgccagccccatgcagggggactctctgaagctgtgcaggctgcctgtatggttcagtaccagaagtgtcttgtggcctctgcagctcgaggcaaggcctggggtgcccaggcccgtgcccgcctgcggctcaagcggaccagctccatggattccccaggaggtcccctgcccctccccctgctcaaaggaggggttggcggtgcaggggcaacccctcgaaagcggggtgtcttctcttttcttgatgccttccggctgaaaccctctctgctccatatgccctaaacttatctgggaaggctggggaagtaggctctgggtccatgcctaactctgtaccgttttattcctcaaggcctatagcctgtcactccttgaagccttctctgcctgtccctccgatccttgtccaccgtctatttattgcccaatttattgtttatacggatgactgggaggcactgcaccacaacgta

SEQ ID NO: 1868 - DNA, 2020 bp, Homo sapiens
  source 1..2020: mol_type = unassigned DNA
ggctgggcttgcaggcgcagtagctccagaggtcgcgctgggctgagagtgcgggccggcagaggctggcggggagcagccggggttatgctgggcaaggattacatgctggccatcattctggtcaactgcgatgatgacttgtggggggaccacagtctggaggtggaggctggcctgcctcctggctggaggaagatccacgatgctgcaggtacttactactggcatgtacccagcggtagcacccagtggcagcgcccaacctgggaactaggagatgcagaggacccaggcacgggaacggaggggatctggggactgcggccccccaaagggagatccttctccagcctggagagttcactggaccggagtaactctctgtcctggtatggtggggaatcctacatccagagcatggagccaggggctaagtgctttgcagtccgctctctgggctgggtagaggtacctgaagaggacctggcaccggggaagagcagtattgcagtcaataactgtatccagcagctggcccagacccgcagccggagccagcctccagatggtgcctggggtgagggccagaacatgctgatgatcctgaagaaggatgccatgagcctagtgaatcccctggaccacagtctgatccactgccagcctctggctgtgatccccactgatgctgatccccagtacttgaacccctggacacagatcctctgatgtggacccaggactgcttcccctgcctggtccagccctggttggggagggtgggcccagctcagcagggacagtttggggagagtccgagaggctgggctgattcccttctgtgctcccacatgcttccggaacagtgacagggacttcgcttttgtggcaagtgacaaagatagctgtatgctcaagtgccatgtgttttgctgtgatgtccctgccaaggccattgccagtgccctacatgggctttgtgcccagatcttgtcagagcgagtagaggtcagtggtgatgcctcttgctgctccccagaccccatctctcctgaagacctgccacggcaagtggagctgctggatgcggtaagccaagctgctcagaagtacgaggcactgtatatggggacactgccagtcaccaaggccatgggcatggatgtgctgaacgaggccattggtaccctcaccgccaggggggaccggaatgcctgggtccccaccatgctcagtgtgtctgactctctcatgactgcacaccccattcaggcagaggccagtacagaggaggagccattgtggcagtgccctgtgcgccttgtgacatttattggtgttggccgcgacccacacacctttggcctcatcgctgacctgggccgtcagagcttccagtgcgcagccttctggtgccagccccatgcagggggactctctgaagctgtgcaggctgcctgtatggttcagtaccagaagtgtcttgtggcctctgcagctcgaggcaaggcctggggtgcccaggcccgtgcccgcctgcggctcaagcggaccagctccatggattccccaggaggtcccctgcccctccccctgctcaaaggaggggttggcggtgcaggggcaacccctcgaaagcggggtgtcttctcttttcttgatgccttccggctgaaaccctctctgctccatatgccctaaacttatctgggaaggctggggaagtaggctctgggtccatgcctaactctgtaccgttttattcctcaaggcctatagcctgtcactccttgaagccttctctgcctgtccctccgatccttgtccaccgtctatttattgcccaatttattgtttatacggatgactgggaggcactgcaccacaacgtaggaccctggctcccctttccttgggtccttgtgttccttgcccctgtccaaccctggacagttggctctacctcagtaacactttatagcaaaatcagtgcaaataaaaatccctcagtgacctc

SEQ ID NO: 1869 - DNA, 2450 bp, Homo sapiens
  source 1..2450: mol_type = unassigned DNA
ggggcggggctggcggcgccggcgcagcccgggggcggcgggaggaggaggtggcggcggtggcgctgggagctcctgtcaccgctggggccgggccgggcgggagtgcaggggacgtgagggcgcaagggccgggacatggggcccgccagccccgctgctcgcggtctaagtcgccgcccgggccagccgccgctgccgctgctgctgccactattgctgctgcttctgcgcgcgcagcccgccatcgggagcctggccggtgggagccccggcgcggccgaggccccggggtcggcccaggtggctggactatgcgggcgcctaacccttcaccgggacctgcgcaccggccgctgggaaccagacccacagcgctctcgacgctgtctccgggacccgcagcgcgtgctggagtactgcagacagatgtacccggagctgcagattgcacgtgtggagcaggctacgcaggccatccccatggagcgctggtgcgggggttcccggagcggcagctgcgcccacccccaccaccaggttgtgcccttccgctgcctgcctggtgaatttgtgagtgaggccctgctggtgcctgaaggctgccggttcttgcaccaggagcgcatggaccaatgtgagagttcaacccggaggcatcaggaggcacaggaggcctgcagctcccagggcctcatcctgcacggctcgggcatgctcttaccctgtggctcggatcggttccgtggtgtggagtatgtgtgctgtccccctccagggacccccgacccatctgggacagcagttggtgacccctccacccggtcctggcccccggggagcagagtagagggggctgaggacgaggaagaggaggaatccttcccacagccagtagatgattacttcgtggagcctccgcaggctgaagaggaagaggaaacggtcccacccccaagctcccatacacttgcagtggtcggcaaagtcactcccaccccgaggcccacagacggtgtggatatttactttggcatgcctggggaaatcagtgagcacgaggggttcctgagggccaagatggacctggaggagcgtaggatgcgccagattaatgaggtgatgcgtgaatgggccatggcagacaaccagtccaagaacctgcctaaagccgacagacaggccctgaatgagcacttccagtccattctgcagactctggaggagcaggtgtctggtgagcgacagcgcctggtggaaacccacgccacccgcgtcatcgcccttatcaacgaccagcgccgggctgccttggagggcttcctggcagccctgcaggcagatccgcctcaggcggagcgtgtcctgttggccctgcggcgctacctgcgtgcggagcagaaggaacagaggcacacgctgcgccactaccagcatgtggccgccgtggatcccgagaaggcacagcagatgcgcttccaggtgcatacccaccttcaagtgattgaggagagggtgaatcagagcctgggcctgcttgaccagaacccccacctggctcaggagctgcggccccaaatccaggaactcctccactctgaacacctgggtcccagtgaattggaagcccctgcccctgggggcagcagcgaggacaagggtgggctgcagcctccagattccaaggatgcagacacccccatgacccttccaaaagggtccacagaacaagatgctgcatcccctgagaaagagaagatgaacccgctggaacagtatgagcgaaaggtgaatgcgtctgttccaaggggtttccctttccactcatcggagattcagagggatgagctggcaccagctgggacaggggtgtcccgtgaggctgtgtcgggtctgctgatcatgggagcgggcggaggctccctcatcgtcctctccatgctgctcctgcgcaggaagaagccctacggggctatcagccatggcgtggtggaggtggaccccatgctgaccctggaggagcagcagctccgcgaactgcagcggcacggctatgagaaccccacttaccgcttcctggaggaacgaccctgacccggcccccttcaccccttcagccgagcccagacctcccctcttcctggagccccagaaccccaactcccagcctagggcagcagggagtcttgaagtgatcatttcacacccttttgtgagacggctggaaattcttatttcccctttccaattccaaaattccatccctaagaattcccagatagtcccagcagcctccccacgtggcacctcctcaccttaatttattttttaagtttatttatggctctttaaggtgaccgccaccttggtcctagtgtctattccctggaattcaccctctcatgtttccctactaacatcccaataaagtcctcttccctaccaggcca

SEQ ID NO: 1870 - DNA, 1929 bp, Homo sapiens
  source 1..1929: mol_type = unassigned DNA
ggtctctgatgcttgcatccttggaaaaggacaaaactgccccggggtcggcccaggtggctggactatgcgggcgcctaacccttcaccgggacctgcgcaccggccgctgggaaccagacccacagcgctctcgacgctgtctccgggacccgcagcgcgtgctggagtactgcagacagatgtacccggagctgcagattgcacgtgtggagcaggctacgcaggccatccccatggagcgctggtgcgggggttcccggagcggcagctgcgcccacccccaccaccaggttgtgcccttccgctgcctgcctggtgaatttgtgagtgaggccctgctggtgcctgaaggctgccggttcttgcaccaggagcgcatggaccaatgtgagagttcaacccggaggcatcaggaggcacaggaggcctgcagctcccagggcctcatcctgcacggctcgggcatgctcttaccctgtggctcggatcggttccgtggtgtggagtatgtgtgctgtccccctccagggacccccgacccatctgggacagcagttggtgacccctccacccggtcctggcccccggggagcagagtagagggggctgaggacgaggaagaggaggaatccttcccacagccagtagatgattacttcgtggagcctccgcaggctgaagaggaagaggaaacggtcccacccccaagctcccatacacttgcagtggtcggcaaagtcactcccaccccgaggcccacagacggtgtggatatttactttggcatgcctggggaaatcagtgagcacgaggggttcctgagggccaagatggacctggaggagcgtaggatgcgccagattaatgaggtgatgcgtgaatgggccatggcagacaaccagtccaagaacctgcctaaagccgacagacaggccctgaatgagcacttccagtccattctgcagactctggaggagcaggtgtctggtgagcgacagcgcctggtggaaacccacgccacccgcgtcatcgcccttatcaacgaccagcgccgggctgccttggagggcttcctggcagccctgcaggcagatccgcctcaggcggagcgtgtcctgttggccctgcggcgctacctgcgtgcggagcagaaggaacagaggcacacgctgcgccactaccagcatgtggccgccgtggatcccgagaaggcacagcagatgcgcttccaggtgcatacccaccttcaagtgattgaggagagggtgaatcagagcctgggcctgcttgaccagaacccccacctggctcaggagctgcggccccaaatccaggaactcctccactctgaacacctgggtcccagtgaattggaagcccctgcccctgggggcagcagcgaggacaagggtgggctgcagcctccagattccaaggatgacacccccatgacccttccaaaagggtccacagaacaagatgctgcatcccctgagaaagagaagatgaacccgctggaacagtatgagcgaaaggtgaatgcgtctgttccaaggggtttccctttccactcatcggagattcagagggatgagctggcaccagctgggacaggggtgtcccgtgaggctgtgtcgggtctgctgatcatgggagcgggcggaggctccctcatcgtcctctccatgctgctcctgcgcaggaagaagccctacggggctatcagccatggcgtggtggaggtggaccccatgctgaccctggaggagcagcagctccgcgaactgcagcggcacggctatgagaaccccacttaccgcttcctggaggaacgaccctgacccggcccccttcaccccttcagccgagcccagacctcccctcttcctggagccccagaaccccaactcccagcctagggcagca

SEQ ID NO: 1871 - DNA, 3720 bp, Homo sapiens
  source 1..3720: mol_type = unassigned DNA
gtcgcggtgtgctaagcgaggagtccgagtgtgtgagcttgagagccgcgcgctagagcgacccggcgagggatggcggccaccgggaccgcggccgccgcagccacgggcaggctcctgcttctgctgctggtggggctcacggcgcctgccttggcgctggccggctacatcgaggctcttgcagccaatgccggaacaggatttgctgttgctgagcctcaaatcgcaatgttttgtgggaagttaaatatgcatgtgaacattcagactgggaaatgggaacctgatccaacaggcaccaagagctgctttgaaacaaaagaagaagttcttcagtactgtcaggagatgtatccagagctacagatcacaaatgtgatggaggcaaaccagcgggttagtattgacaactggtgccggagggacaaaaagcaatgcaagagtcgctttgttacacctttcaagtgtctcgtgggtgaatttgtaagtgatgtcctgctagttccagaaaagtgccagtttttccacaaagagcggatggaggtgtgtgagaatcaccagcactggcacacggtagtcaaagaggcatgtctgactcagggaatgaccttatatagctacggcatgctgctcccatgtggggtagaccagttccatggcactgaatatgtgtgctgccctcagacaaagattattggatctgtgtcaaaagaagaggaagaggaagatgaagaggaagaggaagaggaagatgaagaggaagactatgatgtttataaaagtgaatttcctactgaagcagatctggaagacttcacagaagcagctgtggatgaggatgatgaggatgaggaagaaggggaggaagtggtggaggaccgagattactactatgacaccttcaaaggagatgactacaatgaggagaatcctactgaacccggcagcgacggcaccatgtcagacaaggaaattactcatgatgtcaaagctgtctgctcccaggaggcgatgacggggccctgccgggccgtgatgcctcgttggtacttcgacctctccaagggaaagtgcgtgcgctttatatatggtggctgcggcggcaacaggaacaattttgagtctgaggattattgtatggctgtgtgtaaagcgatgattcctccaactcctctgccaaccaatgatgttgatgtgtatttcgagacctctgcagatgataatgagcatgctcgcttccagaaggctaaggagcagctggagattcggcaccgcaaccgaatggacagggtaaagaaggaatgggaagaggcagagcttcaagctaagaacctccccaaagcagagaggcagactctgattcagcacttccaagccatggttaaagctttagagaaggaagcagccagtgagaagcagcagctggtggagacccacctggcccgagtggaagctatgctgaatgaccgccgtcggatggctctggagaactacctggctgccttgcagtctgacccgccacggcctcatcgcattctccaggccttacggcgttatgtccgtgctgagaacaaagatcgcttacataccatccgtcattaccagcatgtgttggctgttgacccagaaaaggcggcccagatgaaatcccaggtgatgacacatctccacgtgattgaagaaaggaggaaccaaagcctctctctgctctacaaagtaccttatgtagcccaagaaattcaagaggaaattgatgagctccttcaggagcagcgtgcagatatggaccagttcactgcctcaatctcagagacccctgtggacgtccgggtgagctctgaggagagtgaggagatcccaccgttccaccccttccaccccttcccagccctacctgagaacgaagacactcagccggagttgtaccacccaatgaaaaaaggatctggagtgggagagcaggatgggggactgatcggtgccgaagagaaagtgattaacagtaagaataaagtggatgaaaacatggtcattgacgagactctggatgttaaggaaatgattttcaatgccgagagagttggaggcctcgaggaagagcgggaatccgtgggcccactgcgggaggacttcagtctgagtagcagtgctctcattggcctgctggtcatcgcagtggccattgccacggtcatcgtcatcagcctggtgatgctgaggaagaggcagtatggcaccatcagccacgggatcgtggaggttgatccaatgctcaccccagaagagcgtcacctgaacaagatgcagaaccatggctatgagaaccccacctacaaatacctggagcagatgcagatttaggtggcagggagcgcggcagccctggcggagggatgcaggtgggccggaagatcccacgattccgatcgactgccaagcagcagccgctgccaggggctgcgtctgacatcctgacctcctggactgtaggactatataaagtactactgtagaactgcaatttccattcttttaaatgggtgaaaaatggtaatataacaatatatgatatataaaccttaaatgaaaaaaatgatctattgcagatatttgatgtagttttcttttttaaattaatcagaaaccccacttccattgtattgtctgacacatgctctcaatatataataaatgggaaatgtcgattttcaataatagacttatatgcaggctgtcgttccggttatgttgtgtaagtcaactcttcagcctcattcactgtcctggcttttatttaaagaaaaaaaaggcagtattccctttttaaatgagctttcaggaagttgctgagaaatggggtggaatagggaactgtaatggccactgaagcacgtgagagaccctcgcaaaatgatgtgaaaggaccagtttcttgaagtccagtgtttccacggctggatacctgtgtgtctccataaaagtcctgtcaccaaggacgttaaaggcattttattccagcgtcttctagagagcttagtgtatacagatgagggtgtccgctgctgctttccttcggaatccagtgcttccacagagattagcctgtagcttatatttgacattcttcactgtctgttgtttacctaccgtagctttttaccgttcacttccccttccaactatgtccagatgtgcaggctcctcctctctggactttctccaaaggcactgaccctcggcctctactttgtcccctcacctccaccccctcctgtcaccggccttgtgacattcactcagagaagaccacaccaaggaggcggccgctggcccaggagagaacacggggaggtttgtttgtgtgaaaggaaagtagtccaggctgtccctgaaactgagtctgtggacactgtggaaagctttgaacaattgtgttttcgtcacaggagtctttgtaatgcttgtacagttgatgtcgatgctcactgcttctgctttttctttctttttattttaaatctgaaggttctggtaacctgtggtgtatttttattttcctgtgactgtttttgttttgtttttttcctttttcctcccctttgaccctattcatgtctctacccactatgcacagattaaacttcacctacaaactccttaatatgatctgtggagaatgtacacagtttaaacacatcaataaatactttaacttcc

SEQ ID NO: 1872 - DNA, 3687 bp, Homo sapiens
  source 1..3687: mol_type = unassigned DNA
tttgttgccaggtggacgcggccccggccttcgcgcgcggcagggatgctgcgagccccgggggagctcccgcgccaggccgcccgctgctccctctgccgcctggggccgggtcgcggacgcgcattttttaagtggcgctgtttgcctgcgtccgtagaccgaggaaacccgctctgggctcttgcagccaatgccggaacaggatttgctgttgctgagcctcaaatcgcaatgttttgtgggaagttaaatatgcatgtgaacattcagactgggaaatgggaacctgatccaacaggcaccaagagctgctttgaaacaaaagaagaagttcttcagtactgtcaggagatgtatccagagctacagatcacaaatgtgatggaggcaaaccagcgggttagtattgacaactggtgccggagggacaaaaagcaatgcaagagtcgctttgttacacctttcaagtgtctcgtgggtgaatttgtaagtgatgtcctgctagttccagaaaagtgccagtttttccacaaagagcggatggaggtgtgtgagaatcaccagcactggcacacggtagtcaaagaggcatgtctgactcagggaatgaccttatatagctacggcatgctgctcccatgtggggtagaccagttccatggcactgaatatgtgtgctgccctcagacaaagattattggatctgtgtcaaaagaagaggaagaggaagatgaagaggaagaggaagaggaagatgaagaggaagactatgatgtttataaaagtgaatttcctactgaagcagatctggaagacttcacagaagcagctgtggatgaggatgatgaggatgaggaagaaggggaggaagtggtggaggaccgagattactactatgacaccttcaaaggagatgactacaatgaggagaatcctactgaacccggcagcgacggcaccatgtcagacaaggaaattactcatgatgtcaaagctgtctgctcccaggaggcgatgacggggccctgccgggccgtgatgcctcgttggtacttcgacctctccaagggaaagtgcgtgcgctttatatatggtggctgcggcggcaacaggaacaattttgagtctgaggattattgtatggctgtgtgtaaagcgatgattcctccaactcctctgccaaccaatgatgttgatgtgtatttcgagacctctgcagatgataatgagcatgctcgcttccagaaggctaaggagcagctggagattcggcaccgcaaccgaatggacagggtaaagaaggaatgggaagaggcagagcttcaagctaagaacctccccaaagcagagaggcagactctgattcagcacttccaagccatggttaaagctttagagaaggaagcagccagtgagaagcagcagctggtggagacccacctggcccgagtggaagctatgctgaatgaccgccgtcggatggctctggagaactacctggctgccttgcagtctgacccgccacggcctcatcgcattctccaggccttacggcgttatgtccgtgctgagaacaaagatcgcttacataccatccgtcattaccagcatgtgttggctgttgacccagaaaaggcggcccagatgaaatcccaggtgatgacacatctccacgtgattgaagaaaggaggaaccaaagcctctctctgctctacaaagtaccttatgtagcccaagaaattcaagaggaaattgatgagctccttcaggagcagcgtgcagatatggaccagttcactgcctcaatctcagagacccctgtggacgtccgggtgagctctgaggagagtgaggagatcccaccgttccaccccttccaccccttcccagccctacctgagaacgaaggatctggagtgggagagcaggatgggggactgatcggtgccgaagagaaagtgattaacagtaagaataaagtggatgaaaacatggtcattgacgagactctggatgttaaggaaatgattttcaatgccgagagagttggaggcctcgaggaagagcgggaatccgtgggcccactgcgggaggacttcagtctgagtagcagtgctctcattggcctgctggtcatcgcagtggccattgccacggtcatcgtcatcagcctggtgatgctgaggaagaggcagtatggcaccatcagccacgggatcgtggaggttgatccaatgctcaccccagaagagcgtcacctgaacaagatgcagaaccatggctatgagaaccccacctacaaatacctggagcagatgcagatttaggtggcagggagcgcggcagccctggcggagggatgcaggtgggccggaagatcccacgattccgatcgactgccaagcagcagccgctgccaggggctgcgtctgacatcctgacctcctggactgtaggactatataaagtactactgtagaactgcaatttccattcttttaaatgggtgaaaaatggtaatataacaatatatgatatataaaccttaaatgaaaaaaatgatctattgcagatatttgatgtagttttcttttttaaattaatcagaaaccccacttccattgtattgtctgacacatgctctcaatatataataaatgggaaatgtcgattttcaataatagacttatatgcaggctgtcgttccggttatgttgtgtaagtcaactcttcagcctcattcactgtcctggcttttatttaaagaaaaaaaaggcagtattccctttttaaatgagctttcaggaagttgctgagaaatggggtggaatagggaactgtaatggccactgaagcacgtgagagaccctcgcaaaatgatgtgaaaggaccagtttcttgaagtccagtgtttccacggctggatacctgtgtgtctccataaaagtcctgtcaccaaggacgttaaaggcattttattccagcgtcttctagagagcttagtgtatacagatgagggtgtccgctgctgctttccttcggaatccagtgcttccacagagattagcctgtagcttatatttgacattcttcactgtctgttgtttacctaccgtagctttttaccgttcacttccccttccaactatgtccagatgtgcaggctcctcctctctggactttctccaaaggcactgaccctcggcctctactttgtcccctcacctccaccccctcctgtcaccggccttgtgacattcactcagagaagaccacaccaaggaggcggccgctggcccaggagagaacacggggaggtttgtttgtgtgaaaggaaagtagtccaggctgtccctgaaactgagtctgtggacactgtggaaagctttgaacaattgtgttttcgtcacaggagtctttgtaatgcttgtacagttgatgtcgatgctcactgcttctgctttttctttctttttattttaaatctgaaggttctggtaacctgtggtgtatttttattttcctgtgactgtttttgttttgtttttttcctttttcctcccctttgaccctattcatgtctctacccactatgcacagattaaacttcacctacaaactccttaatatgatctgtggagaatgtacacagtttaaacacatcaataaatactttaacttcc

SEQ ID NO: 1873 - DNA, 3270 bp, Homo sapiens
  source 1..3270: mol_type = unassigned DNA
gcgaggagtccgagtgtgtgagcttgagagccgcgcgctagagcgacccggcgagggatggcggccaccgggaccgcggccgccgcagccacgggcaggctcctgcttctgctgctggtggggctcacggcgcctgccttggcgctggccggctacatcgaggctcttgcagccaatgccggaacaggatttgctgttgctgagcctcaaatcgcaatgttttgtgggaagttaaatatgcatgtgaacattcagactgggaaatgggaacctgatccaacaggcaccaagagctgctttgaaacaaaagaagaagttcttcagtactgtcaggagatgtatccagagctacagatcacaaatgtgatggaggcaaaccagcgggttagtattgacaactggtgccggagggacaaaaagcaatgcaagagtcgctttgttacacctttcaagtgtctcgtgggtgaatttgtaagtgatgtcctgctagttccagaaaagtgccagtttttccacaaagagcggatggaggtgtgtgagaatcaccagcactggcacacggtagtcaaagaggcatgtctgactcagggaatgaccttatatagctacggcatgctgctcccatgtggggtagaccagttccatggcactgaatatgtgtgctgccctcagacaaagattattggatctgtgtcaaaagaagaggaagaggaagatgaagaggaagaggaagaggaagatgaagaggaagactatgatgtttataaaagtgaatttcctactgaagcagatctggaagacttcacagaagcagctgtggatgaggatgatgaggatgaggaagaaggggaggaagtggtggaggaccgagattactactatgacaccttcaaaggagatgactacaatgaggagaatcctactgaacccggcagcgacggcaccatgtcagacaaggaaattactcatgatgtcaaagctgtctgctcccaggaggcgatgacggggccctgccgggccgtgatgcctcgttggtacttcgacctctccaagggaaagtgcgtgcgctttatatatggtggctgcggcggcaacaggaacaattttgagtctgaggattattgtatggctgtgtgtaaagcgatgattcctccaactcctctgccaaccaatgatgttgatgtgtatttcgagacctctgcagatgataatgagcatgctcgcttccagaaggctaaggagcagctggagattcggcaccgcaaccgaatggacagggtaaagaaggaatgggaagaggcagagcttcaagctaagaacctccccaaagcagagaggcagactctgattcagcacttccaagccatggttaaagctttagagaaggaagcagccagtgagaagcagcagctggtggagacccacctggcccgagtggaagctatgctgaatgaccgccgtcggatggctctggagaactacctggctgccttgcagtctgacccgccacggcctcatcgcattctccaggccttacggcgttatgtccgtgctgagaacaaagatcgcttacataccatccgtcattaccagcatgtgttggctgttgacccagaaaaggcggcccagatgaaatcccaggtgatgacacatctccacgtgattgaagaaaggaggaaccaaagcctctctctgctctacaaagtaccttatgtagcccaagaaattcaagaggaaattgatgagctccttcaggagcagcgtgcagatatggaccagttcactgcctcaatctcagagacccctgtggacgtccgggtgagctctgaggagagtgaggagatcccaccgttccaccccttccaccccttcccagccctacctgagaacgaaggatctggagtgggagagcaggatgggggactgatcggtgccgaagagaaagtgattaacagtaagaataaagtggatgaaaacatggtcattgacgagactctggatgttaaggaaatgattttcaatgccgagagagttggaggcctcgaggaagagcgggaatccgtgggcccactgcgggaggacttcagtctgagtagcagtgctctcattggcctgctggtcatcgcagtggccattgccacggtcatcgtcatcagcctggtgatgctgaggaagaggcagtatggcaccatcagccacgggatcgtggaggttgatccaatgctcaccccagaagagcgtcacctgaacaagatgcagaaccatggctatgagaaccccacctacaaatacctggagcagatgcagatttaggtggcagggagcgcggcagccctggcggagggatgcaggtgggccggaagatcccacgattccgatcgactgccaagcagcagccgctgccaggggctgcgtctgacatcctgacctcctggactgtaggactatataaagtactactgtagaactgcaatttccattcttttaaatgggtgaaaaatggtaatataacaatatatgatatataaaccttaaatgaaaaaaatgatctattgcagatatttgatgtagttttcttttttaaattaatcagaaaccccacttccattgtattgtctgacacatgctctcaatatataataaatgggaaatgtcgattttcaataatagacttatatgcaggctgtcgttccggttatgttgtgtaagtcaactcttcagcctcattcactgtcctggcttttatttaaagaaaaaaaaggcagtattccctttttaaatgagctttcaggaagttgctgagaaatggggtggaatagggaactgtaatggccactgaagcacgtgagagaccctcgcaaaatgatgtgaaaggaccagtttcttgaagtccagtgtttccacggctggatacctgtgtgtctccataaaagtcctgtcaccaaggacgttaaaggcattttattccagcgtcttctagagagcttagtgtatacagatgagggtgtccgctgctgctttccttcggaatccagtgcttccacagagattagcctgtagcttatatttgacattcttcactgtctgttgtttacctaccgtagctttttaccgttcacttccccttccaactatgtccagatgtgcaggctcctcctctctggactttctccaaaggcactgaccctcggcctctactttgtcccctcacctccaccccctcctgtcaccggccttgtgacattcactcagagaagaccacaccaagga

SEQ ID NO: 1874 - DNA, 1862 bp, Homo sapiens
  source 1..1862: mol_type = unassigned DNA
gctaagcgaggagtccgagtgtgtgagcttgagagccgcgcgctagagcgacccggcgagggatggcggccaccgggaccgcggccgccgcagccacgggcaggctcctgcttctgctgctggtggggctcacggcgcctgccttggcgctggccggctacatcgaggctcttgcagccaatgccggaacaggatttgctgttgctgagcctcaaatcgcaatgttttgtgggaagttaaatatgcatgtgaacattcagactgggaaatgggaacctgatccaacaggcaccaagagctgctttgaaacaaaagaagaagttcttcagtactgtcaggagatgtatccagagctacagatcacaaatgtgatggaggcaaaccagcgggttagtattgacaactggtgccggagggacaaaaagcaatgcaagagtcgctttgttacacctttcaagtgtctcgttcctccaactcctctgccaaccaatgatgttgatgtgtatttcgagacctctgcagatgataatgagcatgctcgcttccagaaggctaaggagcagctggagattcggcaccgcaaccgaatggacagggtaaagaaggaatgggaagaggcagagcttcaagctaagaacctccccaaagcagagaggcagactctgattcagcacttccaagccatggttaaagctttagagaaggaagcagccagtgagaagcagcagctggtggagacccacctggcccgagtggaagctatgctgaatgaccgccgtcggatggctctggagaactacctggctgccttgcagtctgacccgccacggcctcatcgcattctccaggccttacggcgttatgtccgtgctgagaacaaagatcgcttacataccatccgtcattaccagcatgtgttggctgttgacccagaaaaggcggcccagatgaaatcccaggtgatgacacatctccacgtgattgaagaaaggaggaaccaaagcctctctctgctctacaaagtaccttatgtagcccaagaaattcaagaggaaattgatgagctccttcaggagcagcgtgcagatatggaccagttcactgcctcaatctcagagacccctgtggacgtccgggtgagctctgaggagagtgaggagatcccaccgttccaccccttccaccccttcccagccctacctgagaacgaaggatctggagtgggagagcaggatgggggactgatcggtgccgaagagaaagtgattaacagtaagaataaagtggatgaaaacatggtcattgacgagactctggatgttaaggaaatgattttcaatgccgagagagttggaggcctcgaggaagagcgggaatccgtgggcccactgcgggaggacttcagtctgagtagcagtgctctcattggcctgctggtcatcgcagtggccattgccacggtcatcgtcatcagcctggtgatgctgaggaagaggcagtatggcaccatcagccacgggatcgtggaggttgatccaatgctcaccccagaagagcgtcacctgaacaagatgcagaaccatggctatgagaaccccacctacaaatacctggagcagatgcagatttaggtggcagggagcgcggcagccctggcggagggatgcaggtgggccggaagatcccacgattccgatcgactgccaagcagcagccgctgccaggggctgcgtctgacatcctgacctcctggactgtaggactatataaagtactactgtagaactgcaatttccattcttttaaatgggtgaaaaatggtaatataacaatatatgatatataaaccttaaatgaaaaaa

SEQ ID NO: 1875 - DNA, 2530 bp, Homo sapiens
  source 1..2530: mol_type = unassigned DNA
agatgcttctgggtcgcggtgtgctaagcgaggagtccgagtgtgtgagcttgagagccgcgcgctagagcgacccggcgagggatggcggccaccgggaccgcggccgccgcagccacgggcaggctcctgcttctgctgctggtggggctcacggcgcctgccttggcgctggccggctacatcgaggctcttgcagccaatgccggaacaggatttgctgttgctgagcctcaaatcgcaatgttttgtgggaagttaaatatgcatgtgaacattcagactgggaaatgggaacctgatccaacaggcaccaagagctgctttgaaacaaaagaagaagttcttcagtactgtcaggagatgtatccagagctacagatcacaaatgtgatggaggcaaaccagcgggttagtattgacaactggtgccggagggacaaaaagcaatgcaagagtcgctttgttacacctttcaagtgtctcgtgggtgaatttgtaagtgatgtcctgctagttccagaaaagtgccagtttttccacaaagagcggatggaggtgtgtgagaatcaccagcactggcacacggtagtcaaagaggcatgtctgactcagggaatgaccttatatagctacggcatgctgctcccatgtggggtagaccagttccatggcactgaatatgtgtgctgccctcagacaaagattattggatctgtgtcaaaagaagaggaagaggaagatgaagaggaagaggaagaggaagatgaagaggaagactatgatgtttataaaagtgaatttcctactgaagcagatctggaagacttcacagaagcagctgtggatgaggatgatgaggatgaggaagaaggggaggaagtggtggaggaccgagattactactatgacaccttcaaaggagatgactacaatgaggagaatcctactgaacccggcagcgacggcaccatgtcagacaaggaaattactcatgatgtcaaagttcctccaactcctctgccaaccaatgatgttgatgtgtatttcgagacctctgcagatgataatgagcatgctcgcttccagaaggctaaggagcagctggagattcggcaccgcaaccgaatggacagggtaaagaaggaatgggaagaggcagagcttcaagctaagaacctccccaaagcagagaggcagactctgattcagcacttccaagccatggttaaagctttagagaaggaagcagccagtgagaagcagcagctggtggagacccacctggcccgagtggaagctatgctgaatgaccgccgtcggatggctctggagaactacctggctgccttgcagtctgacccgccacggcctcatcgcattctccaggccttacggcgttatgtccgtgctgagaacaaagatcgcttacataccatccgtcattaccagcatgtgttggctgttgacccagaaaaggcggcccagatgaaatcccaggtgatgacacatctccacgtgattgaagaaaggaggaaccaaagcctctctctgctctacaaagtaccttatgtagcccaagaaattcaagaggaaattgatgagctccttcaggagcagcgtgcagatatggaccagttcactgcctcaatctcagagacccctgtggacgtccgggtgagctctgaggagagtgaggagatcccaccgttccaccccttccaccccttcccagccctacctgagaacgaaggatctggagtgggagagcaggatgggggactgatcggtgccgaagagaaagtgattaacagtaagaataaagtggatgaaaacatggtcattgacgagactctggatgttaaggaaatgattttcaatgccgagagagttggaggcctcgaggaagagcgggaatccgtgggcccactgcgggaggacttcagtctgagtagcagtgctctcattggcctgctggtcatcgcagtggccattgccacggtcatcgtcatcagcctggtgatgctgaggaagaggcagtatggcaccatcagccacgggatcgtggaggttgatccaatgctcaccccagaagagcgtcacctgaacaagatgcagaaccatggctatgagaaccccacctacaaatacctggagcagatgcagatttaggtggcagggagcgcggcagccctggcggagggatgcaggtgggccggaagatcccacgattccgatcgactgccaagcagcagccgctgccaggggctgcgtctgacatcctgacctcctggactgtaggactatataaagtactactgtagaactgcaatttccattcttttaaatgggtgaaaaatggtaatataacaatatatgatatataaaccttaaatgaaaaaaatgatctattgcagatatttgatgtagttttcttttttaaattaatcagaaaccccacttccattgtattgtctgacacatgctctcaatatataataaatgggaaatgtcgattttcaataataga

SEQ ID NO: 1876 - DNA, 560 bp, Homo sapiens
  source 1..560: mol_type = unassigned DNA
agatgcttctgggtcgcggtgtgctaagcgaggagtccgagtgtgtgagcttgagagccgcgcgctagagcgacccggcgagggatggcggccaccgggaccgcggccgccgcagccacgggcaggctcctgcttctgctgctggtggggctcacggcgcctgccttggcgctggccggctacatcgagtcttctcagatctgttgcagtccccggtctttcctgatcagcaccctcaaatgtctcattgtggatgagattaatgctcttgcagccaatgccggaacaggatttgctgttgctgagcctcaaatcgcaatgttttgtgggaagttaaatatgcatgtgaacattcagactgggaaatgggaacctgatccaacaggcaccaagagctgctttgaaacaaaagaagaagttcttcagtactgtcaggagatgtatccagagctacagatcacaaatgtgatggaggcaaaccagcgggttagtattgacaactggtgccggagggacaaaaagcaatgcaagagtcgctttgttacacctttcaagtgtct

SEQ ID NO: 1877 - DNA, 556 bp, Homo sapiens
  source 1..556: mol_type = unassigned DNA
agatgcttctgggtcgcggtgtgctaagcgaggagtccgagtgtgtgagcttgagagccgcgcgctagagcgacccggcgagggatggcggccaccgggaccgcggccgccgcagccacgggcaggctcctgcttctgctgctggtggggctcacggcgcctgccttggcgctggccggctacatcgaggctcttgcagccaatgccggaacaggatttgctgttgctgagcctcaaatcgcaatgttttgtgggaagttaaatatgcatgtgaacattcagactgggaaatgggaacctgatccaacaggcaccaagagctgctttgaaacaaaagaagaagttcttcagtactgtcaggagatgtatccagagctacagatcacaaatagcggatggaggtgtgtgagaatcaccagcactggcacacggtagtcaaagaggcatgtctgactcagggaatgaccttatatagctacggcatgctgctcccatgtggggtagaccagttccatggcactgaatatgtgtgctgccctcagacaaagattattgg

SEQ ID NO: 1878 - DNA, 1984 bp, Homo sapiens
  source 1..1984: mol_type = unassigned DNA
agatgcttctgggtcgcggtgtgctaagcgaggagtccgagtgtgtgagcttgagagccgcgcgctagagcgacccggcgagggatggcggccaccgggaccgcggccgccgcagccacgggcaggctcctgcttctgctgctggtggggctcacggcgcctgccttggcgctggccggctacatcgagtgggtgaatttgtaagtgatgtcctgctagttccagaaaagtgccagtttttccacaaagagcggatggaggtgtgtgagaatcaccagcactggcacacggtagtcaaagaggcatgtctgactcagggaatgaccttatatagctacggcatgctgctcccatgtggggtagaccagttccatggcactgaatatgtgtgctgccctcagacaaagattattggatctgtgtcaaaagaagaggaagaggaagatgaagaggaagaggaagaggaagatgaagaggaagactatgatgtttataaaagtgaatttcctactgaagcagatctggaagacttcacagaagcagctgtggatgaggatgatgaggatgaggaagaaggggaggaagtggtggaggaccgagattactactatgacaccttcaaaggagatgactacaatgaggagaatcctactgaacccggcagcgacggcaccatgtcagacaaggaaattactcatgatgtcaaagttcctccaactcctctgccaaccaatgatgttgatgtgtatttcgagacctctgcagatgataatgagcatgctcgcttccagaaggctaaggagcagctggagattcggcaccgcaaccgaatggacagggtaaagaaggaatgggaagaggcagagcttcaagctaagaacctccccaaagcagagaggcagactctgattcagcacttccaagccatggttaaagctttagagaaggaagcagccagtgagaagcagcagctggtggagacccacctggcccgagtggaagctatgctgaatgaccgccgtcggatggctctggagaactacctggctgccttgcagtctgacccgccacggcctcatcgcattctccaggccttacggcgttatgtccgtgctgagaacaaagatcgcttacataccatccgtcattaccagcatgtgttggctgttgacccagaaaaggcggcccagatgaaatcccaggtgatgacacatctccacgtgattgaagaaaggaggaaccaaagcctctctctgctctacaaagtaccttatgtagcccaagaaattcaagaggaaattgatgagctccttcaggagcagcgtgcagatatggaccagttcactgcctcaatctcagagacccctgtggacgtccgggtgagctctgaggagagtgaggagatcccaccgttccaccccttccaccccttcccagccctacctgagaacgaagacactcagccggagttgtaccacccaatgaaaaaaggatctggagtgggagagcaggatgggggactgatcggtgccgaagagaaagtgattaacagtaagaataaagtggatgaaaacatggtcattgacgagactctggatgttaaggaaatgattttcaatgccgagagagttggaggcctcgaggaagagcgggaatccgtgggcccactgcgggaggacttcagtctgagtagcagtgctctcattggcctgctggtcatcgcagtggccattgccacggtcatcgtcatcagcctggtgatgctgaggaagaggcagtatggcaccatcagccacgggatcgtggaggttgatccaatgctcaccccagaagagcgtcacctgaacaagatgcagaaccatggctatgagaaccccacctacaaatacctggagcagatgcagatttaggtggcagggagcgcggcagccctggcggagggatgcaggtgggccggaagatcccacgattccgatcgactgcc

SEQ ID NO: 1879 - DNA, 3687 bp, Homo sapiens; identical to SEQ ID NO: 1872
  source 1..3687: mol_type = unassigned DNA

SEQ ID NO: 1880 - DNA, 6468 bp, Homo sapiens
  source 1..6468: mol_type = unassigned DNA
gagatcagcgctgggacggaacccgggttcctctcgaaccgggattgtgacgcttttggcctggctggccgctgttttctgtcccactttttactcgggcctgcgtccgctgccgccgtccctcagtttgcccccggaggaggcagggcggccgtgccttctgccgtgcgcccgcgtggctgccaccgcccctccgaatcctccggggccgcagaggggttcgctacggagggaggtgggggccttcgggaggaggaggcggaggaggcggaggaggagggaaggaagatggcggccgtggaactagagtggatcccagagactctctataacaccgccatctccgctgtcgtggacaactacatccgctcccgccgagacatccgctccttgcccgagaacatccagtttgatgtttactacaagctttaccaacagggacgcttatgtcaactgggcagtgaattttgtgaattggaagtttttgctaaagtactgagagctttggataaaagacatttgcttcatcattgttttcaggctttgatggatcatggtgttaaagttgcttcagtcttggcctactcattcagtaggcggtgctcttatatagcagaatcagatgctgcagtaaaggaaaaagccattcaggttggctttgttttaggtggctttctttcagatgcaggctggtacagtgatgctgagaaagtttttctgtcctgccttcagttgtgtactctacacgatgagatgcttcattggtttcgtgcagtagaatgttgtgtgaggttgcttcatgtgcgaaatggaaactgcaaatatcatttgggtgaagaaacatttaaattagctcagacatatatggataaactatcaaaacatggccagcaagcaaataaagctgcactctatggagaactgtgtgcactcctatttgcaaaaagtcactatgatgaggcatacaaatggtgcatcgaggcaatgaaagaaattacagcaggcttaccagtgaaagttgtggtggatgtcttaagacaagcttctaaggcttgtgtagtaaaacgtgaatttaagaaggcagaacagttaattaaacatgcagtgtatttggcacgggatcattttggatccaaacacccaaaatattctgatacactgctagattatgggttctacttactcaatgtagataatatctgtcagtctgttgcaatttatcaggcagcccttgacattagacagtcagtgtttggtggcaaaaatatccacgtagcaacagctcatgaagatttggcctactcttcttatgtccaccagtatagctctgggaaatttgacaatgcactatttcatgcagaaagagctattggtatcattacccacatcctacctgaagatcatcttcttttggcttcttcaaagagggtgaaagcacttattttagaggagattgcaattgattgtcataataaggaaactgaacagaggctgcttcaagaagctcatgatttgcacctgtcttcactccaactagctaaaaaagcttttggggaatttaatgtacagactgcaaaacactatggaaaccttggaagactttatcagtcaatgagaaaatttaaggaagctgaagaaatgcacatcaaagcaattcagattaaagaacaacttcttggtcaagaagattatgaagtagccctttcagtgggacatctggcttctttatataattatgacatgaatcagtatgaaaatgctgagaaactttatttgcgatctatagcaattgggaagaaactttttggtgagggctacagtggactagaatatgattatcgaggtctcattaaactttacaactccattggaaattacgagaaagtgtttgaatatcacaatgttctgtctaactggaaccggttgcgagatcggcaatattcagtgacagatgctcttgaagatgtcagcaccagcccccagtccactgaagaagtggtgcagtccttcctgatttctcagaatgtcgagggaccgagctgctgagggaggacctcagttaaccaattaccttttcccggattccagggaattcatactgtgaaatcaaaaccatgttgttttggggggctggaatttgcattgaaacactggtccagtccattgaagaccctattttgggtgatccctatcttgcagaatgtctgtaggaataagcatatattcagttatattcagcatgtaccgcatgtgtaagtagtctggcccacattttcaacctagtagaacaaacaacaggaaatcttttttttgttgtttttaaaaaattcattttgcagaaagcctgaaagaaaaaaaatacccctaaataaaactatttaagagtttaaaagagttgcattcttattatgtaaggatgattttaacaactttttaatatgtaattcttccatgtggaggtattcaatactgtagtgtaaagaaattttatgcggaaaatctttatatgcagtatagaaaagttaacacaagtactaataaaagagggacatcccgacttacgtttttctaccttgcccagataagtggatacaaccactctatattacaaggaaaggactgtcagattcatctgaactggaccagtgttgatctgtaatgtaatagaaaatctgatagaccagcacttctgacttttttttttttggtacaacaatgcaagatgctctgatagcatttgctaacaggaccaggaggatctaaaaaggaccagcctaatgtagaaggtggttacttggaccagaggctttagattattattttagatcctacatatacttttatcagtagaatgatttcatttagatgtataatgaaaaaggataatgcaaaaattatgtaatagataccaaattagggaagtttggcaatttcaatggcatatttttagtcaaggtacacagatggcagtgccataagcaagtctataaatatcggctgcagccatccccctcattttaaatgttgccctaataatcaatgcagttaacaagtatattggctgtgtgtcatgaaatagttcatgttcagatggaaatgttaggttactgtatggtttatggagattaatgaaaatgaatgcccaaaaataagtcttagaaaatcctccatttttatggtaaatagtaatacaactaggtcatttcatttgaaatctaggagtcaaatggaaagatcccctaataatacacctatttcactaacttgtctttctgtttattgggttttgatttgattttttgtaagccagtcaggttatttaatgatgaggtaataatcaaatttaagaatttgtgacatgtagcaattcaagaaacaaaaaggtattttgctgttacctcaattcttactgtagtagcccatctgatgcttctatagttaagaatctgggttccccccctattttcaggggttcatgacttggctgttaaagatgttgctcctagctaatgcttggagtagtctgtgggtgaatggatgtgtgttgaattttagttttcttttaacatgcatgttgggtgagaggggaaaaaaatctaagctgtctgccacattgagtacagaaaagttgtagatttcaaattttattaatattttaagcacttttttgaacttcccaaccttgtttgaagctgttatttgcagtcctattagttttgagccattgcatttaagttccctaggagggggttggttgggggatgtactgaaagagatgaagcaaacccacaccctaagatggtaactgtgtgatttagaaacctgagtttactcctcaaatcgaattattttctttttaaattttggaaagagtaaattgacgtacttgcagtttatgaagctgccccccacccctcagttaattgcagtctaatgtcaagaggcacttctttattaattaccaaatagtctttgtgaccaaggactaacatttttaagttactcagctctatcctcatgggcctatatatttaatacctccaaagatattttcaggataggctttgtatacttttattggttatttagaatccagtggtatgtttgtggtataggaatgtcatggtaaattgtttttcaataaatattttgaaacatgtttccatatgaagtttttttttcaatctgtattttttggttttgtgcacatacagcatttcctaggataaaaataaacaaatgacttacagcctcatcctccctaactccatttgaactcaacttagctcacactcagtgataaaacaacatggtatgtagaagcctaggatcacagggtgataatgtcaattggcagccagttgtgtttttttgaaacatcattattggcagtttctccttatcaccactgctttaatgtagtttttttgtaaatccatatactttaatgcatacactctagcttaagaaaacattgccattttggttagggatatgacttaatgtgctattatttctggttctaatgaagaataataccctatgactttaagtgtaagattcatcctttaagtagggatgtttaggataagttagatgtgtgccactatgatttattgggtttcttaaaaatcttgaagaaaataataaaatttatctcacaataagttaacttgcgcaaactttttacatatggtgaggtgcgtaaggaagccctggccaacttaaagatttttctggaggttcagcaaagttatgttaaattaggggcctttggtctcatccttctctgactcttctacccagtcttttcctaaagttcggtgctactccagttgggtgcatcagggagctccgtcagcactcgcatgtgtcgctcaggtggccactcatgcctgcattccatttaatagagtcaattggaatttttagagcataatctttatggatcctcaaagctgactttgccaaagggattgagacccttactaccatcaaatctctgtctctgcttggttaaaaattggctcactattgctttgtagtaacccctgcccaggtattttttcacttgtgaaaataatttgagaaagacctttgttcctagcctgttgggaaaagtttataattttatgaaaattaagtacagaggctgcgatcttagaaataatgaaggtgccatttggctgctccttaatagtgcagacagaaaactgcagtgaacacatgccaaaacatgattgaagcctttggctgaaactttatacatagaaataatgatttgctcataacaggtatcattaactgccactttttatgttttccctagaatttgtagccttgctgcttgcttttcttctgggtggcaaagttactactggaaaaacactataagtacaaagtttttggggttttatctttgctttagaagtggatgtgtacttcacctcttggctgtggaggaacttagttgccaggaaattttttttttttttttcagacggagtttcgctcttgttgcccaggctgggagggcaatggcaccgtcttggctcactgcaacctccgcctcccgggttccagcgattctcctgcctcagccttccgagtagctgggattacaggctcctgccaccacgcctggctaggaaattttttgttgttaatatgacatttggattaatctccagcttcaacagtacttcttttgtccataaatctcaggaatgttttaggcagaaaactggttttaccctgttgataatcagaaggagtgtgctttaggatttattgcataatactattctttaattgcaatcctaggtatctatagcatgagtggccttagtgagtttgttgaagtgcacatgtttttcaagagtaaaatttaagattaaaaatatatcctatatatagatatctagaaaacttggtttgtggtgcacagttaagtgttggatcactaaataaccattgcaggtaccgtttgtgtaacattactcatttctgtatattccttttatgggaagatattttgccatggtaactaaaacttttcagttctacttttatgatgtgaatgaatgctacgttttattaaatattaccaggtcagtactatttttatactttattaagcaacaggggattttagtttaataggctcaaaataaaaagttcttaatggaacagttaaaaacaaaacactaacaatctttacgtgaaaatccccactaatagtgccacaataatttctatagaaatatctaaggtcattaaatagatttttgaagacggttcttcattgtgtcaggatgacctttcatatcattctcaccaacttgtagtgcccaccgttatttgtaactattaaaccatactaagtatgtttgtaaccagcattgtgatatattctgtacttgtattgctaaaaatgaattattgacctaataaatatagtgttcctgc

SEQ ID NO: 1881 - DNA, 6644 bp, Homo sapiens
  source 1..6644: mol_type = unassigned DNA
aagcgcatctcaggactgatagctccgccctaaactaagggagagactgtgctcccaagtacgtagcctgcagtgcctaacgcattctcagcaattttgacccccaacagacgccgtcgacagtctcccaagaacaattcccaggagctcggattccaagagccgcccgcgccctcgtttaccttcgctagtcgccctgcagccccgccctgtccggaggccccgccctccatgaatcagctgatcccgcggacccactgggttgccaagctcgcgccggatgcggagcgcggtgctgccggtggagcttcaggtcttgatagactttctgtaaagaaggaatgatttggtgatggagtgttcccactgaccgatggactcaaagaagagaagctcaacagaggcagaaggatccaaggaaagaggcctggtccatatctggcaggcaggatcctttcccataacaccagagagattgccaggctggggaggaaagactgttttgcaggcagccctcggagtgaaacatggagttcttctgactgaagatggtgaggtctacagctttgggactcttccctggagaagtggaccagtggagatttgtccaagtagccccattctagaaaatgccctggttgggcaatatgttattactgtggcaacaggaagcttccatagtggagcagtgacagacaatggtgtcgcgtacatgtggggagagaattctgctggccagtgtgcagtagccaaccagcagtatgtgccggaaccaaatcctgtcagcattgctgattctgaggccagccctttgttagcagtcaggattttacagttggcgtgtggcgaggagcacactctggcattgtcaataagcagagagatttgggcatggggtaccggttgtcagttgggtctcattaccactgccttcccagtgacaaagccgcaaaaggtagaacatcttgctgggcgagtggtgcttcaagttgcctgtggtgctttccacagcttagcccttgtacaatgcctcccttcccaggatctgaagccagtcccagaacgatgcaaccagtgcagccagctcttgattactatgactgacaaagaagaccatgtgattatatcagacagtcattgttgcccattaggtgtgacactgacagaatctcaggcagaaaaccatgccagcactgctctcagcccctccactgaaacccttgacaggcaggaagaagtatttgagaacactcttgtagcaaatgatcagtctgttgctactgaactgaatgcagtaagtgctcagatcacaagcagcgatgccatgtcctctcaacaaaatgtcatgggaacaactgaaatttcctctgccagaaacataccatcataccctgacacccaagcagtcaatgaatacctacggaaactgtcagatcattcagtaagagaggactcagagcatggtgaaaagccagtgccatctcagcctcttttagaagaagcaattcctaatctccacagcccgcctaccacaagcacctcagccctaaacagcctggtggtctcttgtgcatctgctgttggtgtgagagtggctgctacttatgaagctggtgccttgtcactgaagaaagttatgaacttttatagtacaaccccttgtgaaactggagctcaggcaggcagtagtgccattggccccgaaggtttgaaagatagcagggaagaacaggttaaacaggaatcaatgcaaggaaagaaaagttcaagtcttgtggatatcagagaagaagaaacagagggaggcagtcgaagactctccctccctggattgttgtcacaagtttcccccaggctcttaagaaaggctgcacgggtgaaaacgaggacagtggttctgacccccacatacagtggagaagcagatgcgctcctgccttctctgagaacagaagtgtggacctgggggaaagggaaggaagggcagctggggcacggcgatgttctgcctaggcttcaaccgttgtgtgtaaaatgtctggatggcaaagaagtaatccatctggaggcaggtggttaccattctcttgcacttactgcgaaatcccaggtttactcatggggtagcaatacctttggtcaacttgggcattccgattttccaacaacagttcctcgtcttgcaaagataagcagtgaaaatggagtctggagcatagctgcaggcagggattattccctgtttttagtggatacagaagacttccagcctgggttatattacagtggccgacaggaccctacagaaggtgacaaccttccagagaatcacagtggttctaagactccagtacttctctcctgtagtaagcttggatatataagcagagtgacagcaggaaaagatagctatttagccttggtggataaaaacattatggggtatattgccagtctccacgagttagctactacagaaagacgattctattcaaaactaagtgatatcaaatctcagattctcaggcctcttctcagtttagaaaatttgggcactacaactacagtccagctgttgcaggaggtggctagccgattcagcaagctgtgttacctcattggtcagcatggagcctcattgagcagcttccttcatggggtaaaggaagccaggagtttggtcatcctgaagcattcaagtctcttcttggatagttatacagagtattgcacatctattacaaatttcctggttatgggaggattccagcttcttgctaagcctgccattgatttcctaaataaaaaccaagagctgttgcaagatttgtcagaagtgaatgacgaaaacactcagttgatggaaatactgaatactttgtttttcttgccaatcagacgacttcataattacgcaaaagttttgctaaagcttgctacttgttttgaagtggcatctccagaatatcagaaactgcaggattccagttcttgttatgagtgtcttgctctccatctcggcaggaaaaggaaggaagcagaatacacactgggcttctggaagaccttccccggaaaaatgacggattccttgaggaagccagagcgtcgactgctgtgtgagagtagtaaccgagccctgtctctgcagcatgctgggaggttttccgtgaattggttcattctctttaatgatgccctggtccatgcccagttctccacgcaccatgttttccctctggccacgctgtgggcagagccactgtctgaagaagctggtggtgtgaatggcttaaagataactacacctgaggagcagttcactctcatttcatctacaccccaggaaaagacaaagtggctacgagctataagccaagccgtagatcaggctttgagagggatgtctgatctccccccttatggaagtggtagcagtgttcagagacaggaaccacccatttcacgcagtgccaaatatactttctacaaggatcctcgcctaaaggatgccacctatgatggacgctggctttcagggaagcctcatggcagaggggttttgaagtggcctgatggaaagatgtattctggcatgttcaggaatggcttggaagatgggtatggagaatacagaatcccaaacaaggcaatgaacaaagaagaccattatgtgggccattggaaagaaggaaaaatgtgcggtcaaggagtctacagctatgcttctggtgaagtatttgagggctgttttcaagataatatgcgtcatggtcatggtcttctacgaagtgggaaattgacgtcctcttctcctagtatgttcattggccagtgggtaatggataagaaagcaggatatggtgtctttgatgatatcactaggggggaaaagtatatgggaatgtggcaagatgatgtgtgtcaagggaatggtgtggtggttacccagtttggattatactacgagggcaactttcaccttaataaaatgatgggaaatggggttttgctttccgaagatgatactatctatgaaggagaattttcagatgactggactcttagtggaaagggaacactgactatgccaaatggagactacattgaaggttattttagtggagaatggggatctgggataaaaatcactggaacctacttcaaacctagtctatatgagagtgataaagacagacctaaagttttcaggaagctaggaaacctggcagtgccagctgatgagaagtggaaagcggtgtttgacgaatgttggcgccaactgggctgtgagggcccaggccaaggggaagtttggaaagcatgggacaatattgctgtggccttgaccaccagtcggcgccagcacagagacagtccagaaatactgagtcgttcacagactcagacactagagagtttggaattcattccacagcatgttggtgccttctctgtggagaaatatgatgacatcaggaaatatttaataaaggcctgtgacactcctctgcaccccctgggcaggcttgtggagacactggttgcagtgtatagaatgacatacgtgggcgtaggagccaaccgcaggttattgcaggaggctgtaaaggagattaagtcctatcttaagcgaattttccagctggtgaggttcttatttcctgagctgcctgaagaaggcagcacaattcctctctctgctcctctgccaaccgaaaggaagtctttttgcactgggaagtcagattcccgatctgaatcaccagagccaggttatgtagtaacgagttctggattattgcttcctgtgctgctacctcggctctacccaccgctgtttatgctttatgctttggataatgatcgcgaggaagacatttactgggaatgtgtccttcgactaaataagcagccagatattgctctcctgggctttcttggggtgcagaggaaattttggccagcaaccttgtcaatccttggagagagtaaaaaggttttgccaaccacgaaagatgcttgttttgcctcagcagtagaatgtctgcagcagatcagcacaacatttaccccatcagacaaacttaaggtcatccagcagacttttgaggagatctctcagagtgtcctggcgtcactccacgaagacttcttgtggtccatggatgacttgtttcctgttttcttatatgtggtgctacgggccaggattaggaatttaggctctgaggtacacctcattgaggatctaatggacccctatcttcagcatggggaacagggtataatgttcaccaccttgaaggcatgttactaccagattcagcgtgagaagcttaactaggctgcataacagcttgaaaactggattatctactacagagtgttataacaccatctggagtcttcctgtagtggcaaaaaagaacagtgttgaaattggaaaggactttgtgttatttaggttgttagaatgagccttaccaataataagagccctgagcccagaaaaaaggactgtatagtttaaagggaggattgaaagggaggtaaaaaatcagattagaccagttcttggcctatgataagttccaaaaataccatttatctactatttgaaaaaagaagaggatatcccttcctacagtaaagggtatgtcagctacatgaagttgtaagaaaagcttccagtagagcttcttatattaaagaagttgatggatatttttgaatttctggtttgcctgaatccacctgcagttaccccgatccgtttgcaagaaccagatcgtacttgaaactatagtggccacactctgccttcctgagtcccttccagtcatgtgtgcatcatgtctctttgccaagggaggggagaaaggaacttttaaactgcagttttaactttttctaagctgtttcttgatgggagaggttctgtgcaaaactaccacattctgtccccaaaatgtggaatgcatccaaataggagtcttctgcctcttaacttaaaagaacataggaattttgtttttggtttctttatcatgctacagagagtgaatacactggaattcagacaccgactctgagctgctaggaacctcatttgtccatgtgcaaacgctgtattccaaggcctgtgaatggcagcctgaggaagttttgcatgcaggctgtgttttcgagcaggactaacaactgggaaataagcaaaaaactgcatcgatccccagcctggtgttgttcttccctatacttcacactgaactcaggatgggaagaaaaaggaaacaagctttggctttttccatctcaaaagtattgtggcacctcaacatttcagtgttttgctttttaaaaaatgccctattgtaagttgttggtttatactgtataagtaacactagtagctgttttgaataacataggtgctcttcctcatctcatctcctacaccgtggtgagcatacagagtgtcctgatttgtgttaagtgactgagaagatgttaattacttttgaaaaaggatcatggtttttgctctactttataatcaagacaagtgtttattaaaatactgttttggaatgttggctgtaatgtaacagcaattttcataataaaaggcattcatcttt

SEQ ID NO: 1882 - DNA, 571 bp, Homo sapiens
  source 1..571: mol_type = unassigned DNA
aagctcgcgccggatgcggagcgcggtgctgccggtggagcttcagcttatgtcttgatgtttgcctgcatgtagctgaactgattgatccaggtcttgatagactttctgtaaagaaggaatgatttggtgatggagtgttcccactgaccgatggactcaaagaagagaagctcaacagaggcagaaggatccaaggaaagaggcctggtccatatctggcaggcaggatcctttcccataacaccagagagattgccaggctggggaggaaagactgttttgcaggcagccctcggagtgaaacatggagttcttctgactgaagatggtgaggtctacagctttgggactcttccctggagaagtggaccagtggagatttgtccaagtagccccattctagaaaatgccctggttgggcaatatgttattactgtggcaacaggaagcttccatagtggagcagtgacagacaatggtgtcgcgtacatgtggggagagaattctgctggccagtgtgcagtagccaaccagcagtatgtgccggaaccaaatcctgtcagcattg

SEQ ID NO: 1883 - DNA, 559 bp, Homo sapiens
  source 1..559: mol_type = unassigned DNA
agctgatcccgcggacccactgggttgccaagctcgcgccggatgcggagcgcggtgctgccggtggagcttcaggatggagaaggaactgactgctgtacccaagtgaagatctttactcagttacccttatatttggctatatggaataaaattgtgtgatatgtttattctgagcaggtcttgatagactttctgtaaagaaggaatgatttggtgatggagtgttcccactgaccgatggactcaaagaagagaagctcaacagaggcagaaggatccaaggaaagaggcctggtccatatctggcaggcaggatcctttcccataacaccagagagattgccaggctggggaggaaagactgttttgcaggcagccctcggagtgaaacatggagttcttctgactgaagatggtgaggtctacagctttgggactcttccctggagaagtggaccagtggagatttgtccaagtagccccattctagaaaatgccctggttgggcaatatgttattactgtggcaacaggaagcttccatagtggagcagtga

SEQ ID NO: 1884 - DNA, 3242 bp, Homo sapiens
  source 1..3242: mol_type = unassigned DNA
tttagccttggtggataaaaacattatggggtatattgccagtctccacgagttagctactacagaaagacgattctattcaaaactaagtgatatcaaatctcagattctcaggcctcttctcagtttagaaaatttgggcactacaactacagtccagctgttgcaggaggtggctagccgattcagcaagctgtgttacctcattggtcagcatggagcctcattgagcagcttccttcatggggtaaaggaagccaggagtttggtcatcctgaagcattcaagtctcttcttggatagttatacagagtattgcacatctattacaaatttcctggttatgggaggattccagcttcttgctaagcctgccattgatttcctaaataaaaaccaagagctgttgcaagatttgtcagaagtgaatgacgaaaacactcagttgatggaaatactgaatactttgtttttcttgccaatcagacgacttcataattacgcaaaagttttgctaaagcttgctacttgttttgaagtggcatctccagaatatcagaaactgcaggattccagttcttgttatgagtgtcttgctctccatctcggcaggaaaaggaaggaagcagaatacacactgggcttctggaagaccttccccggaaaaatgacggattccttgaggaagccagagcgtcgactgctgtgtgagagtagtaaccgagccctgtctctgcagcatgctgggaggttttccgtgaattggttcattctctttaatgatgccctggtccatgcccagttctccacgcaccatgttttccctctggccacgctgtgggcagagccactgtctgaagaagctggtggtgtgaatggcttaaagataactacacctgaggagcagttcactctcatttcatctacaccccaggaaaagacaaagtggctacgagctataagccaagccgtagatcaggctttgagagggatgtctgatctccccccttatggaagtggtagcagtgttcagagacaggaaccacccatttcacgcagtgccaaatatactttctacaaggatcctcgcctaaaggatgccacctatgatggacgctggctttcagggaagcctcatggcagaggggttttgaagtggcctgatggaaagatgtattctggcatgttcaggaatggcttggaagatgggtatggagaatacagaatcccaaacaaggcaatgaacaaagaagaccattatgtgggccattggaaagaaggaaaaatgtgcggtcaaggagtctacagctatgcttctggtgaagtatttgagggctgttttcaagataatatgcgtcatggtcatggtcttctacgaagtgggaaattgacgtcctcttctcctagtatgttcattggccagtgggtaatggataagaaagcaggatatggtgtctttgatgatatcactaggggggaaaagtatatgggaatgtggcaagatgatgtgtgtcaagggaatggtgtggtggttacccagtttggattatactacgagggcaactttcaccttaataaaatgatgggaaatggggttttgctttccgaagatgatactatctatgaaggagaattttcagatgactggactcttagtggaaaggataattctggcctcatagaacaagttgggaagtgttccctcctcccctattttctgaaagtttgcgaagctttggtattatttcttctttgaatgtttgggagaattcaccaatgaagtcttctgggcctaagcattactttggaacactgactatgccaaatggagactacattgaaggttattttagtggagaatggggatctgggataaaaatcactggaacctacttcaaacctagtctatatgagagtgataaagacagacctaaagttttcaggaagctaggaaacctggcagtgccagctgatgagaagtggaaagcggtgtttgacgaatgttggcgccaactgggctgtgagggcccaggccaaggggaagtttggaaagcatgggacaatattgctgtggccttgaccaccagtcggcgccagcacagagacagtccagaaatactgagtcgttcacagactcagacactagagagtttggaattcattccacagcatgttggtgccttctctgtggagaaatatgatgacatcaggaaatatttaataaaggcctgtgacactcctctgcaccccctgggcaggcttgtggagacactggttgcagtgtatagaatgacatacgtgggcgtaggagccaaccgcaggttattgcaggaggctgtaaaggagattaagtcctatcttaagcgaattttccagctggtgaggttcttatttcctgagctgcctgaagaaggcagcacaattcctctctctgctcctctgccaaccgaaaggaagtctttttgcactgggaagtcagattcccgatctgaatcaccagagccaggttatgtagtaacgagttctggattattgcttcctgtgctgctacctcggctctacccaccgctgtttatgctttatgctttggataatgatcgcgaggaagacatttactgggaatgtgtccttcgactaaataagcagccagatattgctctcctgggctttcttggggtgcagaggaaattttggccagcaaccttgtcaatccttggagagagtaaaaaggttttgccaaccacgaaagatgcttgttttgcctcagcagtagaatgtctgcagcagatcagcacaacatttaccccatcagacaaacttaaggtcatccagcagacttttgaggagatctctcagagtgtcctggcgtcactccacgaagacttcttgtggtccatggatgacttgtttcctgttttcttatatgtggtgctacgggccaggattaggaatttaggctctgaggtacacctcattgaggatctaatggacccctatcttcagcatggggaacagggtataatgttcaccaccttgaaggcatgttactaccagattcagcgtgagaagcttaactaggctgcataacagcttgaaaactggattatctactacagagtgttataacaccatctggagtcttcctgtagtggcaaaaaagaacagtgttgaaattggaaaggactttgtgttatttaggttgttagaatgagccttaccaataataagagccctgagcccag

SEQ ID NO: 1885 - DNA, 3242 bp, Homo sapiens; identical to SEQ ID NO: 1884
  source 1..3242: mol_type = unassigned DNA

SEQ ID NO: 1886 - DNA, 2674 bp, Homo sapiens
  source 1..2674: mol_type = unassigned DNA
gaatcagctgatcccgcggacccactgggttgccaagctcgcgccggatgcggagcgcggtgctgccggtggagcttcaggtcttgatagactttctgtaaagaaggaatgatttggtgatggagtgttcccactgaccgatggactcaaagaagagaagctcaacagaggcagaaggatccaaggaaagaggcctggtccatatctggcaggcaggatcctttcccataacaccagagagattgccaggctggggaggaaagactgttttgcaggcagccctcggagtgaaacatggagttcttctgactgaagatggtgaggtctacagctttgggactcttccctggagaagtggaccagtggagatttgtccaagtagccccattctagaaaatgccctggttgggcaatatgttattactgtggcaacaggaagcttccatagtggagcagtgacagacaatggtgtcgcgtacatgtggggagagaattctgctggccagtgtgcagtagccaaccagcagtatgtgccggaaccaaatcctgtcagcattgctgattctgaggccagccctttgttagcagtcaggattttacagttggcgtgtggcgaggagcacactctggcattgtcaataagcagagagatttgggcatggggtaccggttgtcagttgggtctcattaccactgccttcccagtgacaaagccgcaaaaggtagaacatcttgctgggcgagtggtgcttcaagttgcctgtggtgctttccacagcttagcccttgtacaatgcctcccttcccaggatctgaagccagtcccagaacgatgcaaccagtgcagccagctcttgattactatgactgacaaagaagaccatgtgattatatcagacagtcattgttgcccattaggtgtgacactgacagaatctcaggcagaaaaccatgccagcactgctctcagcccctccactgaaacccttgacaggcaggaagaagtatttgagaacactcttgtagcaaatgatcagtctgttgctactgaactgaatgcagtaagtgctcagatcacaagcagcgatgccatgtcctctcaacaaaatgtcatgggaacaactgaaatttcctctgccagaaacataccatcataccctgacacccaagcagtcaatgaatacctacggaaactgtcagatcattcagtaagagaggactcagagcatggtgaaaagccagtgccatctcaggtacctgctcaattttataaaataaaagtgtgtctagagttgaactgtatgggcttttctttagaaactttaaaatgagtaaggcttggtagcattttttattttttgagtttgattataattttgttttatcaggcaagcctagataaaggaaagaacctggattaattcaaaatcactctttatgtttgttctggccctttatgatattgaaaggtgtcatgttgggcttgttttataagtaggagcatttcatttttttttcttgctagtactttttttctatggctaaagtactgaattttggtgggccctgaatagtttaatataactagagattcacaaagattcttcttacttgtgtttgtaacactcttcagaattctgtagagaaaagtcttttccttctttaacagggaagattgttttgtggcagatccttcaattgtaggcagatttaaaacttacaggcaattacatgtttcagtttttttcaattatagctgtggtccttactgggcttaatttgaagaggtggctaatattttatctttttgtttgtttgtttttgagatggggtcttgctctgtcacccaggctggagtgcagtaatgcgattgtggctcactgcagcctcgatctcccaggttcaagcgatcctcccatttcagccttccaagtagctgggactatacacatgccaccacacctgctgattttatttttaagtagagtagagcctgttgcccaggctcatctcaaactcctgagctcaagcaatcctcccacctcagcctcccaaagtgttgagattacaggcatgagccatcatgcccagcctattttatatatcttattaaaactattttcattttgaagatttgtggtagaatgaacaaaagttgtttatcagtagcacatggtaaagtttgagttcccgcttaaactaaattgttttaaaaggattatttctgtgttttactcttagtgtggccttttgattttgctttaccaaaactgtaagaaaacaaaacaaaagatcatactcataaaagatctgtcctgcagtgtttctttttaggtttttgaaaccacatagcctcttgattctcaattcttattgtttactctgtcagaatgtgaacatgaaggtatttttagaaatagtctttatttcacaatctattcactgaaacttgtgggtatttgaatttttaaaaaaatcaaggataagctgtttggagaaaggtattataaagtctgaacaaagcaaaagtagtagtttaacaagaatgcatgtagaaaattcttagactgtacatgcttatcacattttacttactttgttaaacattggaagtttttgttacttatgctagtaacaatgtgtgtgtttctattgaattaaatttaatttattt

SEQ ID NO: 1887 - DNA, 5934 bp, Homo sapiens
  source 1..5934: mol_type = unassigned DNA
atcggcggcggcaggactgggggagtcagaggtctggcagcgctgtctgcgcagacctaccggacgctacctcccaaccccccgtcttcctcctgcctcctcctcctcccgtcacctcctgacccgccggagctccgagcaactgccggcctccgcccccagccgcagccggtcactggcggcgccttccgcgccaagcttgggggccttttcggggtcccacatggcacggcttccgacccccggcccgggacggggctcgcaggccccagaggggcaggctggagaaggaggaggttaggtgtcttcaggagggttgctgagcccaaggacgcgccatcgccgcggagaaggagccggaccccttgggcggagcgcccaatgtgtggtccctcacgccgtcccgcaccttgctttttagggttctttttccgctttctgagcccttttataccttacgtttagaaggggaaaatcatcctcccacaccttctccccgactttttgccttttttgtcttgaagttacccaaaggcctgtgtattgttctcaatggtcccaagaattactctaatatagttgtttttctgagggaggatggatggagataactatcctgatcccaatgtcactttttaaggcattcgcttcaagagacaagcagtttagaatcaggcagaactggattgcaaaatttatgggcagaccgagaaaatgctgctgtgaagacccaattaaagctttcacataaatgaagctacagctatcatgatttagtgcccccaaaaggaagaacttcagtggacaagaaaggacatttctgggggtagtagaatgcttgaggcctggaatttaaacctgagccactatctgaaggtaattttttttaactaattgaaagtaacaactttattttaaaaagttaactattatctattacatgtttaaaaagtcaaattaccctttgtatataggtgctttgttctatttatgtttatcagttggaaaaaacataagaaaatggaattgaatatgatgtcagcatggaacaatctaatgattcattaagagtcaaccataatgacggtgaagagtcaaaaaccagtgctcaagtatttgagcatctaatctgtatggactccagggattcttcctttggacaaaatgattctcctacagttttgcccatcactactcgtgaagcaaataattcactcatatcacagaatataccagggcccctgactcagacacagactctttctgcagagcaattccatctagtggaccaaaatgggcaggctattcaatatgaacttcagtcattgggggaatccaatgcacaaatgatgatcgttgccagcccaacagaaaatggacaggtacttcgtgtaattccacctacccagacaggaatggcacaagtgattatacctcaggggcaacttgtggatgtgaatagtcctcgggatgtccctgaagagaaacccagtaacagaaacttaccaactgtaagagtggatactctagcagacaataccagcaattacattcttcatcctcaaacatccttcccattgcccaaaaagtcagtgaccggaatgctggaagaaccccttctggggcctcttcagccactttcttctaatacacctatatgggcctgccgtcttaggagctgtgagaaaattggagattcataccgtggctactgtgtaagtgagactgaattagaaagtgtcctaacatttcacaagcagcaaacacagagtgtttgggggacccgtcagtctccaagcccagccaagcctgctacacgcttgatgtggaaatcccagtatgttccatatgatggaatcccatttgttaatgcagggagtagagctgtggtaatggagtgtcagtatgggccaagaagaaaaggtttccagttaaaaaaagtcagtgagcaggaaagcaggtcttgtcagctctacaaagccacttgtccagctcggatttacattaaaaaggtacagaagtttcctgaatatagagttcctacagaccccaaaattgacaagaaaattatcagaatggagcaggagaaagcttttaacatgctaaagaagaacttggtagatgctggtggtgttcttaggtggtatgtacagttacctacacagcaagctcatcagtatcatgaattagagactccctgcctcactttgtcaccttctccttttcctgtgtcttctcttgaagaagaggaaactgcagttagagatgagaattgtgcattaccctcacgtttacatcctcaagtagcacataagattcaagaattagtatcacagggaatagaacaagtgtatgcagtaaggaaacagctaagaaaatttgtggaaagggaactgttcaaacccgatgaggtacctgaaagacataatttatctttttttccaactgtaaatgatataaaaaatcacatccatgaggtacagaaatccttgagaaatggagatacggtatataactcagagattattccagcaacgcttcaatggactacagacagtgggaatattctcaaagagaccatgacagttacatttgcagaaggaaattcaccaggagaatcaattaccaccaaagtggaaacaaatcagaccaggggttctttgtctcctgagccaacccacttgctctcctcactctcctcatttcagcccaaaatatttacacaactacagggtttgcagttacaaccaaggtacacctctcctgatgaatcaccagctgtggtatcagtaaataaccagccgtcctctagtccttcaggacttctggatacaataggaagtgctgtaatgaataataattctctactgcttggtcaaagtcatagccttcaaagagatacatgcttaacccaaaacaatagtactgcctccaccatgggtaaccttccagaaccagatcaaaatctagttgcaatggacgagctggtagaagttggagatgttgaggatacagggaatctggaaggaactgttcatcggattctgttgggagatgtgcagactattccaatacagattatagacaaccactcagctcttattgaagaaaatccagaaagtaccatttctgtgagccaagttaaacaagaacccaaagaaccagcattgtctatggaagcaaaaaaaactgtggactataagaaattatctgctacataaattattgaagcttttcagaatttacaactctggtgacttctgatgtcttagaaaggaaggtgaatatagtcaaagcgtggcattgagataattggactgaagaccagtttgatgagaagcttttatttaaaactgatatatttgttgccagttccatatttttaccttccttaagagatgttttactcttcttattttgtataatttttatgctctttgattatctaataaggccagtatttcaaaagctgttctgaatttatccacagtaatatagtctgaacacaaatagtttacttaacttatccttggaaatattcaattttggttattacaaaacagaaaagaacaacagcaacaaaaacattgtgtgaatgtatgtttgtatgtgtgtatgtatatcatgaattttttttttaagttctgaaaaagaacttgttctctccttaaagttgtgaagaaattgttaattgccagacaggtaagaaaatgtttataatctatctcattaagaaagatgaagtattagattttacatcataacacaaagtccagcagctacatctgtggaaactgtgcagttgcattttagcctcttcccttccaatttttgtacttttaactacaaaccagtagtatactaatggttatctaatagaaatttaaagtgtcttggtaagtactgagaatttttacttgaattaatcagataagcaacagaaatcaacatatgtagcatggatttgtgctatattggaagtaaaacactataggcagaaagatgtagaaattaagagaattgaaaaagaataatagaattccttggtgtttacagataatttggaaaactttttgatgacagcagaggattttttcccccttattttgtaatgaagatccagcactggttaaaaaataatttgatttgtagttacatttttctatgccagagctcttactgaattgatgatattaggatttctagtattttaaggtaagtatttatagtttaaaatttagtttatatttaaaactttaaaacatctgatctgggatttttttgttaagtaagtatattaacttcaaataccaaattactactaagcagtatattgattataagcatctgttgtctaaagattggtactaggctggacatggtggctcacacctgtaatcacaatactttgggaggctgaggtgggtagataacctgaggtcaggagttcgagaccagcctggccaacgtggtgaaaccctgtttctactaaaaatacaaaaattagctgggtgtggtggtgggcacctgtaatcccagctacttgggaggctaaggcaggagaatcgcttgaacaccggaggcggaggttgcaatgagccgagatcgcgccattgcactccagcctgggtgacaagagaaaaactccatctcaaaaaaaaaaaaaagattggtaaactagaaatatcaactataattgtcaggaaattaacctaaaggcttttgtttctccagagaccatttgtgggtatattttatattttaaaaataaagattttaaatggatatcaatgtttaatattcaaaacatgcacaatataatatcaaatttaaccttaatactttacatgaatatgagtcacttttggcttttctaagtccagcctcccattcttaattgacttggtttcaggtacatgacatgtatctaaatataaagtactgttatagtagaggtaggtggaattctaatattccctgctctttagatttatattttatttaatataaagtttattatttataccctttttaatgcaaagctaatatttagttatatgtatgatttttaataaaaattactttactttttcctatgaatttaaaacatttgatgttggcattttatacaggcaggttgccaaatttaattatgttacactaagttaaacacagcacttaattacctcaaatccagatttctcttaatctgtgtgtacataaaaggaataagtccaaattaatttatagtttagtgttgcactataggtaatattcttttgttatttctagtttttatggaatccttttctttcaagattctaaataataaatcgttacgtctcaatagtggtaatagtggtaatggtttattattagctgtttcaccaattgaactacattcttttggagacattcctttcttttttgatgttgatttgcaaaggagaaatgcttgttaatatacaaactctagtcagttacctgtgaggatgagatgtgtcagaggactcagactttggtatagttagaaaaataatatttttctcacttgattctgtgtgaatgtctcttctgatactgttttttaatcagaaagttacagagcaactttcccacaaacaaaccaataaaacaaaaccccacaaaaaccaagagcatgaagaaaagtttaaatccctaattatatactcttttggtttttaggtagaaactggagctatcaatattttcatgtaagtatttcaaggagtagctctttaaaaatggtttctaaattagattttaaaaattcattgtcatctaaatgcatgtttagtcacaatgtatcagtattgtgtttaaaggtgctcagcatcactttttgaaaactatgtttacatatttaaaatgtttaattattttgaaatgtatagggtattaaatacaagcttc

SEQ ID NO: 1888 - DNA, 3368 bp, Homo sapiens
  source 1..3368: mol_type = unassigned DNA
gacggtggccgatagtggtcctactgtcgtgggactgctctgcgcgctcccggtggggcgcgcctgcgcattatgctggtctccatggcggggcctcggagccaagacgagagaaaatgctgctgtgaagacccaattaaagctttcacataaatgaagctacagctatcatgatttagtgcccccaaaaggaagaacttcagtggacaagaaaggacatttctgggggtagtagaatgcttgaggcctggaatttaaacctgagccactatctgaagctattaaataatagaagaaaatggaattgaatatgatgtcagcatggaacaatctaatgattcattaagagtcaaccataatgacggtgaagagtcaaaaaccagtgctcaagtatttgagcatctaatctgtatggactccagggattcttcctttggacaaaatgattctcctacagttttgcccatcactactcgtgaagcaaataattcactcatatcacagaatataccagggcccctgactcagacacagactctttctgcagagcaattccatctagtggaccaaaatgggcaggctattcaatatgaacttcagtcattgggggaatccaatgcacaaatgatgatcgttgccagcccaacagaaaatggacaggtacttcgtgtaattccacctacccagacaggaatggcacaagtgattatacctcaggggcaacttgtggatgtgaatagtcctcgggatgtccctgaagagaaacccagtaacagaaacttaccaactgtaagagtggatactctagcagacaataccagcaattacattcttcatcctcaaacatccttcccattgcccaaaaagtcagtgaccggaatgctggaagaaccccttctggggcctcttcagccactttcttctaatacacctatatgggcctgccgtcttaggagctgtgagaaaattggagattcataccgtggctactgtgtaagtgagactgaattagaaagtgtcctaacatttcacaagcagcaaacacagagtgtttgggggacccgtcagtctccaagcccagccaagcctgctacacgcttgatgtggaaatcccagtatgttccatatgatggaatcccatttgttaatgcagggagtagagctgtggtaatggagtgtcagtatgggccaagaagaaaaggtttccagttaaaaaaagtcagtgagcaggaaagcaggtcttgtcagctctacaaagccacttgtccagctcggatttacattaaaaaggtacagaagtttcctgaatatagagttcctacagaccccaaaattgacaagaaaattatcagaatggagcaggagaaagcttttaacatgctaaagaagaacttggtagatgctggtggtgttcttaggtggtatgtacagttacctacacagcaagctcatcagtatcatgaattagagactccctgcctcactttgtcaccttctccttttcctgtgtcttctcttgaagaagaggaaactgcagttagagatgagaattgtgcattaccctcacgtttacatcctcaagtagcacataagattcaagaattagtatcacagggaatagaacaagtgtatgcagtaaggaaacagctaagaaaatttgtggaaagggaactgttcaaacccgatgaggtacctgaaagacataatttatctttttttccaactgtaaatgatataaaaaatcacatccatgaggtacagaaatccttgagaaatggagatacggtatataactcagagattattccagcaacgcttcaatggactacagacagtgggaatattctcaaagagaccatgacagttacatttgcagaaggaaattcaccaggagaatcaattaccaccaaagtggaaacaaatcagaccaggggttctttgtctcctgagccaacccacttgctctcctcactctcctcatttcagcccaaaatatttacacaactacagggtttgcagttacaaccaaggtacacctctcctgatgaatcaccagctgtggtatcagtaaataaccagccgtcctctagtccttcaggacttctggatacaataggaagtgctgtaatgaataataattctctactgcttggtcaaagtcatagccttcaaagagatacatgcttaacccaaaacaatagtactgcctccaccatgggtaaccttccagaaccagatcaaaatctagttgcaatggacgagctggtagaagttggagatgttgaggatacagggaatctggaaggaactgttcatcggattctgttgggagatgtgcagactattccaatacagattatagacaaccactcagctcttattgaagaaaatccagaaagtaccatttctgtgagccaagttaaacaagaacccaaagaaccagcattgtctatggaagcaaaaaaaactgtggactataagaaattatctgctacataaattattgaagcttttcagaatttacaactctggtgacttctgatgtcttagaaaggaaggtgaatatagtcaaagcgtggcattgagataattggactgaagaccagtttgatgagaagcttttatttaaaactgatatatttgttgccagttccatatttttaccttccttaagagatgttttactcttcttattttgtataatttttatgctctttgattatctaataaggccagtatttcaaaagctgttctgaatttatccacagtaatatagtctgaacacaaatagtttacttaacttatccttggaaatattcaattttggttattacaaaacagaaaagaacaacagcaacaaaaacattgtgtgaatgtatgtttgtatgtgtgtatgtatatcatgaattttttttttaagttctgaaaaagaacttgttctctccttaaagttgtgaagaaattgttaattgccagacaggtaagaaaatgtttataatctatctcattaagaaagatgaagtattagattttacatcataacacaaagtccagcagctacatctgtggaaactgtgcagttgcattttagcctcttcccttccaatttttgtacttttaactacaaaccagtagtatactaatggttatctaatagaaatttaaagtgtcttggtaagtactgagaatttttacttgaattaatcagataagcaacagaaatcaacatatgtagcatggatttgtgctatattggaagtaaaacactataggcagaaagatgtagaaattaagagaattgaaaaagaataatagaattccttggtgtttacagataatttggaaaactttttgatgacagcagagga

SEQ ID NO: 1889 - DNA, 575 bp, Homo sapiens
  source 1..575: mol_type = unassigned DNA
ggactgctctgcgcgctcccggtggggcgcgcctgcgcattatgctggtctccatggcggggcctcggagccaagacgagagaaaatgctgctgtgaagacccaattaaagctttcacataaatgaagctacagctatcatgatttagtgcccccaaaaggaagaacttcagtggacaagaaaggacatttctgggggtagtagaatgcttgaggcctggaatttaaacctgagccactatctgaagacggagtcttgccctgttgcccaggctagagtgccaaggcacgatcttggcttactgcaacctccacttcccagattcaagcagttttcgtgccttagtcacttgaggagctctggttacagctattaaataatagaagaaaatggaattgaatatgatgtcagcatggaacaatctaatgattcattaagagtcaaccataatgacggtgaagagtcaaaaaccagtgctcaagtatttgagcatctaatctgtatggactccagggattcttcctttggacaaaatgattctcctacagttttgcccatcactactcgtgaagcaa

SEQ ID NO: 1890 - DNA, 726 bp, Homo sapiens
  source 1..726: mol_type = unassigned DNA
gcgcctgcgcattatgctggtctccatggcggggcctcggagccaagacgaggcattcgcttcaagagacaagcagtttagaatcaggcagaactggattgcaaaatttatgggcagaccgagaaaatgctgctgtgaagacccaattaaagctttcacataaatgaagctacagctatcatgatttagtgcccccaaaaggaagaacttcagtggacaagaaaggacatttctgggggtagtagaatgcttgaggcctggaatttaaacctgagccactatctgaagctattaaataatagaagaaaatggaattgaatatgatgtcagcatggaacaatctaatgattcattaagagtcaaccataatgacggtgaagagtcaaaaaccagtgctcaagtatttgagcatctaatctgtatggactccagggattcttcctttggacaaaatgattctcctacagttttgcccatcactactcgtgaagcaaataattcactcatatcacagaatataccagggcccctgactcagacacagactctttctgcagagcaattccatctagtggaccaaaatgggcaggctattcaatatgaacttcagtcattgggggaatccaatgcacaaatgatgatcgttgccagcccaacagaaaatggacaggtacttcgtgtaattccacctacccagacaggaatggcacaagtgattatacctca

SEQ ID NO: 1891 - DNA, 537 bp, Homo sapiens
  source 1..537: mol_type = unassigned DNA
gcgcattatgctggtctccatggcggggcctcggagccaagacgagagaaaatgctgctgtgaagacccaattaaagctttcacataaatgaagctacagctatcatgatttagtgcccccaaaaggaagaacttcagtggacaagaaaggacatttctgggggtagtagaatgcttgaggcctggaatttaaacctgagccactatctgaaggtttaatatatctttgccaagtccaagggtacaaagattttctcctgtgttttcttctagaagttttatcatttgatagtctgtgatccatttcaagttgatttgctatctggtgtgaggctggagtgcagtgctatgatcacagctgactgcagtcttaacctcccaggatcaagtgatcctcccacctcagccatctgattacctgggactgcagctattaaataatagaagaaaatggaattgaatatgatgtcagcatggaacaatctaatgattcattaagagtcaaccataatgacggtgaagagtcaaaaaccagtg

SEQ ID NO: 1892 - DNA, 595 bp, Homo sapiens
  source 1..595: mol_type = unassigned DNA
gcgcattatgctggtctccatggcggggcctcggagccaagacgagagaaaatgctgctgtgaagacccaattaaagctttcacataaatgaagctacagctatcatgatttagtgcccccaaaaggaagaacttcagtggacaagaaaggacatttctgggggtagtagaatgcttgaggcctggaatttaaacctgagccactatctgaaggtttaatatatctttgccaagtccaagggtacaaagattttctcctgtgttttcttctagaagttttatcatttgatagtctgtgatccatttcaagttgatttgctatctggtgtgagctattaaataatagaagaaaatggaattgaatatgatgtcagcatggaacaatctaatgattcattaagagtcaaccataatgacggtgaagagtcaaaaaccagtgctcaagtatttgagcatctaatctgtatggactccagggattcttcctttggacaaaatgattctcctacagttttgcccatcactactcgtgaagcaaataattcactcatatcacagaatataccagggcccctgactcagacacagactcttt

SEQ ID NO: 1893 - DNA, 3455 bp, Homo sapiens
  source 1..3455: mol_type = unassigned DNA
cttttcggggtcccacatggcacggcttccgacccccggcccgggacggggctcgcaggccccagaggggcaggctggagaaggaggaggttaggtgtcttcaggagggttgctgagcccaaggacgcgccatcgccgcggagaaggagccggaccccttgggcggagcgcccaatgtgtggtccctcacgccgtcccgcaccttgctttttagggttctttttccgctttctgagcccttttataccttacgtttagaaggggaaaatcatcctcccacaccttctccccgactttttgccttttttgtcttgaagttacccaaaggcctgtgtattgttctcaatggtcccaagaattactctaatatagttgtttttctgagggaggatggatggagataactatcctgatcccaatgtcactttttaaggcattcgcttcaagagacaagcagtttagaatcaggcagaactggattgcaaaatttatgggcagaccgagaaaatgctgctgtgaagacccaattaaagctttcacataaatgaagctacagctatcatgatttagtgcccccaaaaggaagaacttcagtggacaagaaaggacatttctgggggtagtagaatgcttgaggcctggaatttaaacctgagccactatctgaagctattaaataatagaagaaaatggaattgaatatgatgtcagcatggaacaatctaatgattcattaagagtcaaccataatgacggtgaagagtcaaaaaccagtgctcaagtatttgagcatctaatctgtatggactccagggattcttcctttggacaaaatgattctcctacagttttgcccatcactactcgtgaagcaaataattcactcatatcacagaatataccagggcccctgactcagacacagactctttctgcagagcaattccatctagtggaccaaaatgggcaggctattcaatatgaacttcagtcattgggggaatccaatgcacaaatgatgatcgttgccagcccaacagaaaatggacaggtacttcgtgtaattccacctacccagacaggaatggcacaagtgattatacctcaggggcaacttgtggatgtgaatagtcctcgggatgtccctgaagagaaacccagtaacagaaacttaccaactgtaagagtggatactctagcagacaataccagcaattacattcttcatcctcaaacatccttcccattgcccaaaaagtcagtgaccggaatgctggaagaaccccttctggggcctcttcagccactttcttctaatacacctatatgggcctgccgtcttaggagctgtgagaaaattggagattcataccgtggctactgtgtaagtgagactgaattagaaagtgtcctaacatttcacaagcagcaaacacagagtgtttgggggacccgtcagtctccaagcccagccaagcctgctacacgcttgatgtggaaatcccagtatgttccatatgatggaatcccatttgttaatgcagggagtagagctgtggtaatggagtgtcagtatgggccaagaagaaaaggtttccagttaaaaaaagtcagtgagcaggaaagcaggtcttgtcagctctacaaagccacttgtccagctcggatttacattaaaaaggtacagaagtttcctgaatatagagttcctacagaccccaaaattgacaagaaaattatcagaatggagcaggagaaagcttttaacatgctaaagaagaacttggtagatgctggtggtgttcttaggtggtatgtacagttacctacacagcaagctcatcagtatcatgaattagagactccctgcctcactttgtcaccttctccttttcctgtgtcttctcttgaagaagaggaaactgcagttagagatgagaattgtgcattaccctcacgtttacatcctcaagtagcacataagattcaagaattagtatcacagggaatagaacaagtgtatgcagtaaggaaacagctaagaaaatttgtggaaagggaactgttcaaacccgatgaggtacctgaaagacataatttatctttttttccaactgtaaatgatataaaaaatcacatccatgaggtacagaaatccttgagaaatggagatacggtatataactcagagattattccagcaacgcttcaatggactacagacagtgggaatattctcaaagagaccatgacagttacatttgcagaaggaaattcaccaggagaatcaattaccaccaaagtggaaacaaatcagaccaggggttctttgtctcctgagccaacccacttgctctcctcactctcctcatttcagcccaaaatatttacacaactacagggtttgcagttacaaccaaggtacacctctcctgatgaatcaccagctgtggtatcagtaaataaccagccgtcctctagtccttcaggacttctggatacaataggaagtgctgtaatgaataataattctctactgcttggtcaaagtcatagccttcaaagagatacatgcttaacccaaaacaatagtactgcctccaccatgggtaaccttccagaaccagatcaaaatctagttgcaatggacgagctggtagaagttggagatgttgaggatacagggaatctggaaggaactgttcatcggattctgttgggagatgtgcagactattccaatacagattatagacaaccactcagctcttattgaagaaaatccagaaagtaccatttctgtgagccaagttaaacaagaacccaaagaaccagcattgtctatggaagcaaaaaaaactgtggactataagaaattatctgctacataaattattgaagcttttcagaatttacaactctggtgacttctgatgtcttagaaaggaaggtgaatatagtcaaagcgtggcattgagataattggactgaagaccagtttgatgagaagcttttatttaaaactgatatatttgttgccagttccatatttttaccttccttaagagatgttttactcttcttattttgtataatttttatgctctttgattatctaataaggccagtatttcaaaagctgttctgaatttatccacagtaatatagtctgaacacaaatagtttacttaacttatccttggaaatattcaattttggttattacaaaacagaaaagaacaacagcaacaaaaacattgtgtgaatgtatgtttgtatgtgtgtatgtatatcatgaattttttttttaagttctgaaaaagaacttgttctctccttaaagttgtgaagaaattgttaattgccagacaggtaagaaaatgtttataatctatctcattaagaaagatgaagtattagattttacatcataacacaaagtccagcagctacatc

SEQ ID NO: 1894 - DNA, 572 bp, Homo sapiens
  source 1..572: mol_type = unassigned DNA
gcgcattatgctggtctccatggcggggcctcggagccaagacgagagaaaatgctgctgtgaagacccaattaaagctttcacataaatgaagctacagctatcatgatttagtgcccccaaaaggaagaacttcagtggacaagaaaggacatttctgggggtagtagaatgcttgaggcctggaatttaaacctgagccactatctgaaggctggagtgcagtgctatgatcacagctgactgcagtcttaacctcccaggatcaagtgatcctcccacctcagccatctgattacctgggactgcagctattaaataatagaagaaaatggaattgaatatgatgtcagcatggaacaatctaatgattcattaagagtcaaccataatgacggtgaagagtcaaaaaccagtgctcaagtatttgagcatctaatctgtatggactccagggattcttcctttggacaaaatgattctcctacagttttgcccatcactactcgtgaagcaaataattcactcatatcacagaatataccagggcccctgactcagacacagactct

SEQ ID NO: 1895 - DNA, 597 bp, Homo sapiens
  source 1..597: mol_type = unassigned DNA
attatgctggtctccatggcggggcctcggagccaagacgagagaaaatgctgctgtgaagacccaattaaagctttcacataaatgaagctacagctatcatgatttagtgcccccaaaaggaagaacttcagtggacaagaaaggacatttctgggggtagtagaatgcttgaggcctggaatttaaacctgagccactatctgaagaagttttatcatttgatagtctgtgatccatttcaagttgatttgctatctggtgtgagctattaaataatagaagaaaatggaattgaatatgatgtcagcatggaacaatctaatgattcattaagagtcaaccataatgacggtgaagagtcaaaaaccagtgctcaagtatttgagcatctaatctgtatggactccagggattcttcctttggacaaaatgattctcctacagttttgcccatcactactcgtgaagcaaataattcactcatatcacagaatataccagggcccctgactcagacacagactctttctgcagagcaattccatctagtggaccaaaatgggcaggctattcaatatgaacttcagtcattgg

SEQ ID NO: 1896 - DNA, 1136 bp, Homo sapiens
  source 1..1136: mol_type = unassigned DNA
atgctggtctccatggcggggcctcggagccaagacgagagaaaatgctgctgtgaagacccaattaaagctttcacataaatgaagctacagctatcatgatttagtgcccccaaaaggaagaacttcagtggacaagaaaggacatttctgggggtagtagaatgcttgaggcctggaatttaaacctgagccactatctgaagcatctaatctgtatggactccagggattcttcctttggacaaaatgattctcctacagttttgcccatcactactcgtgaagcaaataattcactcatatcacagaatataccagggcccctgactcagacacagactctttctgcagagcaattccatctagtggaccaaaatgggcaggctattcaatatgaacttcagtcattgggggaatccaatgcacaaatgatgatcgttgccagcccaacagaaaatggacaggtacttcgtgtaattccacctacccagacaggaatggcacaagtgattatacctcaggggcaacttgtggatgtgaatagtcctcgggatgtccctgaagagaaacccagtaacagaaacttaccaactgtaagagtggatactctagcagacaataccagcaattacattcttcatcctcaaacatccttcccattgcccaaaaagtcagtgaccggaatgctggaagaaccccttctggggcctcttcagccactttcttctaatacacctatatgggcctgccgtcttaggagctgtgagggagtagagctgtggtaatggagtgtcagtatgggccaagaagaaaaggtttccagttaaaaaaagtcagtgagcaggaaagcaggtcttgtcagctctacaaagccacttgtccagctcggatttacattaaaaaggtacagaagtttcctgaatatagagttcctacagaccccaaaattgacaagaaaattatcagaatggagcaggagaaagcttttaacatgctaaagaagaacttggtagatgctggtggtgttcttaggtggtatgtacagttacctacacagcaagctcatcagtatcatgaattagagactccctgcctcactttgtcaccttctccttttcctgtgtcttctcttg

SEQ ID NO: 1897 - DNA, 2099 bp, Homo sapiens
  source 1..2099: mol_type = unassigned DNA
attatgctggtctccatggcggggcctcggagccaagacgagagaaaatgctgctgtgaagacccaattaaagctttcacataaatgaagctacagctatcatgatttagtgcccccaaaaggaagaacttcagtggacaagaaaggacatttctgggggtagtagaatgcttgaggcctggaatttaaacctgagccactatctgaagatgatcgttgccagcccaacagaaaatggacaggtacttcgtgtaattccacctacccagacaggaatggcacaagtgattatacctcaggggcaacttgtggatgtgaatagtcctcgggatgtccctgaagagaaacccagtaacagaaacttaccaactgtaagagtggatactctagcagacaataccagcaattacattcttcatcctcaaacatccttcccattgcccaaaaagtcagtgaccggaatgctggaagaaccccttctggggcctcttcagccactttcttctaatacacctatatgggcctgccgtcttaggagctgtgagaaaattggagattcataccgtggctactgtgtaagtgagactgaattagaaagtgtcctaacatttcacaagcagcaaacacagagtgtttgggggacccgtcagtctccaagcccagccaagcctgctacacgcttgatgtggaaatcccagtatgttccatatgatggaatcccatttgttaatgcagggagtagagctgtggtaatggagtgtcagtatgggccaagaagaaaaggtttccagttaaaaaaagtcagtgagcaggaaagcaggtcttgtcagctctacaaagccacttgtccagctcggatttacattaaaaaggtacagaagtttcctgaatatagagttcctacagaccccaaaattgacaagaaaattatcagaatggagcaggagaaagcttttaacatgctaaagaagaacttggtagatgctggtggtgttcttaggtggtatgtacagttacctacacagcaagctcatcagtatcatgaattagagactccctgcctcactttgtcaccttctccttttcctgtgtcttctcttgaagaagaggaaactgcagttagagatgagaattgtgcattaccctcacgtttacatcctcaagtagcacataagattcaagaattagtatcacagggaatagaacaagtgtatgcagtaaggaaacagctaagaaaatttgtggaaagggaactgttcaaacccgatgaggtacctgaaagacataatttatctttttttccaactgtaaatgatataaaaaatcacatccatgaggtacagaaatccttgagaaatggagatacggtatataactcagagattattccagcaacgcttcaatggactacagacagtgggaatattctcaaagagaccatgacagttacatttgcagaaggaaattcaccaggagaatcaattaccaccaaagtggaaacaaatcagaccaggggttctttgtctcctgagccaacccacttgctctcctcactctcctcatttcagcccaaaatatttacacaactacagggtttgcagttacaaccaaggtacacctctcctgatgaatcaccagctgtggtatcagtaaataaccagccgtcctctagtccttcaggacttctggatacaataggaagtgctgtaatgaataataattctctactgcttggtcaaagtcatagccttcaaagagatacatgcttaacccaaaacaatagtactgcctccaccatgggtaaccttccagaaccagatcaaaatctagttgcaatggacgagctggtagaagttggagatgttgaggatacagggaatctggaaggaactgttcatcggattctgttgggagatgtgcagactattccaatacagattatagacaaccactcagctcttattgaagaaaatccagaaagtaccatttctgtgagccaagttaaacaagaacccaaagaaccagcattgtctatggaagcaaaaaaaactgtggactataagaaattatctgctacataaattattgaagcttttcag

SEQ ID NO: 1898 - DNA, 2770 bp, Homo sapiens
  source 1..2770: mol_type = unassigned DNA
attatgctggtctccatggcggggcctcggagccaagacgaggcattcgcttcaagagacaagcagtttagaatcaggcagaactggattgcaaaatttatgggcagaccggtatgtgtgcagagaaaatgctgctgtgaagacccaattaaagctttcacataaatgaagctacagctatcatgatttagtgcccccaaaaggaagaacttcagtggacaagaaaggacatttctgggggtagtagaatgcttgaggcctggaatttaaacctgagccactatctgaagctattaaataatagaagaaaatggaattgaatatgatgtcagcatggaacaatctaatgattcattaagagtcaaccataatgacggtgaagagtcaaaaaccagtgctcaagtatttgagatgatcgttgccagcccaacagaaaatggacaggtacttcgtgtaattccacctacccagacaggaatggcacaagtgattatacctcaggggcaacttgtggatgtgaatagtcctcgggatgtccctgaagagaaacccagtaacagaaacttaccaactgtaagagtggatactctagcagacaataccagcaattacattcttcatcctcaaacatccttcccattgcccaaaaagtcagtgaccggaatgctggaagaaccccttctggggcctcttcagccactttcttctaatacacctatatgggcctgccgtcttaggagctgtgagaaaattggagattcataccgtggctactgtgtaagtgagactgaattagaaagtgtcctaacatttcacaagcagcaaacacagagtgtttgggggacccgtcagtctccaagcccagccaagcctgctacacgcttgatgtggaaatcccagtatgttccatatgatggaatcccatttgttaatgcagggagtagagctgtggtaatggagtgtcagtatgggccaagaagaaaaggtttccagttaaaaaaagtcagtgagcaggaaagcaggtcttgtcagctctacaaagccacttgtccagctcggatttacattaaaaaggtacagaagtttcctgaatatagagttcctacagaccccaaaattgacaagaaaattatcagaatggagcaggagaaagcttttaacatgctaaagaagaacttggtagatgctggtggtgttcttaggtggtatgtacagttacctacacagcaagctcatcagtatcatgaattagagactccctgcctcactttgtcaccttctccttttcctgtgtcttctcttgaagaagaggaaactgcagttagagatgagaattgtgcattaccctcacgtttacatcctcaagtagcacataagattcaagaattagtatcacagggaatagaacaagtgtatgcagtaaggaaacagctaagaaaatttgtggaaagggaactgttcaaacccgatgaggtacctgaaagacataatttatctttttttccaactgtaaatgatataaaaaatcacatccatgaggtacagaaatccttgagaaatggagatacggtatataactcagagattattccagcaacgcttcaatggactacagacagtgggaatattctcaaagagaccatgacagttacatttgcagaaggaaattcaccaggagaatcaattaccaccaaagtggaaacaaatcagaccaggggttctttgtctcctgagccaacccacttgctctcctcactctcctcatttcagcccaaaatatttacacaactacagggtttgcagttacaaccaaggtacacctctcctgatgaatcaccagctgtggtatcagtaaataaccagccgtcctctagtccttcaggacttctggatacaataggaagtgctgtaatgaataataattctctactgcttggtcaaagtcatagccttcaaagagatacatgcttaacccaaaacaatagtactgcctccaccatgggtaaccttccagaaccagatcaaaatctagttgcaatggacgagctggtagaagttggagatgttgaggatacagggaatctggaaggaactgttcatcggattctgttgggagatgtgcagactattccaatacagattatagacaaccactcagctcttattgaagaaaatccagaaagtaccatttctgtgagccaagttaaacaagaacccaaagaaccagcattgtctatggaagcaaaaaaaactgtggactataagaaattatctgctacataaattattgaagcttttcagaatttacaactctggtgacttctgatgtcttagaaaggaaggtgaatatagtcaaagcgtggcattgagataattggactgaagaccagtttgatgagaagcttttatttaaaactgatatatttgttgccagttccatatttttaccttccttaagagatgttttactcttcttattttgtataatttttatgctctttgattatctaataaggccagtatttcaaaagctgttctgaatttatccacagtaatatagtctgaacacaaatagtttacttaacttatccttggaaatattcaattttggttattacaaaacagaaaagaacaacagcaacaaaaacattgtgtgaatgtatgtttgtatgtgtgtatgtatatcatgaattttttttttaagttctgaaaaagaacttgttctctccttaaagttgtgaagaaattgttaattgccagacaggtaaga

SEQ ID NO: 1899 - DNA, 868 bp, Homo sapiens
  source 1..868: mol_type = unassigned DNA
attgagctgcgacccttgttcaacgccgttggcgaagccagctgctggaggtgccgagaatctgagtttcggcaagcagccagaatattttaaaaatgactacaccaaacaagacacctcctggtgctgaccccaagcagttggaaaggactggaacagtacgggaaattgggtcacaagctgtttggtcactctcatcttgcaaaccaggatttggagtggatcagttacgagatgacaatctagaaacttattggcaatcagatggttcccagcctcatttagtgaacatccaattcagaagaaaaacaacagtgaagacattatgtatttatgcagactacaaatctgatgaaagctatactccaagcaagatctcagtcagagtaggaaataattttcacaaccttcaagaaattcggcaacttgagttggtggaaccaagtggctggattcatgttcccttaactgacaatcataagaagccaactcgtacattcatgatacagattgctgttctagccaatcaccagaatggaagagacacccatatgagacaaattaaaatatacacaccagtagaagagagctccattggtaaatttcctagatgtacaactatagatttcatgatgtatcgttcaataaggtgactttaaaatgagacgaaaatcattaaacgtatctttgttttatcctgtatttaaataatatatcatgtacctttattgaacaaggcatccgttatatctaattttgtatatgtttaaaaatattttattgtaactttgacaaataaatttggggtcatattatctttattttctttaacatgtaataaagctcacatattttacattactaaaaa

SEQ ID NO: 1900 - DNA, 928 bp, Homo sapiens
  source 1..928: mol_type = unassigned DNA
gccgttggcgaagccagctgctggaggtgccgagaatctgagtttcggcaagcagccaggtctggaaactgtaacaggacattcagttagtaatgatggttgcaggttgaatagtctcgccctagatctcacctaacttgcagaatattttaaaaatgactacaccaaacaagacacctcctggtgctgaccccaagcagttggaaaggactggaacagtacgggaaattgggtcacaagctgtttggtcactctcatcttgcaaaccaggatttggagtggatcagttacgagatgacaatctagaaacttattggcaatcagatggttcccagcctcatttagtgaacatccaattcagaagaaaaacaacagtgaagacattatgtatttatgcagactacaaatctgatgaaagctatactccaagcaagatctcagtcagagtaggaaataattttcacaaccttcaagaaattcggcaacttgagttggtggaaccaagtggctggattcatgttcccttaactgacaatcataagaagccaactcgtacattcatgatacagattgctgttctagccaatcaccagaatggaagagacacccatatgagacaaattaaaatatacacaccagtagaagagagctccattggtaaatttcctagatgtacaactatagatttcatgatgtatcgttcaataaggtgactttaaaatgagacgaaaatcattaaacgtatctttgttttatcctgtatttaaataatatatcatgtacctttattgaacaaggcatccgttatatctaattttgtatatgtttaaaaatattttattgtaactttgacaaataaatttggggtcatattatctttattttctttaacatgtaataaagctcacatattttacattactaaaaa

SEQ ID NO: 1901 - DNA, 608 bp, Homo sapiens
  source 1..608: mol_type = unassigned DNA
gccaggtctggaaactgtgagtgtgtgggcttttctccgacgtcgagcgtggtcctagcgtaaacagatgcattcgcctctccggtttcaatctttttttacgtttgcgctttcctcaaggccggtgggtcaggagtggagccttagtcattctaacgctggaggtgtcagtaggaccaacagagtctggtgccgacacggcttactgttgcgcgctcttctaggcctcaacttcctctcaactgtgtggtaacaggacattcagttagtaatgatggttgcaggttgaatagtctcgccctagatctcacctaacttgcagtaagtatcaagtgcttgtgtgccgattaaagaacaacttcggatacaatgggaggtgtcaaggaaacgaatattttaaaaatgactacaccaaacaagacacctcctggtgctgaccccaagcagttggaaaggactggaacagtacgggaaattgggtcacaagctgtttggtcactctcatcttgcaaaccaggatttggagtggatcagttacgagatgacaatctagaaacttattggcaatcagatggttcccagcctcatttagtgaacatccaattcag

SEQ ID NO: 1902 - DNA, 477 bp, Homo sapiens
  source 1..477: mol_type = unassigned DNA
tttttcacatatgaatagacttagtaaaattaacaaaagatgtgaaagatgaggtcaacctttttagaatgggccagttattcacttcaaaatcttgaagccattttcctgaccttatcttctatggtaagagcatataatattttaaaaatgactacaccaaacaagacacctcctggtgctgaccccaagcagttggaaaggactggaacagtacgggaaattgggtcacaagctgtttggtcactctcatcttgcaaaccaggatttggagtggatcagttacgagatgacaatctagaaacttattggcaatcagatggttcccagcctcatttagtgaacatccaattcagaagaaaaacaacagtgaagacattatgtatttatgcagactacaaatctgatgaaagctatactccaagcaagatctcagtcagagtaggaaataattttcacaaccttcaagaaattcgg

SEQ ID NO: 1903 - DNA, 1025 bp, Homo sapiens
  source 1..1025: mol_type = unassigned DNA
cccttgttcaacgccgttggcgaagccagctgctggaggtgccgagaatctgagtttcggcaagcagccaggtctggaaactaatattttaaaaatgactacaccaaacaagacacctcctggtgctgaccccaagcagttggaaaggactggaacagtacgggaaattgggtcacaagctgtttggtcactctcatcttgcaaaccaggatttggagtggatcagttacgagatgacaatctagaaacttattggcaatcagatggttcccagcctcatttagtgaacatccaattcagaagaaaaacaacagtgaagacattatgtatttatgcagactacaaatctgatgaaagctatactccaagcaagatctcagtcagagtaggaaataattttcacaaccttcaagaaattcggcaacttgagttggtggaaccaagtggctggattcatgttcccttaactgacaatcataagaagccaactcgtacattcatgatacagattgctgttctagccaatcaccagaatggaagagacacccatatgagacaaattaaaatatacacaccagtagaagagagctccattggtaaatttcctagatgtacaactatagatttcatgatgtatcgttcaataaggtgactttaaaatgagacgaaaatcattaaacgtatctttgttttatcctgtatttaaataatatatcatgtacctttattgaacaaggcatccgttatatctaattttgtatatgtttaaaaatattttattgtaactttgacaaataaatttggggtcatattatctttattttctttaacatgtaataaagctcacatattttacattactaaaaatggatttgaagccaatcattttattttcccttgtatcaaaagaaaagagttccttgtatcaaaagaaaagagttgaactgaaaatttcagtatatacacaattataatagctaggtgattatttcattagtgttcatacattagagtaatggtttatt

SEQ ID NO: 1904 - DNA, 689 bp, Homo sapiens
  source 1..689: mol_type = unassigned DNA
gaagccagctgctggaggtgccgagaatctgagtttcggcaagcagccaggtctggaaactgtaacaggacattcagttagtaatgatggttgcaggttgaatagtctcgccctagatctcacctaacttgcagtaagtatcaagtgcttgtgtgccgattaaagaacaacttcggatacaatgggaggtgtcaaggaaacgaatattttaaaaatgactacaccaaacaagacacctcctggtgctgaccccaagcagttggaaaggactggaacagtacgggaaattgggtcacaagctgtttggtcactctcatcttgcaaaccaggatttggagtggatcagttacgagatgacaatctagaaacttattggcaatcagatggttcccagcctcatttagtgaacatccaattcagaagaaaaacaacagtgaagacattatgtatttatgcagactacaaatctgatgaaagctatactccaagcaagatctcagtcagagtaggaaataattttcacaaccttcaagaaattcggcaacttgagttggtggaaccaagtggctggattcatgttcccttaactgacaatcataagaagccaactcgtacattcatgatacagattgctgttctagccaatcaccagaatggaagagacacccatatgagacaaattaaaatat

SEQ ID NO: 1905 - DNA, 794 bp, Homo sapiens
  source 1..794: mol_type = unassigned DNA
acgcgctgctgctgtctccgccacctaaggcctaaccaaaggctctcggagaacgtccctacattctttccaacctggcagatggcagctaacggccaaacctctccgggctattcacgtacctggagaaaacgatccccttgcggaggggagcacagaggccaaatcagctcttgccttcacttttcagccacacagcgtgttctcacggccaccggccaaaatggcggtgcccagccgccgcacgcgcaagccataggacgtagtgcgcgcgcgcgacatagagcgtgaggcggaaccctggagaatattttaaaaatgactacaccaaacaagacacctcctggtgctgaccccaagcagttggaaaggactggaacagtacgggaaattgggtcacaagctgtttggtcactctcatcttgcaaaccaggatttggagtggatcagttacgagatgacaatctagaaacttattggcaatcagatggttcccagcctcatttagtgaacatccaattcagaagaaaaacaacagtgaagacattatgtatttatgcagactacaaatctgatgaaagctatactccaagcaagatctcagtcagagtaggaaataattttcacaaccttcaagaaattcggcaacttgagttggtggaaccaagtggctggattcatgttcccttaactgacaatcataagaagccaactcgtacattcatgatacagattgctgttctagccaatcaccagaatggaagagacacccatatgagacaaattaaaatata

SEQ ID NO: 1906 - DNA, 1164 bp, Homo sapiens
  source 1..1164: mol_type = unassigned DNA
cgaacacgccgcggtcctcgtcgtggtgagcgcagccactcaggctggtcctgggggtggggctgtaggggaaagtgctaaagccgctgagtgaagtaagaactctgctagagaggaaatggctgcttcatcatcatcctcctcagctggtggggtcagtggaagttctgtcactggatctggtttcagtgtctcagaccttgccccaccacggaaagcccttttcacctaccccaaaggagctggagagatgttagaagatggctctgagagattcctctgcgaatctgtttttagctatcaagtggcatccacgcttaaacaggtgaaacatgatcagcaagttgctcggatggaaaaactagctggtttggtagaagagctggaggctgacgagtggcggtttaagcccatcgagcagctgctgggattcaccccctcttcaggttgatactgcctggatggtcacctctggtgcgcagcaagtgcaaagccagtgggggactttctcacagcttacatagccatccagagatccacagctacgtcactgaattgttaatgcacatttgtacttggtttctctgtatctattcacaggcaacaaatacttatatgtgtgatctttcagggaatgttttgtttatttgtttttaaaagtattgggaatcagattaagacaatcagtttcagagaaccaggaggtttggggttaagagatactcaaaaattttcacaagccaagtagggcatatatcagatttggccaactgaatggcgtctgtcctgtcatccatatggtgcctggaaatatttaccagtcaaggtcaaggtcagcatctgtggttaaaaatatagcattctgacctaaaaaagttattttgcagatgaatgtgttttcaactcaggacctatccaaatgaggaatttttaaatattcttttttttttcctatttttagacatcaattctatagattctgactttttctaacctcttatagacatgccaaatgctggcaaaaagaagtgctttttggatatggcagcacttgtaaaaataaagcagtaagcaaaatccttttaaacacagaaatcctgagttcttctcattggtggactcaagcaattctgtagcaaataaatcctttgaaagagctccaaa

SEQ ID NO: 1907 - DNA, 2685 bp, Homo sapiens
  source 1..2685: mol_type = unassigned DNA
cccgacgccggaagtgcctggagcgcgcgacagcggcggggcggggcggcctggaggctgtggcgcgcggccggcagagggaggggagaggccactggggccgtgttagtctgccggtggggactcttgcagggccgtccccatgttgcgttttccgacctgtttcccatccttccgggtggtgggagagaagcagctcccgcaggagattattttcctggtctggtcgcccaagcgggatctcattgctttggccaacacagctggcgaggttttacttcatcgactggcaagttttcatcgagtttggagttttccaccaaatgaaaatacaggaaaggaggtgacgtgtctggcatggagaccagatggcaaacttttggcctttgctcttgctgataccaagaaaattgttttgtgtgatgtagaaaaacctgagagcttacactctttttctgtggaggctccagtttcctgtatgcattggatggaagtgacagtagaaagcagtgttctcacatcattttataatgctgaggatgaatcaaatcttctcttacctaaactacctacactgccaaaaaactatagcaacacctcaaaaatatttagtgaagaaaattctgatgaaattattaagctcttgggagacgtcaggcttaatattctcgtccttggaggaagctctggatttattgagctttatgcttatggaatgtttaaaattgctcgagtcacagggattgctggtacttgtcttgcattatgtttatcaagtgatttgaaatcattatcagtggtcacagaagtctctaccaatggtgcttcagaagtttcatactttcagcttgaaactaatctgttgtactctttcttacctgaagtaactcggatggccagaaagtttactcatatttcagctctgttacagtatataaatttgtcactaacatgtatgtgtgaagcatgggaagaaatactaatgcagatggattctcgtctcaccaagtttgtgcaggaaaagaacacaaccacatcagtgcaagatgagttcatgcacttgctattatgggggaaagcaagtgctgaacttcagactctcttgatgaatcagttaacagtaaagggcttgaaaaagcttggccagtctatagagtcatcatactccagtatacaaaaattggtcataagtcatttacagagtggctcggagtctttattataccatttgagtgaattgaaaggaatggcttcatggaagcaaaaatatgaacctcttggactagatgctgcaggaatcgaagaagctataactgctgtgggttcttttatactcaaggcaaatgaacttcttcaagttatagatagtagtatgaaaaacttcaaagcattttttcggtggctttatgtggcaatgttgagaatgacagaagaccatgtgcttcccgagctgaataagatgactcagaaagatatcacatttgttgctgaatttcttactgaacatttcaatgaggctccagacctttataatcgaaaaggaaaatactttaacgttgaaagagttggtcagtacttgaaagatgaagatgatgatcttgtgtcaccccctaacacagaaggaaaccagtggtatgactttcttcaaaatagcagccaccttaaagaaagtcctttgctgtttccttattatcctcgaaaatcattgcattttgtgaaaaggcggatggagaatattattgatcagtgtttgcaaaagccagcagatgtaattggaaaatcgatgaatcaagcaatctgtattccattgtatagagataccagaagtgaggattctacacgtagattgttcaaatttccttttctgtggaataataaaacttcaaatctacattatcttctttttactattctagaagattcactttataaaatgtgcatcttaaggagacatactgatatttctcaatctgtgagtaatggactaattgctattaaatttgggagctttacatatgccacaacagaaaaagtcagaagaagcatctacagttgtttagatgcacagttttatgatgatgaaactgtaacagtagttcttaaagacactgtaggacgtgaaggaagagatagactcttggtccagctgcctttgtctttagtatataacagtgaagattctgcagaatatcagttcactgggacttattctacaaggctagatgaacagtgtagtgctattcccacccgtaccatgcattttgagaagcactggagattactggaaagtatgaaagcacagtatgttgctgggaatggttttcgaaaagtgtcctgtgtgttaagctcaaatcttcgtcatgtgagagtatttgaaatggacatagatgatgaatgggagctcgatgagtcttcagatgaagaggaggaggccagtaataagcctgtaaaaataaaggaagaagtgttgtcggagtcagaggcagagaaccaacaagctggtgctgccgctttagctccagagatagtcattaaagtggaaaaacttgaccctgagctagactcctaatctagcttgccattattgtgtgtgtaattatggccaaaaggacataggagatggactaagatgtcttggaccacctttgtgtaacaaagaaataaacagtaaattttattttttca

SEQ ID NO: 1908 - DNA, 595 bp, Homo sapiens
  source 1..595: mol_type = unassigned DNA
agtctgccggtggggactcttgcaggtacaggcgcggtcggggctcctcgtggagagccgggggctcctgccggcctctgactggggtgtcgttgcagggccgtccccatgttgcgttttccgacctgtttcccatccttccgggtggtgggagagaagcagctcccgcaggagattattttcctggtctggtcgcccaagcgggatctcattgctttggccaacacagctggcgaggttttacttcatcgactggcaagttttcatcgagtttggagttttccaccaaatgaaaatacaggaaaggaggtgacgtgtctggcatggagaccagatggcaaacttttggcctttgctcttgctgataccaagaaaattgttttgtgtgatgtagaaaaacctgagagcttacactctttttctgtggaggctccagtttcctgtatgcattggatggaagtgacagtagaaagcagtgttctcacatcattttataatgctgaggatgaatcaaatcttctcttacctaaactacctacactgccaaaaaactatagcaacacctcaaaaatatttagtgaagaaaattctgatg

SEQ ID NO: 1909 - DNA, 2599 bp, Homo sapiens
  source 1..2599: mol_type = unassigned DNA
gaggggagaggccactggggccgtgttagtctgccggtggggactcttgcagggccgtccccatgttgcgttttccgacctgtttcccatccttccgggtggtgggagagaagcagctcccgcaggagattattttcctggtctggtcgcccaagcgggatctcattgctttggccaacacagctggcgaggttttacttcatcgactggcaagttttcatcgagtttggagttttccaccaaatgaaaatacaggaaaggaggtgacgtgtctggcatggagaccagatggcaaacttttggcctttgctcttgctgataccaagaaaattgttttgtgtgatgtagaaaaacctgagagcttacactctttttctgtggaggctccagtttcctgtatgcattggatggaagtgacagtagaaagcagtgttctcacatcattttataatgctgaggatgaatcaaatcttctcttacctaaactacctacactgccaaaaaactatagcaacacctcaaaaatatttagtgaagaaaattctgatgaaattattaagctcttgggagacgtcaggcttaatattctcgtccttggaggaagctctggatttattgagctttatgcttatggaatgtttaaaattgctcgagtcacagggattgctggtacttgtcttgcattatgtttatcaagtgatttgaaatcattatcagtggtcacagaagtctctaccaatggtgcttcagaagtttcatactttcagcttgaaactaatctgttgtactctttcttacctgaagtaactcggatggccagaaagtttactcatatttcagctctgttacagtatataaatttgtcactaacatgtatgtgtgaagcatgggaagaaatactaatgcagatggattctcgtctcaccaagtttgtgcaggaaaagaacacaaccacatcagtgcaagatgagttcatgcacttgctattatgggggaaagcaagtgctgaacttcagactctcttgatgaatcagttaacagtaaagggcttgaaaaagcttggccagtctatagagtcatcatactccagtatacaaaaattggtcataagtcatttacagagtggctcggagtctttattataccatttgagtgaattgaaaggaatggcttcatggaagcaaaaatatgaacctcttggactagatgctgcaggaatcgaagaagctataactgctgtgggttcttttatactcaaggcaaatgaacttcttcaagttatagatagtagtatgaaaaacttcaaagcattttttcggtggctttatgtggcaatgttgagaatgacagaagaccatgtgcttcccgagctgaataaggtaatgactcagaaagatatcacatttgttgctgaatttcttactgaacatttcaatgaggctccagacctttataatcgaaaaggaaaatactttaacgttgaaagagttggtcagtacttgaaagatgaagatgatgatcttgtgtcaccccctaacacagaaggaaaccagtggtatgactttcttcaaaatagcagccaccttaaagaaagtcctttgctgtttccttattatcctcgaaaatcattgcattttgtgaaaaggcggatggagaatattattgatcagtgtttgcaaaagccagcagatgtaattggaaaatcgatgaatcaagcaatctgtattccattgtatagagataccagaagtgaggattctacacgtagattgttcaaatttccttttctgtggaataataaaacttcaaatctacattatcttctttttactattctagaagattcactttataaaatgtgcatcttaaggagacatactgatatttctcaatctgtgagtaatggactaattgctattaaatttgggagctttacatatgccacaacagaaaaagtcagaagaagcatctacagttgtttagatgcacagttttatgatgatgaaactgtaacagtagttcttaaagacactgtaggacgtgaaggaagagatagactcttggtccagctgcctttgtctttagtatataacagtgaagattctgcagaatatcagttcactgggacttattctacaaggctagatgaacagtgtagtgctattcccacccgtaccatgcattttgagaagcactggagattactggaaagtatgaaagcacagtatgttgctgggaatggttttcgaaaagtgtcctgtgtgttaagctcaaatcttcgtcatgtgagagtatttgaaatggacatagatgatgaatgggagctcgatgagtcttcagatgaagaggaggaggccagtaataagcctgtaaaaataaaggaagaagtgttgtcggagtcagaggcagagaaccaacaagctggtgctgccgctttagctccagagatagtcattaaagtggaaaaacttgaccctgagctagactcctaatctagcttgccattattgtgtgtgtaattatggccaaaaggacataggagatggactaagatgtcttggaccacctttgtgtaacaaagaaataaacagtaaatttt

SEQ ID NO: 1910 - DNA, 2513 bp, Homo sapiens
  source 1..2513: mol_type = unassigned DNA
gcggatgtctgtttcctgggatattgtgagggcgggcggagatgtagacccggtagtgttgtgccttgtggtgacaactggcggcagcgcgccgcgggcccgagacttagtctcgggccgccatggccagcgtccacgagagcctctacttcaatcccatgatgaccaatggggttgtgcacgccaatgtgttcggcatcaaggactgggtgacgccgtacaagatcgcggtgctggtgctgctgaacgagatgagccgcacaggcgagggcgccgtcagcctcatggagcggcggaggctcaaccagctgctcctgcccctgctgcagggcccagatattacactgtcaaaactttacaagttaattgaagagtcttgtccacagctggcaaattcagtgcagatcagaatcaaactgatggctgaaggcgagttgaaggatatggaacagttttttgatgacctttcagattctttctctggaactgaaccagaggttcacaaaacaagtgtagtaggtttgtttctgcgtcacatgatcttggcctacagtaagctttctttcagccaagtgtttaaactgtacactgcccttcagcagtacttccagaatggtgagaaaaagacagtggaggatgctgatatggaactgaccagtagagatgagggtgaaagaaaaatggaaaaagaagaacttgatgtatctgtaagagaagaggaggtatcttgcagtgggcctctgtcccaaaaacaagcagaattttttctttctcaacaggcttctttgctaaagaatgatgagactaaggccctcactccagcttccttgcagaaggaattaaacaatttgttgaaatttaatcctgattttgctgaagcgcattatctcagctacttaaacaacctccgtgtccaagatgttttcagttcaacacacagtctcctccattattttgatcgtctgattcttaccggagccgaaagcaaaagtaatggggaagagggctatggccggagcttgagatacgccgctctgaatcttgccgccctgcactgccgcttcggtcactatcaacaggcagagctcgccctgcaggaggcaattaggattgcccaggagtccaacgatcacgtgtgtctccagcactgtttgagctggctttatgtgctggggcagaagagatccgatagctatgttctgctggagcattctgtgaagaaggcagtacattttgggttaccgtacctcgcctccctgggaatacagtcccttgttcaacagagagcttttgctgggaagacggcaaacaagctgatggatgccctaaaggactccgacctcctgcactggaaacacagcctgtcagagctcatcgatatcagcatcgcacagaaaacggccatctggaggctgtatggccgcagcaccatggcactgcaacaggcccagatgttgctgagcatgaacagcctggaggcggtgaatgcgggcgtgcagcagaacaacacagagtcctttgctgtcgcactctgccacctcgcagagctacacgcggagcagggctgttttgctgcagcttctgaagtgttaaagcacttgaaggaacgatttccgcctaatagtcagcacgcccagttatggatgctatgtgatcaaaaaatacagtttgacagagcaatgaatgatggcaaatatcatttggctgattcacttgttacaggaatcacagctctcaatagcatagagggtgtttataggaaagcggttgtattacaagctcagaaccaaatgtcagaggcacataagcttttacaaaaattgttggttcattgtcagaaactgaagaacacagaaatggtgatcagtgtcctactgtccgtggcagagctgtactggcgatcttcctcccctaccatcgcgctgcccatgctcctgcaggctctggccctctccaaggagtaccggttacagtacttggcctctgaaacagtgctgaacttggcttttgcgcagctcattcttggaatcccagaacaggccttaagtcttctccacatggccatcgagcccatcttggctgacggggctatcctggacaaaggtcgtgccatgttcttagtggccaagtgccaggtggcttcagcagcttcctacgatcagccgaagaaagcagaagctctggaggctgccatcgagaacctcaatgaagccaagaactattttgcaaaggttgactgcaaagagcgcatcagggacgtcgtttacttccaggccagactctaccataccctggggaagacccaggagaggaaccggtgtgcgatgctcttccggcagctgcatcaggagctgccctctcatggggtacccttgataaaccatctctagagaggacatccctgctgggctgctgtgcagagtataagattttggacttgttcatgtcccctctctccctataaatgatgtatttgtgacaccctatcttgtcaataaacagcattctgatta

SEQ ID NO: 1911 - DNA, 1932 bp, Homo sapiens
  source 1..1932: mol_type = unassigned DNA
atggctgaaggcgagttgaaggatatggaacagttttttgatgacctttcagattctttctctggaactgaaccagaggttcacaaaacaagtgtagtaggtttgtttctgcgtcacatgatcttggcctacagtaagctttctttcagccaagtgtttaaactgtacactgcccttcagcagtacttccagaatggtgagaaaaagacagtggaggatgctgatatggaactgaccagtagagatgagggtgaaagaaaaatggaaaaagaagaacttgatgtatctgtaagagaagaggaggtatcttgcagtgggcctctgtcccaaaaacaagcagaattttttctttctcaacaggcttctttgctaaagaatgatgagactaaggccctcactccagcttccttgcagaaggaattaaacaatttgttgaaatttaatcctgattttgctgaagcgcattatctcagctacttaaacaacctccgtgtccaagatgttttcagttcaacacacagtctcctccattattttgatcgtctgattcttaccggagccgaaagcaaaagtaatggggaagagggctatggccggagcttgagatacgccgctctgaatcttgccgccctgcactgccgcttcggtcactatcaacaggcagagctcgccctgcaggaggcaattaggattgcccaggagtccaacgatcacgtgtgtctccagcactgtttgagctggctttatgtgctggggcagaagagatccgatagctatgttctgctggagcattctgtgaagaaggcagtacattttgggttaccgagagcttttgctgggaagacggcaaacaagctgatggatgccctaaaggactccgacctcctgcactggaaacacagcctgtcagagctcatcgatatcagcatcgcacagaaaacggccatctggaggctgtatggccgcagcaccatggcactgcaacaggcccagatgttgctgagcatgaacagcctggaggcggtgaatgcgggcgtgcagcagaacaacacagagtcctttgctgtcgcactctgccacctcgcagagctacacgcggagcagggctgttttgctgcagcttctgaagtgttaaagcacttgaaggaacgatttccgcctaatagtcagcacgcccagttatggatgctatgtgatcaaaaaatacagtttgacagagcaatgaatgatggcaaatatcatttggctgattcacttgttacaggaatcacagctctcaatagcatagagggtgtttataggaaagcggttgtattacaagctcagaaccaaatgtcagaggcacataagcttttacaaaaattgttggttcattgtcagaaactgaagaacacagaaatggtgatcagtgtcctactgtccgtggcagagctgtactggcgatcttcctcccctaccatcgcgctgcccatgctcctgcaggctctggccctctccaaggagtaccggttacagtacttggcctctgaaacagtgctgaacttggcttttgcgcagctcattcttggaatcccagaacaggccttaagtcttctccacatggccatcgagcccatcttggctgacggggctatcctggacaaaggtcgtgccatgttcttagtggccaagtgccaggtggcttcagcagcttcctacgatcagccgaagaaagcagaagctctggaggctgccatcgagaacctcaatgaagccaagaactattttgcaaaggttgactgcaaagagcgcatcagggacgtcgtttacttccaggccagactctaccataccctggggaagacccaggagaggaaccggtgtgcgatgctcttccggcagctgcatcaggagctgccctctcatggggtacccttgataaaccatctctag

SEQ ID NO: 1912 - DNA, 2147 bp, Homo sapiens
  source 1..2147: mol_type = unassigned DNA
agggcccagatattacactgtcaaaactttacaagttaattgaagagtcttgtccacagctggcaaattcagtgcagatcagaatcaaactgatggctgaaggcgagttgaaggatatggaacagttttttgatgacctttcagattctttctctggaactgaaccagaggttcacaaaacaagtgtagtaggtttgtttctgcgtcacatgatcttggcctacagtaagctttctttcagccaagtgtttaaactgtacactgcccttcagcagtacttccagaatggtgagaaaaagacagtggaggatgctgatatggaactgaccagtagagatgagggtgaaagaaaaatggaaaaagaagaacttgatgtatctgtaagagaagaggaggtatcttgcagtgggcctctgtcccaaaaacaagcagaattttttctttctcaacaggcttctttgctaaagaatgatgagactaaggccctcactccagcttccttgcagaaggaattaaacaatttgttgaaatttaatcctgattttgctgaagcgcattatctcagctacttaaacaacctccgtgtccaagatgttttcagttcaacacacagtctcctccattattttgatcgtctgattcttaccggagccgaaagcaaaagtaatggggaagagggctatggccggagcttgagatacgccgctctgaatcttgccgccctgcactgccgcttcggtcactatcaacaggcagagctcgccctgcaggaggcaattaggattgcccaggagtccaacgatcacgtgtgtctccagcactgtttgagctggctttatgtgctggggcagaagagatccgatagctatgttctgctggagcattctgtgaagaaggcagtacattttgggttaccgagagcttttgctgggaagacggcaaacaagctgatggatgccctaaaggactccgacctcctgcactggaaacacagcctgtcagagctcatcgatatcagcatcgcacagaaaacggccatctggaggctgtatggccgcagcaccatggcactgcaacaggcccagatgttgctgagcatgaacagcctggaggcggtgaatgcgggcgtgcagcagaacaacacagagtcctttgctgtcgcactctgccacctcgcagagctacacgcggagcagggctgttttgctgcagcttctgaagtgttaaagcacttgaaggaacgatttccgcctaatagtcagcacgcccagttatggatgctatgtgatcaaaaaatacagtttgacagagcaatgaatgatggcaaatatcatttggctgattcacttgttacaggaatcacagctctcaatagcatagagggtgtttataggaaagcggttgtattacaagctcagaaccaaatgtcagaggcacataagcttttacaaaaattgttggttcattgtcagaaactgaagaacacagaaatggtgatcagtgtcctactgtccgtggcagagctgtactggcgatcttcctcccctaccatcgcgctgcccatgctcctgcaggctctggccctctccaaggagtaccggttacagtacttggcctctgaaacagtgctgaacttggcttttgcgcagctcattcttggaatcccagaacaggccttaagtcttctccacatggccatcgagcccatcttggctgacggggctatcctggacaaaggtcgtgccatgttcttagtggccaagtgccaggtggcttcagcagcttcctacgatcagccgaagaaagcagaagctctggaggctgccatcgagaacctcaatgaagccaagaactattttgcaaaggttgactgcaaagagcgcatcagggacgtcgtttacttccaggccagactctaccataccctggggaagacccaggagaggaaccggtgtgcgatgctcttccggcagctgcatcaggagctgccctctcatggggtacccttgataaaccatctctagagaggacatccctgctgggctgctgtgcagagtataagattttggacttgttcatgtcccctctctccctataaatgatgtatttgtgacaccctatcttgtcaataaacagcattctgatta

SEQ ID NO: 1913 - DNA, 660 bp, Homo sapiens
  source 1..660: mol_type = unassigned DNA
atgctttccccttgtctctcgtcttattttgtaggtttgtttctgcgtcacatgatcttggcctacagtaagctttctttcagccaagtgtttaaactgtacactgcccttcagcagtacttccagaatggtgagaaaaagacagtggaggatgctgatatggaactgaccagtagagatgagggtgaaagaaaaatggaaaaagaagaacttgatgtatctgtaagagaagaggaggtatcttgcagtgggcctctgtcccaaaaacaagcagaattttttctttctcaacaggcttctttgctaaagaatgatgagactaaggccctcactccagcttccttgcagaaggaattaaacaatttgttgaaatttaatcctgattttgctgaagcgcattatctcagctacttaaacaacctccgtgtccaagatgttttcagttcaacacacagtctcctccattattttgatcgtctgattcttaccggagccgaaagcaaaagtaatggggaagagggctatggccggagcttgagatacgccgctctgaatcttgccgccctgcactgccgcttcggtcactatacctcgcctccctgggaatacagtcccttgttcaacagagagcttttgctgggaagacggcaaacaagctga

SEQ ID NO: 1914 - DNA, 509 bp, Homo sapiens
  source 1..509: mol_type = unassigned DNA
aagacctgcggacctgggcgtggcggaaggcgcgctgcggcgctgctttctcggttgggtgtttgaaatgggagatagcgtccctgaggaagctgctgcggctttctgggctaggtggtcaagtttccggggaggggagcgcgggaagggccgtggtgaatttgaacacgccggttggctcgaaggcctttgttatgaccgtcagagcagggcctcagatttccttcccagacgttcccgcgttcatgctcggtgatgacctcggggctcctcactcgtgggtccgggcccagatattacactgtcaaaactttacaagttaattgaagagtcttgtccacagctggcaaattcagtgcagatcagaatcaaactgatggctgaaggcgagttgaaggatatggaacagttttttgatgacctttcagattctttctctggaactgaaccagaggttcacaaaacaagtgtagtaggtttgtttctgcgtcacatgatcttggcctaca

SEQ ID NO: 1915 - DNA, 1508 bp, Homo sapiens
  source 1..1508: mol_type = unassigned DNA
tttcagttcaacacacagtctcctccattattttgatcgtctgattcttaccggagccgaaagcaaaagtaatggggaagagggctatggccggagcttgagatacgccgctctgaatcttgccgccctgcactgccgcttcggtcactaagctggctttatgtgctggggcagaagagatccgatagctatgttctgctggagcattctgtgaagaaggcagtacattttgggttaccgtacctcgcctccctgggaatacagtcccttgttcaacagagagcttttgctgggaagacggcaaacaagctgatggatgccctaaaggactccgacctcctgcactggaaacacagcctgtcagagctcatcgatatcagcatcgcacagaaaacggccatctggaggctgtatggccgcagcaccatggcactgcaacaggcccagatgttgctgagcatgaacagcctggaggcggtgaatgcgggcgtgcagcagaacaacacagagtcctttgctgtcgcactctgccacctcgcagagctacacgcggagcagggctgttttgctgcagcttctgaagtgttaaagcacttgaaggaacgatttccgcctaatagtcagcacgcccagttatggatgctatgtgatcaaaaaatacagtttgacagagcaatgaatgatggcaaatatcatttggctgattcacttgttacaggaatcacagctctcaatagcatagagggtgtttataggaaagcggttgtattacaagctcagaaccaaatgtcagaggcacataagcttttacaaaaattgttggttcattgtcagaaactgaagaacacagaaatggtgatcagtgtcctactgtccgtggcagagctgtactggcgatcttcctcccctaccatcgcgctgcccatgctcctgcaggctctggccctctccaaggagtaccggttacagtacttggcctctgaaacagtgctgaacttggcttttgcgcagctcattcttggaatcccagaacaggccttaagtcttctccacatggccatcgagcccatcttggctgacggggctatcctggacaaaggtcgtgccatgttcttagtggccaagtgccaggtggcttcagcagcttcctacgatcagccgaagaaagcagaagctctggaggctgccatcgagaacctcaatgaagccaagaactattttgcaaaggttgactgcaaagagcgcatcagggacgtcgtttacttccaggccagactctaccataccctggggaagacccaggagaggaaccggtgtgcgatgctcttccggcagctgcatcaggagctgccctctcatggggtacccttgataaaccatctctagagaggacatccctgctgggctgctgtgcagagtataagattttggacttgttcatgtcccctctctccctataaatgatgtatttgtgacaccctatcttgtcaataaacagcattctgatt

SEQ ID NO: 1916 - DNA, 2400 bp, Homo sapiens
  source 1..2400: mol_type = unassigned DNA
caactggcggcagcgcgccgcgggcccgagacttagtctcgggccgccatggccagcgtccacgagagcctctacttcaatcccatgatgaccaatggggttgtgcacgccaatgtgttcggcatcaaggactgggtgacgccgtacaagatcgcggtgctggtgctgctgaacgagatgagccgcacaggcgagggcgccgtcagcctcatggagcggcggaggctcaaccagctgctcctgcccctgctgcagggcccagatattacactgtcaaaactttacaagttaattgaagagtcttgtccacagctggcaaattcagtgcagatcagaatcaaactgatggctgaaggcgagttgaaggatatggaacagttttttgatgacctttcagattctttctctggaactgaaccagaggttcacaaaacaagtgtagtaggtttgtttctgcgtcacatgatcttggcctacagtaagctttctttcagccaagtgtttaaactgtacactgcccttcagcagtacttccagaatggtgagaaaaagacagtggaggatgctgatatggaactgaccagtagagatgagggtgaaagaaaaatggaaaaagaagaacttgatgtatctgtaagagaagaggaggtatcttgcagtgggcctctgtcccaaaaacaagcagaattttttctttctcaacaggcttctttgctaaagaatgatgagactaaggccctcactccagcttccttgcagaaggaattaaacaatttgttgaaatttaatcctgattttgctgaagcgcattatctcagctacttaaacaacctccgtgtccaagatgttttcagttcaacacacagtctcctccattattttgatcgtctgattcttaccggagccgaaagcaaaagtaatggggaagagggctatggccggagcttgagatacgccgctctgaatcttgccgccctgcactgccgcttcggtcactatcaacaggcagagctcgccctgcaggaggcaattaggattgcccaggagtccaacgatcacgtgtgtctccagcactgtttgagctggctttatgtgctggggcagaagagatccgatagctatgttctgctggagcattctgtgaagaaggcagtacattttgggttaccgagagcttttgctgggaagacggcaaacaagctgatggatgccctaaaggactccgacctcctgcactggaaacacagcctgtcagagctcatcgatatcagcatcgcacagaaaacggccatctggaggctgtatggccgcagcaccatggcactgcaacaggcccagatgttgctgagcatgaacagcctggaggcggtgaatgcgggcgtgcagcagaacaacacagagtcctttgctgtcgcactctgccacctcgcagagctacacgcggagcagggctgttttgctgcagcttctgaagtgttaaagcacttgaaggaacgatttccgcctaatagtcagcacgcccagttatggatgctatgtgatcaaaaaatacagtttgacagagcaatgaatgatggcaaatatcatttggctgattcacttgttacaggaatcacagctctcaatagcatagagggtgtttataggaaagcggttgtattacaagctcagaaccaaatgtcagaggcacataagcttttacaaaaattgttggttcattgtcagaaactgaagaacacagaaatggtgatcagtgtcctactgtccgtggcagagctgtactggcgatcttcctcccctaccatcgcgctgcccatgctcctgcaggctctggccctctccaaggagtaccggttacagtacttggcctctgaaacagtgctgaacttggcttttgcgcagctcattcttggaatcccagaacaggccttaagtcttctccacatggccatcgagcccatcttggctgacggggctatcctggacaaaggtcgtgccatgttcttagtggccaagtgccaggtggcttcagcagcttcctacgatcagccgaagaaagcagaagctctggaggctgccatcgagaacctcaatgaagccaagaactattttgcaaaggttgactgcaaagagcgcatcagggacgtcgtttacttccaggccagactctaccataccctggggaagacccaggagaggaaccggtgtgcgatgctcttccggcagctgcatcaggagctgccctctcatggggtacccttgataaaccatctctagagaggacatccctgctgggctgctgtgcagagtataagattttggacttgttcatgtcccctctctccctataaatgatgtatttgtgacaccctatcttgtcaataaacagcattctgatta

SEQ ID NO: 1917 - DNA, 1794 bp, Homo sapiens
  source 1..1794: mol_type = unassigned DNA
gaatgccgggaattgtggtctccgccggacgcgagttgtgagacggcccaaggggccgcggggtatgctgggaccgctagcccttccggcgcgcctcaggacttcgggtcccctcaccccgggcggatgcccaaagactccgccttcccaagagcccctgcggccgggcgcgaaaatggcggcggcggcgacggccgggcgctcctgaagcagcagttatggagcttccctcagggccggggccggagcggctctttgactcgcaccggcttccgggtgactgcttcctactgctcgtgctgctgctctacgcgccagtcgggttctgcctcctcgtcctgcgcctctttctcgggatccacgtcttcctggtcagctgcgcgctgccagacagcgtccttcgcagattcgtagtgcggaccatgtgtgcggtgctagggctcgtggcccggcaggaggactccggactccgggatcacagtgtcagggtcctcatttccaaccatgtgacacctttcgaccacaacatagtcaatttgcttaccacctgtagcaccgtgagtgagagcgaggccgagagcgccacggggcggttccctggggcccagctgaaggcccccctgtccccactcgcgttccccatggaggatactgagttacccctaaccccgatcctctacccaacatgtcagtttttttttattttcctcaatatttttcttcttgctttctcttctcctggttcccagcctctactcaatagtccccccagctttgtgtgctggtctcggggcttcatggagatgaatgggcggggggagttggtggagtcactcaagagattctgtgcttccacgaggcttccccccactcctctgctgctattccctgaggaagaggccaccaatggccgggaggggctcctgcgcttcagttcctggccattttctatccaagatgtggtacaacctcttaccctgcaagttcagagacccctggtctctgtgacggtgtcagatgcctcctgggtctcagaactgctgtggtcacttttcgtccctttcacggtgtatcaagtaaggtggcttcgtcctgttcatcgccaactaggggaagcgaatgaggagtttgcactccgtgtacaacagctggtggccaaggaattgggccagacagggacacggctcactccagctgacaaagcagagcacatgaagcgacaaagacaccccagattgcgcccccagtcagcccagtcttctttccctccctcccctggtccttctcctgatgtgcaactggcaactctggctcagagagtcaaggaagttttgccccatgtgccattgggtgtcatccagagagacctggccaagactggctgtgtagacttgactatcactaatctgcttgagggggccgtagctttcatgcctgaagacatcaccaagggaactcagtccctacccacagcctctgcctccaagtttcccagctctggcccggtgacccctcagccaacagccctaacatttgccaagtcttcctgggcccggcaggagagcctgcaggagcgcaagcaagcactatatgaatacgcaagaaggagattcacagagagacgagcccaggaggctgactgagctcaaaggaacaggatggcacccagagccgcaggacggagactgggggcagccctcacccaactcacaacaggctggatgggtgggtggtaaaaagggaaggatgaggctcccccaatgtcacattaaattcatggttttcattcaaggc

SEQ ID NO: 1918 - DNA, 1695 bp, Homo sapiens
  source 1..1695: mol_type = unassigned DNA
acagtaggacgcggggcacgccggtacctgaagtccttcagaagtgcacgccgggaccaggattccgggaggccgactcctccctgccccacgaatgccgggaattgtggtctccgccggacgcgagttgtgagacggcccaaggggccgcggggtatgctgggaccgctagcccttccggcgcgcctcaggacttcgggtcccctcaccccgggcggatgcccaaagactccgccttcccaagagcccctgcggccgggcgcgaaaatggcggcggcggcgacggccgggcgctcctgaagcagcagttatggagcttccctcagggccggggccggagcggctctttgactcgcaccggcttccgggtgactgcttcctactgctcgtgctgctgctctacgcgccagtcgggttctgcctcctcgtcctgcgcctctttctcgggatccacgtcttcctggtcagctgcgcgctgccagacagcgtccttcgcagattcgtagtgcggaccatgtgtgcggtgctagggctcgtggcccggcaggaggactccggactccgggatcacagtgtcagggtcctcatttccaaccatgtgacacctttcgaccacaacatagtcaatttgcttaccacctgtagcacccctctactcaatagtccccccagctttgtgtgctggtctcggggcttcatggagatgaatgggcggggggagttggtggagtcactcaagagattctgtgcttccacgaggcttccccccactcctctgctgctattccctgaggaagaggccaccaatggccgggaggggctcctgcgcttcagttcctggccattttctatccaagatgtggtacaacctcttaccctgcaagttcagagacccctggtctctgtgacggtgtcagatgcctcctgggtctcagaactgctgtggtcacttttcgtccctttcacggtgtatcaagtaaggtggcttcgtcctgttcatcgccaactaggggaagcgaatgaggagtttgcactccgtgtacaacagctggtggccaaggaattgggccagacagggacacggctcactccagctgacaaagcagagcacatgaagcgacaaagacaccccagattgcgcccccagtcagcccagtcttctttccctccctcccctggtccttctcctgatgtgcaactggcaactctggctcagagagtcaaggaagttttgccccatgtgccattgggtgtcatccagagagacctggccaagactggctgtgtagacttgactatcactaatctgcttgagggggccgtagctttcatgcctgaagacatcaccaagggaactcagtccctacccacagcctctgcctccaagtttcccagctctggcccggtgacccctcagccaacagccctaacatttgccaagtcttcctgggcccggcaggagagcctgcaggagcgcaagcaagcactatatgaatacgcaagaaggagattcacagagagacgagcccaggaggctgactgagctcaaaggaacaggatggcacccagagccgcaggacggagactgggggcagccctcacccaactcacaacaggctggatgggtgggtggtaaaaagggaaggatgaggctcccccaatgtcacattaaattcatggttttcattcaaggca

SEQ ID NO: 1919 - DNA, 1346 bp, Homo sapiens
  source 1..1346: mol_type = unassigned DNA
gaatgccgggaattgtggtctccgccggacgcgagttgtgagacggcccaaggggccgcggggtatgctgggaccgctagcccttccggcgcgcctcaggacttcgggtcccctcaccccgggcggatgcccaaagactccgccttcccaagagcccctgcggccgggcgcgaaaatggcggcggcggcgacggccgggcgctcctgaagcagcagttatggagcttccctcagggccggggccggagcggctctttgactcgcaccggcttccgggtgactgcttcctactgctcgtgctgctgctctacgcgccagtcgggttctgcctcctcgtcctgcgcctctttctcgggatccacgtcttcctggtcagctgcgcgctgccagacagcgtccttcgcaggttccgattcgtagtgcggaccatgtgtgcggtgctagggctcgtggcccggcaggaggactccggactccgggatcacagtgtcagggtcctcatttccaaccatgtgacacctttcgaccacaacatagtcaatttgcttaccacctgtagcacccctctactcaatagtccccccagctttgtgtgctggtctcggggcttcatggagatgaatgggcggggggagttggtggagtcactcaagagattctgtgcttccacgaggcttccccccactcctctgctgctattccctgaggaagaggccaccaatggccgggaggggctcctgcgcttcagttcctggccattttctatccaagatgtggtacaacctcttaccctgcaagttcagagacccctggtctctgtgacggtgtcagatgcctcctgggtctcagaactgctgtggtcacttttcgtccctttcacggtgtatcaagtaaggtggcttcgtcctgttcatcgccaactaggggaagcgaatgaggagtttgcactccgtgtacaacagctggtggccaaggaattgggccagacagggacacggctcactccagctgacaaagcagagcacatgaagcgacaaagacaccccagattgcgcccccagtcagcccagtcttctttccctccctcccctggtccttctcctgatgtgcaactggcaactctggctcagagagtcaaggaagttttgccccatgtgccattgggtgtcatccagagagacctggccaagactggctgtgtagacttgactatcactaatctgcttgagggggccgtagctttcatgcctgaagacatcaccaagggaactcagtccctacccacagcctctgcctccaaggcattcgatgcgtgtttaatgatgatgactccgcaagccctctga

SEQ ID NO: 1920 - DNA, 4509 bp, Homo sapiens
  source 1..4509: mol_type = unassigned DNA
ggtcccgcctgccgctggcgccgttgtttccggctcaactggggagctgctggagctcttctggcctctggttttccgactgcttatccgacgctcctccctctgtctctgtagctggagaaggtagtttccaggaaagttttccggtttgcaggccgcgcacatcgggcaggggccatcctcggtccccttgctcgttgctcgcagccccgttcggctacaagtgagtttcagggcgtcatggccaggggccaccgcggccagccgggtgtgaggctgcctttcgctgcccgcgcgctccagtggtctctgggtccgccggcgtccgtttcggcctgaacgcagcccctccgcggcgacgagcagtctcgcgccggagctcatggcctcggaggcgccgtccccgccgcggtcgccgccgccgcccacctcccccgagcctgagctggcccagctaaggcggaaggtggagaagttggaacgtgaactgcggagctgcaagcggcaggtgcgggagatcgagaagctgctgcatcacacagaacggctgtaccagaacgcagaaagcaacaaccaggagctccgcacgcaggtggaagaactcagtaaaatactccaacgtgggagaaatgaagataataaaaagtctgatgtagaagtacaaacagagaaccatgctccttggtcaatctcagattatttttatcagacgtactacaatgacgttagtcttccaaataaagtgactgaactgtcagatcaacaagatcaagctatcgaaacttctattttgaattctaaagaccatttacaagtagaaaatgatgcttaccctggtaccgatagaacagaaaatgttaaatatagacaagtggaccattttgcctcaaattcacaggagccagcatctgcattagcaacagaagatacctccttagaaggctcatcattagctgaaagtttgagagctgcagcagaagcggctgtatcacagactggatttagttatgatgaaaatactggactgtattttgaccacagcactggtttctattatgattctgaaaatcaactctattatgatccttccactggaatttattactattgtgatgtggaaagtggtcgttatcagtttcattctcgagtagatttgcaaccttatccgacttctagcacaaaacaaagtaaagataaaaaattgaagaagaaaagaaaagatccagattcttctgcaacaaatgaggaaaaggatttgaactcagaggatcaaaaagccttcagtgttgaacatacaagctgcaatgaggaagaaaatttcgcaaatatgaaaaagaaggccaaaataggcattcatcacaaaaatagtccccccaaagtcactgttccaactagtggaaatactatagagtctcctcttcatgaaaacatctctaattcaacatcatttaaagatgagaaaatcatggagactgatagtgaaccagaggaaggtgaaattacagactctcagactgaggatagttatgacgaagccattaccagtgaaggcaatgtaactgcagaagatagtgaggatgaagatgaagacaaaatttggcccccatgtattagagtaattgtcattagatcacctgtgttgcagataggatcactctttatcattactgctgtaaaccctgctacaattggaagagaaaaggatatggaacatactctccgaatccctgaagttggtgtcagtaagtttcatgcagaaatttattttgaccatgacttacaaagttatgtccttgtggatcaaggcagtcaaaatggcacaattgttaatggaaaacagattcttcagccgaaaactaaatgtgacccttacgtacttgagcatggagatgaagtcaaaattggagaaactgtcttatcctttcacattcatcctggcagtgatacctgtgatggctgtgaaccagggcaggttagagcccaccttcgccttgataagaaagatgaatcttttgttggtccaacactaagtaaggaggaaaaagagttggaaagaagaaaagaattaaagaaaatacgagtaaaatatggtttacagaatacagaatacgaagatgaaaagacattgaagaatccaaaatataaagatagagctggaaaacgtagggagcaggttggaagtgaaggaactttccaaagagatgatgctcctgcatctgttcattctgaaattactgatagcaacaaaggtcggaagatgttggagaagatgggttggaagaaaggagagggcctggggaaggatggtggaggaatgaaaacgccgatccagcttcagcttcggcgaacacatgcaggcttggggacaggcaaaccatcctcatttgaagatgttcaccttctccaaaacaagaacaaaaaaaactgggacaaagcacgagagcggtttactgaaaacttcccagaaactaagcctcaaaaagatgacccagggaccatgccttgggtaaaagggactttagagtgaaggctaatcatagaaaaaaaacctctagtttttttaaaaatagaatttggaaacttattttttctccccaaaagaatcagcagcacaggggaactatgtcacagtttacctcttcctgattcagaaatgtgtatggtttgcagcttttaaaaaccatttttttaaaactaataaatagtgactgaaccaatttatgcagtaaatagactaaagttcacagggcacggatgagtttatcaaacttcgttattttatcttgtcatttacaacatccatataagcaactagccatataagcaaaattcatagaactactaatgacttaagtgtacatctgttcttgtctccatatattcatgtaagatgcacaacaaaagaaacatcagaagtttataaaaataaatctgactatatgcatcctcatttattccctttagaacctaggtaaaaaatgttgcgaaaacatgggtagtggcgcatacattttgttatccttgaaatagcctaagtaatgttattgaagaactaatgaacaggtaacatattgtagaaaattagtctttcattgttttcttctgtgaagaatctgttgctatgtactgtatattcagcatttatatttggtttgtttcatagctaatgaggtatttagatatgaacaactgaatacatattgaaatagtgtgctggcttttgtagttttgataaagaccattgcaggcaatggaattgtgccagagaaatctgatttctagtacaaaaggaatacttagccagggcctcaagctcaagatacttattgaaaacatcctcaattgcaataaaaacattataacatgaaaaagagtgattttttgaaccggtgatttaaatgtattgatctgctttgaattttcaagcagccagaattttctagtttaaattggcagagttataacaaaggagagcctcaaatattagacaattgcagtgcggctttctgggcacaggtgtcactgctctgccacctatcactattctttttctgttcagtttttctctcaggtgtttgctgggaaattaacactggaactgacccttttctggcagtgaatgtaagctctagctcccccatctactataaagaaatgtcttcgagatgtagaaataaggaatattctgaaaataaaaattatacagtagtaaagataattcagaaagaaaaagctacctgttagaatttccagtctaaatggcacagggtagttacggagaaaaggggatggagaaggagaaactatgactaaagatgagaggtatgaacgagttgtcaggttcctatgggcttaagctaggacaatcaggccctaaactccaaatttggataaaatatctctttgcattcttcttggccacctgcatagtctgacacatacgtatgtacagttagacttgcaggctgcaggagtgccctgcattgttttcttttaattagaaataaaaagtattagtctaaatgtggttctggtgctggtgccctgtatatatgtaacaatataggacccctccaaataggttttgcttctggtgaatcttggtcattgggttagtatatgactgtctataatattttccatttgtattattatattggggaaaacattttttatcattttctattaagaaaatggaaaacttaaatatggtgttaaaaatggaaatatatgtgatatttgcattattaaacccctttgcagatctaaagtctcagggttccactattagtggttaaagtactgaataatgtctgggtctatttccatctgtaaaataagaatatttgtctcacgtgtctgtcatgaatagcaaatgagaaaatgtatataaaagcactttgtaaattgtaaaagtagtacagatgtgagcttctatttgtttagaagcataaatgtgaattatatacagtttgaattttgcataaattttttgtgtctaattttaaa

SEQ ID NO: 1921 - DNA, 1142 bp, Homo sapiens
  source 1..1142: mol_type = unassigned DNA
ttttccgactgcttatccgacgctcctccctctgtctctgtagctggagaaggtagtttccaggaaagttttccggtttgcaggccgcgcacatcgggcaggggccatcctcggtccccttgctcgttgctcgcagccccgttcggctacaagtgagtttcagggcgtcatggccaggggccaccgcggccagccgggtgtgaggctgcctttcgctgcccgcgcgctccagtggtctctgggtccgccggcgtccgtttcggcctgaacgcagcccctccgcggcgacgagcagtctcgcgccggagctcatggcctcggaggcgccgtccccgccgcggtcgccgccgccgcccacctcccccgagcctgagctggcccagctaaggcggaaggtggagaagttggaacgtgaactgcggagctgcaagcggcaggtgcgggagatcgagaagctgctgcatcacacagaacggctgtaccagaacgcagaaagcaacaaccaggagctccgcacgcaggtggaagaactcagtaaaatactccaacgtgggagaaatgaagataataaaaagtctgatgtagaagtacaaacagagaaccatgctccttggtcaatctcagattatttttatcagacgtactacaatgacgttagtcttccaaataaagtgactgaactgtcagatcaacaagatcaagctatcgaaacttctattttgaattctaaagaccatttacaagtagaaaatgatgcttaccctggtaccgatagaacagaaaatgttaaatatagacaagtggaccattttgcctcaaattcacaggtaataaaatgctaaacatgaaactgttgatgcccaagaacctgtccttctttgttgttattatgtggaaagatagacttctttggtccgtcacagcatatataagggttataaacattcttatgtgtaattatgcaaagaatgttgtagtttttccaaaaccagaattagaacttcttcatatatgtagtggttttcctactacattgtgttccaaaattttgtgatctacataaactaaaacaaaatttgtccagatattttgactgaacaaaagaactgtggacaacaataccacatttacacctaaaaaaa

SEQ ID NO: 1922 - DNA, 6888 bp, Homo sapiens
  source 1..6888: mol_type = unassigned DNA
ccaggagctgccttggcagtcacgccccttccttccgaggagctttctggctgcctaaactggtagaccccctgaattactcctccatctccgctctctttcgcctcctcttctcttagttctctccgcctccccctcaactaccaccacctccagtcagtctcgcctccggctatccgctgctccaccctctggcccggtatcctgcctgtccgctgccaccaaggagagcccggacggagcagcgaggaggggagcagccgggagttggggcttcccccctgcccatccctggccgctggcccgggaccgaagccacttgagcgagcagagagtcgtcaccttgtcttctttgccttcagggagctgctaagaaggacaaataagatagcagagtgaaagagcttttgtctccttagaaggaaggctgagaaactaaaggccagcgcaggacatctcattgccattgtcagccaggaactcgcagcctcacagccctacttcttctctgacctctggggggtccttgcccttgctacaatctccaccatccactagattgtctcctgcccgacaccccttggtcccaaaccagggagaccattcagctcacctgcctaggccgcagcagcatttccttcctaatcaggctcaccagggggatcattaccgtctctcccaacctggcctgagtcagcagcagcagcaacagcagcagcagcaccatcatcaccatcaccaccaacaacagcagcagcagcagccacagcagcagccaggagaagcctattcagctatgcctcgggctcagccatcctctgcttcttatcagccagtgccagcagacccttttgccattgtttccagagcccagcagatggttgagatcctctcagacgagaaccggaacttgaggcaagagttggaaggatgctatgagaaggtggcaagactgcagaaggtggagacagaaatccagcgcgtctcggaggcatatgagaacctcgtgaagtcatcctccaaaagagaggccctagagaaagccatgagaaacaagctagagggcgagattcggaggatgcatgatttcaacagggatctgagagagcgtctagagactgccaacaagcagcttgcagagaaggaatatgaggggtcagaggacaccagaaaaaccatctcgcagctctttgcaaaaaataaagaaagccagcgtgagaaggagaagctggaagcggagctggccactgcccgttctaccaatgaggaccaaagacgacacatcgaaatccgagatcaggccctgagtaatgcccaggccaaggtggtaaagctggaagaagagctgaaaaagaagcaagtgtacgttgacaaggtggagaagatgcagcaggcccttgtacagctccaggcagcatgtgaaaaacgtgagcagctagagcaccgtctccggacacgactggagagggaactggaatccctgagaatccagcagcgtcagggcaactgtcagcccaccaacgtttcagaatacaatgctgctgcactgatggagctccttcgggagaaagaggagaggattctggctctggaagctgatatgacaaagtgggagcagaaatatttggaggagaatgtgatgagacattttgctctggatgctgctgcaactgtggctgctcagagggacacaacagtcatcagtcactctcctaacaccagctatgacacagctctagaagctcgcatccagaaagaggaggaagaaatcttgatggccaataagcgttgccttgacatggagggcaggattaagaccctccatgcccagattattgagaaggatgccatgatcaaagtactccagcagcgttcccggaaggagccgagcaagacagagcagctgtcgtgcatgcggccagcgaagtctctgatgtccatttccaatgctggatcaggcttgctctcccactcatccaccctgactggctcccccatcatggaagaaaagcgagacgacaagagctggaaggggagcctaggcattctcctgggtggagactaccgtgctgaatatgtcccttccacaccctcgcctgtgccaccctcgactcccctgctctcggctcactccaagacaggcagccgagactgcagtacccaaactgaacgtgggacggaatcgaacaaaactgcagctgttgctcccatctctgttcctgctccagttgctgctgccgccactgctgccgccatcactgccactgctgccaccatcaccaccaccatggtagctgctgctccagttgctgttgctgctgctgctgctccagctgctgctgctgccccgtctccagccactgccgctgctactgctgctgctgtttctccagctgctgctggtcagattccagctgctgcctctgttgcctcagctgctgccgttgctccttctgctgctgctgctgctgctgttcaggttgctccagctgctccggctccagttccagctccggctctggttccggttccagctccagcagcggctcaggcttctgctcctgctcagactcaggcaccaacttcagctccggctgtggctccaactccagctccaactccaactccagctgtggctcaggctgaggttcctgcaagtccagctaccggtcctggaccacatcgtttgtctataccaagtttgacctgcaatccagacaaaacagatgggcctgtgttccactccaatactctggaaagaaaaactcccattcagatcctgggacaagagcctgatgcagagatggtggaatatctcatctaaacggccaaatcaagagctgcagattatcagcaaaaatgcttttaatcattttcccccttttattggttcttgttttgagggtgaggacaagggttgtggggaggggatgttttttaacaggactttttattggaacaatgtactacttgagtaataccatgtgaacaccagtctattttggtatgcttagggagtacctctaaagacagattaatcagaatgtgctctaaagcttattgtttgaatttatacgaatactgggactgttaacaggtggctatacatcgacgttttcaatgtgcttaaatttgtttaaattttccatattctagatcattttttattgaagagcacagtatgtgtggaagacagtgtataacacgtagtttggaagtgggaagctagagagaattgagtgtgtgctgttttgtatagttactatcctgtgcagcagctggagaaagcactcacctcaggcttacaaaagggaatagtttcaggagctatgtaagctggaaaaaaggtagggagttttggggtgcagaagggtactggagctaattttttcttccagtttcccagctaccctgccccagggaattgtgtttgtcttcatttcagtggtgctttggaaatggattcttttggttccctcctggaggttcatacattcatatatatgctctggagtaatttatgcatttggataattaatatattgctttcagatgctgggagagtacattaactgagtgatgcgcaacttcctctctcttagggaattagaccatcagaggccttgatggagagttgcatggggtgctatatgcagacttccatggtttgtgtgtagccatgaacacagcttgcttgcatttagtaagaccaatcagcttagtgtttatttcttctacagcacagattcactggctgggtctccagtctcaaattgccaatcatttgcaaagtgaggaaggatctttgttgacaggttgaatgctttgaatttctggtgactactttgaaataacttgttttgtttgtcaaattctaagcatatgtcttaaaaggcatttttgactatcacctccaagggaatagcttgagaaacccaaagtactatgctgcagtcgggggagaggtggattgcagcagtatcctcaactacctcttctcactgtcagtgacaccatcttggaatacctttgggaagcagcaggaaatgtgcatgtgggtagagatcaaaggaggcaatggctccaagccttgccatagggctgcctccaaggacacagaaggatgccagttgccacaggtccctgccctgtgtcacctgtctgcccttcattaaggtgagaaatctgcagatagcatcattaagatcagttttaaggggtatagggagggtgagggaagtggggggtgttaggtaagggttgggggtagaggttttgggatgtcttagttagaaaccagattaatagaagagtaggcctgatatattacatcatgagccatagtggtgggaaagaactttagcaatatagccctacctcctcattttagtgatgaggaatctgagaactggagaggttcagtgactttttgaaagtcatacaacacagctaaccattatgccaatcaccatgcttattttgggaaactctttatcttttttaaattccattttatgaaaaggcatcttcatggtccagggaatatgtatcttgtaaaatgtacctggttggagtagcttgtccagtcttgacaaactactgaatttctgtcttgcctctccttcagtgccttttaaaaggttttcccttttctgatctgcatttcaacatagagtcacataaatgtccccctgagaaaccaatcccacttctttctaggagattgggtatcttagataatcttttggggttcctctgtgagtataggaatggtatccttcctaattatcttccaaaggaattattttgtgtgtgtgcctgtgtgtgtgtagagacataaaggagggtgatgtgattttcagctagtcctttcacattttcaataatgaggtaatcatgttacatacacattagtcctcagttataaagtgaatctcagatagaaattaaaagtgcagttgtgttaagactctttcatactaccctttagtcataaggagaaaaaaacactcaaatagtagaagcagcaagtagcaaacttcaggagagctactttctatccaaataatttaaaaaacacttttcacctactcctttcatggttataacacattggcagactttttgctggctctgggagccatgattttaatcacattctgcaaggtgacaaatgtcatacattccacattgtgtggtagccatctctttagactcatgtgttttggggaaaggaagaagttcttggctgagtactattttgaactttccagaaccctctcacaccagagacagttcttctctgttcagtttccaatccccgataatttgctaaaataacattgtacatccaagagagggaagaagagtatgtcagtatattatgcagaagatagatacagccttttcagaagatctccactagtttttgttccaaaaattcaagtttatgggagaaatctcaattagccaccttttcacagttgtgtggatataacatttgggggatctttctggactcctacctatctgtgcattttaccggcacctcaggaaaggagggtgaccaggttgtcttagcttgtactgcttggtgatctctgaggaccttctaattcagttgtaccccagtgttccatgtatagaaaaacttcattagaacaaactttacttgatatgaaactcctattaacagtctttttttgaaataaaaagtagcttgagctttcttttaaaatcatgtatcttgattgttgatttaatgaaggatttccttttaatgctgcttttgagcttcaaggtaataggacagcaggaacctaaaatatctgccatcatctgccataggaaagatacccagagacccatcatgttctctttttgttgttacactgttgggtgggtataacaattggaaaatgaacaaactgattgattgtgcaaactactttttatgacaagcctaaaccctcataatgcggcagcttaaagtgtatacatatgcactaactttgatcaattatattctcatatctgttagctacacagtctcctattatctcaattgcttatgtgcatatggaatatgttacttaaaacgtgtgcattcttactgaaaatgttttcaaaggaaggtatcagctgtgggctaattgccaccaatttcagcctgccacgattcttggaaatatgtcttccaagtgccatccatcatcagtaggacaagtgtcgggagtttgtttatttttttccagtagcaacgatgggttacatggagccatgaaacctccttctggcctcccttgtgattaatggcatgtgtttgtaaaatggatagctggggttggcagatggctagagaagaatcgcctttggtttaaaatgtatgtggtcccctaatgattgtgaccccattctgtaatcaactgagctagttccaataaagttaagcaggtttaaatccactttgtgcctatcttttcactgacaataaagttagctattttaaaatgcagtaccgtgtggaaaatgctttggtgtttacccgacagaggctttatttgtgctgtatcagtgattactttcaattcagtatgcagtgaaattgcctttcaagggcagcgtgcagcagaatttgcatttgcttgaagtatggaatgtgattatagattataaagtattaagacaacaccacaggccgcatgctctaatcggtctctttatatactcaggcagcatatattaaaagctttgcatctttttatcttctggtttctagggataaaatgatggccacccaaagcagagaatttatcctttggttagcattttggaaggccccttgatattccttttgtacccttgttctgatgccaattcatcagtttt

SEQ ID NO: 1923 - DNA, 2462 bp, Homo sapiens
  source 1..2462: mol_type = unassigned DNA
gtcactggccaccagtggagttaaggcccatccacctgttaccagtgctcccctctccccaccacaacccaatgacctctacaagaatcccacaagttccagtgaattctacaaggcccaagggccacttcctaaccagcatagcctgaagggcatggaacaccgaggccccccaccagaatatcccttcaagggcatgccaccccaatctgtagtgtgcaagccccaagagccagggcacttctatagtgagcatcgcctgaaccagccagggagaacagaggggcaactgatgaggtatcagcatccccctgagtatggagcagccaggccagcgcaggacatctcattgccattgtcagccaggaactcgcagcctcacagccctacttcttctctgacctctggggggtccttgcccttgctacaatctccaccatccactagattgtctcctgcccgacaccccttggtcccaaaccagggagaccattcagctcacctgcctaggccgcagcagcatttccttcctaatcaggctcaccagggggatcattaccgtctctcccaacctggcctgagtcagcagcagcagcaacagcagcagcagcaccatcatcaccatcaccaccaacaacagcagcagcagcagccacagcagcagccaggagaagcctattcagctatgcctcgggctcagccatcctctgcttcttatcagccagtgccagcagacccttttgccattgtttccagagcccagcagatggttgagatcctctcagacgagaaccggaacttgaggcaagagttggaaggatgctatgagaaggtggcaagactgcagaaggtggagacagaaatccagcgcgtctcggaggcatatgagaacctcgtgaagtcatcctccaaaagagaggccctagagaaagccatgagaaacaagctagagggcgagattcggaggatgcatgatttcaacagggatctgagagagcgtctagagactgccaacaagcagcttgcagagaaggaatatgaggggtcagaggacaccagaaaaaccatctcgcagctctttgcaaaaaataaagaaagccagcgtgagaaggagaagctggaagcggagctggccactgcccgttctaccaatgaggaccaaagacgacacatcgaaatccgagatcaggccctgagtaatgcccaggccaaggtggtaaagctggaagaagagctgaaaaagaagcaagtgtacgttgacaaggtggagaagatgcagcaggcccttgtacagctccaggcagcatgtgaaaaacgtgagcagctagagcaccgtctccggacacgactggagagggaactggaatccctgagaatccagcagcgtcagggcaactgtcagcccaccaacgtttcagaatacaatgctgctgcactgatggagctccttcgggagaaagaggagaggattctggctctggaagctgatatgacaaagtgggagcagaaatatttggaggagaatgtgatgagacattttgctctggatgctgctgcaactgtggctgctcagagggacacaacagtcatcagtcactctcctaacaccagctatgacacagctctagaagctcgcatccagaaagaggaggaagaaatcttgatggccaataagcgttgccttgacatggagggcaggattaagaccctccatgcccagattattgagaaggatgccatgatcaaagtactccagcagcgttcccggaaggagccgagcaagacagagcagctgtcgtgcatgcggccagcgaagtctctgatgtccatttccaatgctggatcaggcttgctctcccactcatccaccctgactggctcccccatcatggaagaaaagcgagacgacaagagctggaaggggagcctaggtaatgacagtaaataaggaagattatagtcacgtgttcaaagagagccctgagataagcacccatgcttaaggaaaagggatgatggtccaggttctagagaggaaggtgtaccagggttttggagtttttttttcctcctgagaccctagttccacattctggagctcctccacactttgaagtctcccggtgagaataccgattgaggccaaggcttagaggacaagaatcttgagtttcatttgggtgtcaaggaagataactctaatttcctctaaactattctcagatttggcctttgccatgtggcacctttatctttctccaaagcccatgtggcctttgtgtcgttccaaatgtcaaaattccggcatttctgtgttccttcctcctctataataggagaacccagagttttagttacactaaatcgtttgggtagcaggttttgttcccacagtgttgtgagatgagaacagaatgtactttttcattccgttcctgtccattccctcccctctaatcaaa

SEQ ID NO: 1924 - DNA, 6945 bp, Homo sapiens
  source 1..6945: mol_type = unassigned DNA
atgagaaattctgaagaacagccaagtggagggaccacggtattgcagcgtttgctacaagagcagcttcgctatggcaatcctagtgagaatcgcagcctgcttgccatacaccagcaagccacagggaatggccctcctttccccagtggcagtgggaacccgggccctcagagtgatgtgttgagtccccaagaccaccaccaacagcttgtggctcatgctgctcgacaagaaccccaggggcaggaaatccagtcagaaaacctcatcatggagaagcagctgtctcctcgaatgcaaaataatgaagaactcccgacctatgaagaagccaaggtccagtcccagtactttcggggccaacagcatgccagtgttggagctgccttctatgtcactggagtcaccaaccagaagatgaggactgagggacgcccatcagttcagcggctcaatcctggaaagatgcaccaagatgagggactcagagaccttaagcaagggcatgtccgttccttgagtgaacgactaatgcagatgtcactggccaccagtggagttaaggcccatccacctgttaccagtgctcccctctccccaccacaacccaatgacctctacaagaatcccacaagttccagtgaattctacaaggcccaagggccacttcctaaccagcatagcctgaagggcatggaacaccgaggccccccaccagaatatcccttcaagggcatgccaccccaatctgtagtgtgcaagccccaagagccagggcacttctatagtgagcatcgcctgaaccagccagggagaacagaggggcaactgatgaggtatcagcatccccctgagtatggagcagccaggccagcgcaggacatctcattgccattgtcagccaggaactcgcagcctcacagccctacttcttctctgacctctggggggtccttgcccttgctacaatctccaccatccactagattgtctcctgcccgacaccccttggtcccaaaccagggagaccattcagctcacctgcctaggccgcagcagcatttccttcctaatcaggctcaccagggggatcattaccgtctctcccaacctggcctgagtcagcagcagcagcaacagcagcagcagcaccatcatcaccatcaccaccaacaacagcagcagcagcagccacagcagcagccaggagaagcctattcagctatgcctcgggctcagccatcctctgcttcttatcagccagtgccagcagacccttttgccattgtttccagagcccagcagatggttgagatcctctcagacgagaaccggaacttgaggcaagagttggaaggatgctatgagaaggtggcaagactgcagaaggtggagacagaaatccagcgcgtctcggaggcatatgagaacctcgtgaagtcatcctccaaaagagaggccctagagaaagccatgagaaacaagctagagggcgagattcggaggatgcatgatttcaacagggatctgagagagcgtctagagactgccaacaagcagcttgcagagaaggaatatgaggggtcagaggacaccagaaaaaccatctcgcagctctttgcaaaaaataaagaaagccagcgtgagaaggagaagctggaagcggagctggccactgcccgttctaccaatgaggaccaaagacgacacatcgaaatccgagatcaggccctgagtaatgcccaggccaaggtggtaaagctggaagaagagctgaaaaagaagcaagtgtacgttgacaaggtggagaagatgcagcaggcccttgtacagctccaggcagcatgtgaaaaacgtgagcagctagagcaccgtctccggacacgactggagagggaactggaatccctgagaatccagcagcgtcagggcaactgtcagcccaccaacgtttcagaatacaatgctgctgcactgatggagctccttcgggagaaagaggagaggattctggctctggaagctgatatgacaaagtgggagcagaaatatttggaggagaatgtgatgagacattttgctctggatgctgctgcaactgtggctgctcagagggacacaacagtcatcagtcactctcctaacaccagctatgacacagctctagaagctcgcatccagaaagaggaggaagaaatcttgatggccaataagcgttgccttgacatggagggcaggattaagaccctccatgcccagattattgagaaggatgccatgatcaaagtactccagcagcgttcccggaaggagccgagcaagacagagcagctgtcgtgcatgcggccagcgaagtctctgatgtccatttccaatgctggatcaggcttgctctcccactcatccaccctgactggctcccccatcatggaagaaaagcgagacgacaagagctggaaggggagcctaggcattctcctgggtggagactaccgtgctgaatatgtcccttccacaccctcgcctgtgccaccctcgactcccctgctctcggctcactccaagacaggcagccgagactgcagtacccaaactgaacgtgggacggaatcgaacaaaactgcagctgttgctcccatctctgttcctgctccagttgctgctgccgccactgctgccgccatcactgccactgctgccaccatcaccaccaccatggtagctgctgctccagttgctgttgctgctgctgctgctccagctgctgctgctgccccgtctccagccactgccgctgctactgctgctgctgtttctccagctgctgctggtcagattccagctgctgcctctgttgcctcagctgctgccgttgctccttctgctgctgctgctgctgctgttcaggttgctccagctgctccggctccagttccagctccggctctggttccggttccagctccagcagcggctcaggcttctgctcctgctcagactcaggcaccaacttcagctccggctgtggctccaactccagctccaactccaactccagctgtggctcaggctgaggttcctgcaagtccagctaccggtcctggaccacatcgtttgtctataccaagtttgacctgcaatccagacaaaacagatgggcctgtgttccactccaatactctggaaagaaaaactcccattcagatcctgggacaagagcctgatgcagagatggtggaatatctcatctaaacggccaaatcaagagctgcagattatcagcaaaaatgcttttaatcattttcccccttttattggttcttgttttgagggtgaggacaagggttgtggggaggggatgttttttaacaggactttttattggaacaatgtactacttgagtaataccatgtgaacaccagtctattttggtatgcttagggagtacctctaaagacagattaatcagaatgtgctctaaagcttattgtttgaatttatacgaatactgggactgttaacaggtggctatacatcgacgttttcaatgtgcttaaatttgtttaaattttccatattctagatcattttttattgaagagcacagtatgtgtggaagacagtgtataacacgtagtttggaagtgggaagctagagagaattgagtgtgtgctgttttgtatagttactatcctgtgcagcagctggagaaagcactcacctcaggcttacaaaagggaatagtttcaggagctatgtaagctggaaaaaaggtagggagttttggggtgcagaagggtactggagctaattttttcttccagtttcccagctaccctgccccagggaattgtgtttgtcttcatttcagtggtgctttggaaatggattcttttggttccctcctggaggttcatacattcatatatatgctctggagtaatttatgcatttggataattaatatattgctttcagatgctgggagagtacattaactgagtgatgcgcaacttcctctctcttagggaattagaccatcagaggccttgatggagagttgcatggggtgctatatgcagacttccatggtttgtgtgtagccatgaacacagcttgcttgcatttagtaagaccaatcagcttagtgtttatttcttctacagcacagattcactggctgggtctccagtctcaaattgccaatcatttgcaaagtgaggaaggatctttgttgacaggttgaatgctttgaatttctggtgactactttgaaataacttgttttgtttgtcaaattctaagcatatgtcttaaaaggcatttttgactatcacctccaagggaatagcttgagaaacccaaagtactatgctgcagtcgggggagaggtggattgcagcagtatcctcaactacctcttctcactgtcagtgacaccatcttggaatacctttgggaagcagcaggaaatgtgcatgtgggtagagatcaaaggaggcaatggctccaagccttgccatagggctgcctccaaggacacagaaggatgccagttgccacaggtccctgccctgtgtcacctgtctgcccttcattaaggtgagaaatctgcagatagcatcattaagatcagttttaaggggtatagggagggtgagggaagtggggggtgttaggtaagggttgggggtagaggttttgggatgtcttagttagaaaccagattaatagaagagtaggcctgatatattacatcatgagccatagtggtgggaaagaactttagcaatatagccctacctcctcattttagtgatgaggaatctgagaactggagaggttcagtgactttttgaaagtcatacaacacagctaaccattatgccaatcaccatgcttattttgggaaactctttatcttttttaaattccattttatgaaaaggcatcttcatggtccagggaatatgtatcttgtaaaatgtacctggttggagtagcttgtccagtcttgacaaactactgaatttctgtcttgcctctccttcagtgccttttaaaaggttttcccttttctgatctgcatttcaacatagagtcacataaatgtccccctgagaaaccaatcccacttctttctaggagattgggtatcttagataatcttttggggttcctctgtgagtataggaatggtatccttcctaattatcttccaaaggaattattttgtgtgtgtgcctgtgtgtgtgtagagacataaaggagggtgatgtgattttcagctagtcctttcacattttcaataatgaggtaatcatgttacatacacattagtcctcagttataaagtgaatctcagatagaaattaaaagtgcagttgtgttaagactctttcatactaccctttagtcataaggagaaaaaaacactcaaatagtagaagcagcaagtagcaaacttcaggagagctactttctatccaaataatttaaaaaacacttttcacctactcctttcatggttataacacattggcagactttttgctggctctgggagccatgattttaatcacattctgcaaggtgacaaatgtcatacattccacattgtgtggtagccatctctttagactcatgtgttttggggaaaggaagaagttcttggctgagtactattttgaactttccagaaccctctcacaccagagacagttcttctctgttcagtttccaatccccgataatttgctaaaataacattgtacatccaagagagggaagaagagtatgtcagtatattatgcagaagatagatacagccttttcagaagatctccactagtttttgttccaaaaattcaagtttatgggagaaatctcaattagccaccttttcacagttgtgtggatataacatttgggggatctttctggactcctacctatctgtgcattttaccggcacctcaggaaaggagggtgaccaggttgtcttagcttgtactgcttggtgatctctgaggaccttctaattcagttgtaccccagtgttccatgtatagaaaaacttcattagaacaaactttacttgatatgaaactcctattaacagtctttttttgaaataaaaagtagcttgagctttcttttaaaatcatgtatcttgattgttgatttaatgaaggatttccttttaatgctgcttttgagcttcaaggtaataggacagcaggaacctaaaatatctgccatcatctgccataggaaagatacccagagacccatcatgttctctttttgttgttacactgttgggtgggtataacaattggaaaatgaacaaactgattgattgtgcaaactactttttatgacaagcctaaaccctcataatgcggcagcttaaagtgtatacatatgcactaactttgatcaattatattctcatatctgttagctacacagtctcctattatctcaattgcttatgtgcatatggaatatgttacttaaaacgtgtgcattcttactgaaaatgttttcaaaggaaggtatcagctgtgggctaattgccaccaatttcagcctgccacgattcttggaaatatgtcttccaagtgccatccatcatcagtaggacaagtgtcgggagtttgtttatttttttccagtagcaacgatgggttacatggagccatgaaacctccttctggcctcccttgtgattaatggcatgtgtttgtaaaatggatagctggggttggcagatggctagagaagaatcgcctttggtttaaaatgtatgtggtcccctaatgattgtgaccccattctgtaatcaactgagctagttccaataaagttaagcaggtttaaatccactttgtgcctatcttttcactgacaataaagttagctattttaaaatgca

SEQ ID NO: 1925 - DNA, 2720 bp, Homo sapiens
  source 1..2720: mol_type = unassigned DNA
tcccctctccccaccacaacccaatgacctctacaagaatcccacaagttccagtgaattctacaaggcccaagggccacttcctaaccagcatagcctgaagggcatggaacaccgaggccccccaccagaatatcccttcaagggcatgccaccccaatctgtagtgtgcaagccccaagagccagggcacttctatagtgagcatcgcctgaaccagccagggagaacagaggggcaactgatgaggtatcagcatccccctgagtatggagcagccaggccagcgcaggacatctcattgccattgtcagccaggaactcgcagcctcacagccctacttcttctctgacctctggggggtccttgcccttgctacaatctccaccatccactagattgtctcctgcccgacaccccttggtcccaaaccagggagaccattcagctcacctgcctaggccgcagcagcatttccttcctaatcaggctcaccagggggatcattaccgtctctcccaacctggcctgagtcagcagcagcagcaacagcagcagcagcaccatcatcaccatcaccaccaacaacagcagcagcagcagccacagcagcagccaggagaagcctattcagctatgcctcgggctcagccatcctctgcttcttatcagccagtgccagcagacccttttgccattgtttccagagcccagcagatggttgagatcctctcagacgagaaccggaacttgaggcaagagttggaaggatgctatgagaaggtggcaagactgcagaaggtggagacagaaatccagcgcgtctcggaggcatatgagaacctcgtgaagtcatcctccaaaagagaggccctagagaaagccatgagaaacaagctagagggcgagattcggaggatgcatgatttcaacagggatctgagagagcgtctagagactgccaacaagcagcttgcagagaaggaatatgaggggtcagaggacaccagaaaaaccatctcgcagctctttgcaaaaaataaagaaagccagcgtgagaaggagaagctggaagcggagctggccactgcccgttctaccaatgaggaccaaagacgacacatcgaaatccgagatcaggccctgagtaatgcccaggccaaggtggtaaagctggaagaagagctgaaaaagaagcaagtgtacgttgacaaggtggagaagatgcagcaggcccttgtacagctccaggcagcatgtgaaaaacgtgagcagctagagcaccgtctccggacacgactggagagggaactggaatccctgagaatccagcagcgtcagggcaactgtcagcccaccaacgtttcagaatacaatgctgctgcactgatggagctccttcgggagaaagaggagaggattctggctctggaagctgatatgacaaagtgggagcagaaatatttggaggagaatgtgatgagacattttgctctggatgctgctgcaactgtggctgctcagagggacacaacagtcatcagtcactctcctaacaccagctatgacacagctctagaagctcgcatccagaaagaggaggaagaaatcttgatggccaataagcgttgccttgacatggagggcaggattaagaccctccatgcccagattattgagaaggatgccatgatcaaagtactccagcagcgttcccggaaggagccgagcaagacagagcagctgtcgtgcatgcggccagcgaagtctctgatgtccatttccaatgctggatcaggcttgctctcccactcatccaccctgactggctcccccatcatggaagaaaagcgagacgacaagagctggaaggggagcctaggcattctcctgggtggagactaccgtgctgaatatgtcccttccacaccctcgcctgtgccaccctcgactcccctgctctcggctcactccaagacaggcagccgagactgcagtacccaaactgaacgtgggacggaatcgaacaaaactgcagctgttgctcccatctctgttcctgctccagttgctgctgccgccactgctgccgccatcactgccactgctgccaccatcaccaccaccatggtagctgctgctccagttgctgttgctgctgctgctgctccagctgctgctgctgccccgtctccagccactgccgctgctactgctgctgctgtttctccagctgctgctggtcagattccagctgctgcctctgttgcctcagctgctgccgttgctccttctgctgctgctgctgctgctgttcaggttgctccagctgctccggctccagttccagctccggctctggttccggttccagctccagcagcggctcaggcttctgctcctgctcagactcaggcaccaacttcagctccggctgtggctccaactccagctccaactccaactccagctgtggctcaggctgaggttcctgcaagtccagctaccggtcctggaccacatcgtttgtctataccaagtttgacctgcaatccagacaaaacagatgggcctgtgttccactccaatactctggaaagaaaaactcccattcagatcctgggacaagagcctgatgcagagatggtggaatatctcatctaaacggccaaatcaagagctgcagattatcagcaaaaatgcttttaatcattttccc

SEQ ID NO: 1926 - DNA, 1816 bp, Homo sapiens
  source 1..1816: mol_type = unassigned DNA
cttggtcccaaaccagggagaccattcagctcacctgcctaggccgcagcagcatttccttcctaatcaggctcaccagggggatcattaccgtctctcccaacctggcctgagtcagcagcagcagcaacagcagcagcagcaccatcatcaccatcaccaccaacaacagcagcagcagcagccacagcagcagccaggagaagcctattcagctatgcctcgggctcagccatcctctgcttcttatcagccagtgccagcagacccttttgccattgtttccagagcccagcagatggttgagatcctctcagacgagaaccggaacttgaggcaagagttggaaggatgctatgagaaggtggcaagactgcagaaggtggagacagaaatccagcgcgtctcggaggcatatgagaacctcgtgaagtcatcctccaaaagagaggccctagagaaagccatgagaaacaagctagagggcgagattcggaggatgcatgatttcaacagggatctgagagagcgtctagagactgccaacaagcagcttgcagagaaggaatatgaggggtcagaggacaccagaaaaaccatctcgcagctctttgcaaaaaataaagaaagccagcgtgagaaggagaagctggaagcggagctggccactgcccgttctaccaatgaggaccaaagacgacacatcgaaatccgagatcaggccctgagtaatgcccaggccaaggtggtaaagctggaagaagagctgaaaaagaagcaagtgtacgttgacaaggtggagaagatgcagcaggcccttgtacagctccaggcagcatgtgaaaaacgtgagcagctagagcaccgtctccggacacgactggagagggaactggaatccctgagaatccagcagcgtcagggcaactgtcagcccaccaacgtttcagaatacaatgctgctgcactgatggagctccttcgggagaaagaggagaggattctggctctggaagctgatatgacaaagtgggagcagaaatatttggaggagaatgtgatgagacattttgctctggatgctgctgcaactgtggctgctcagagggacacaacagtcatcagtcactctcctaacaccagctatgacacagctctagaagctcgcatccagaaagaggaggaagaaatcttgatggccaataagcgttgccttgacatggagggcaggattaagaccctccatgcccagattattgagaaggatgccatgatcaaagtactccagcagcgttcccggaaggagccgagcaagacagagcagctgtcgtgcatgcggccagcgaagtctctgatgtccatttccaatgctggatcaggcttgctctcccactcatccaccctgactggctcccccatcatggaagaaaagcgagacgacaagagctggaaggggagcctaggcattctcctgggtggagactaccgtgctgaatatgtcccttccacaccctcgcctgtgccaccctcgactcccctgctctcggctcactccaagacaggcagccgagactgcagtacccaaactgaacgtgggacggaatcgaacaaaactgcagctgttgctcccatctctgttcctgctccagttgctgctgccgccactgctgccgccatcactgccactgctgccaccatcaccaccaccatggctgctgctgctgccccgtctccagccactgccgctgctactgctgctgctgtttctccagctgctgctggtcagattccagctgctgcctctgttgcctcagct

SEQ ID NO: 1927 - DNA, 3330 bp, Homo sapiens
  source 1..3330: mol_type = unassigned DNA
taagcaagaattccctatcctgatcaaggctttaagcctaaaagaaagcagaaataggcaccaccagcaatagagatgagaaattctgaagaacagccaagtggagggaccacggtattgcagcgtttgctacaagagcagcttcgctatggcaatcctagtgagaatcgcagcctgcttgccatacaccagcaagccacagggaatggccctcctttccccagtggcagtgggaacccgggccctcagagtgatgtgttgagtccccaagaccaccaccaacagcttgtggctcatgctgctcgacaagaaccccaggggcaggaaatccagtcagaaaacctcatcatggagaagcagctgtctcctcgaatgcaaaataatgaagaactcccgacctatgaagaagccaaggtccagtcccagtactttcggggccaacagcatgccagtgttggagctgccttctatgtcactggagtcaccaaccagaagatgaggactgagggacgcccatcagttcagcggctcaatcctggaaagatgcaccaagatgagggactcagagaccttaagcaagggcatgtccgttccttgagtgaacgactaatgcagatgtcactggccaccagtggagttaaggcccatccacctgttaccagtgctcccctctccccaccacaacccaatgacctctacaagaatcccacaagttccagtgaattctacaaggcccaagggccacttcctaaccagcatagcctgaagggcatggaacaccgaggccccccaccagaatatcccttcaagggcatgccaccccaatctgtagtgtgcaagccccaagagccagggcacttctatagtgagcatcgcctgaaccagccagggagaacagaggggcaactgatgaggtatcagcatccccctgagtatggagcagccaggccagcgcaggacatctcattgccattgtcagccaggaactcgcagcctcacagccctacttcttctctgacctctggggggtccttgcccttgctacaatctccaccatccactagattgtctcctgcccgacaccccttggtcccaaaccagggagaccattcagctcacctgcctaggccgcagcagcatttccttcctaatcaggctcaccagggggatcattaccgtctctcccaacctggcctgagtcagcagcagcagcaacagcagcagcagcaccatcatcaccatcaccaccaacaacagcagcagcagcagccacagcagcagccaggagaagcctattcagctatgcctcgggctcagccatcctctgcttcttatcagccagtgccagcagacccttttgccattgtttccagagcccagcagatggttgagatcctctcagacgagaaccggaacttgaggcaagagttggaaggatgctatgagaaggtggcaagactgcagaaggtggagacagaaatccagcgcgtctcggaggcatatgagaacctcgtgaagtcatcctccaaaagagaggccctagagaaagccatgagaaacaagctagagggcgagattcggaggatgcatgatttcaacagggatctgagagagcgtctagagactgccaacaagcagcttgcagagaaggaatatgaggggtcagaggacaccagaaaaaccatctcgcagctctttgcaaaaaataaagaaagccagcgtgagaaggagaagctggaagcggagctggccactgcccgttctaccaatgaggaccaaagacgacacatcgaaatccgagatcaggccctgagtaatgcccaggccaaggtggtaaagctggaagaagagctgaaaaagaagcaagtgtacgttgacaaggtggagaagatgcagcaggcccttgtacagctccaggcagcatgtgaaaaacgtgagcagctagagcaccgtctccggacacgactggagagggaactggaatccctgagaatccagcagcgtcagggcaactgtcagcccaccaacgtttcagaatacaatgctgctgcactgatggagctccttcgggagaaagaggagaggattctggctctggaagctgatatgacaaagtgggagcagaaatatttggaggagaatgtgatgagacattttgctctggatgctgctgcaactgtggctgctcagagggacacaacagtcatcagtcactctcctaacaccagctatgacacagctctagaagctcgcatccagaaagaggaggaagaaatcttgatggccaataagcgttgccttgacatggagggcaggattaagaccctccatgcccagattattgagaaggatgccatgatcaaagtactccagcagcgttcccggaaggagccgagcaagacagagcagctgtcgtgcatgcggccagcgaagtctctgatgtccatttccaatgctggatcaggcttgctctcccactcatccaccctgactggctcccccatcatggaagaaaagcgagacgacaagagctggaaggggagcctaggcattctcctgggtggagactaccgtgctgaatatgtcccttccacaccctcgcctgtgccaccctcgactcccctgctctcggctcactccaagacaggcagccgagactgcagtacccaaactgaacgtgggacggaatcgaacaaaactgcagctgttgctcccatctctgttcctgctccagttgctgctgccgccactgctgccgccatcactgccactgctgccaccatcaccaccaccatggtagctgctgctccagttgctgttgctgctgctgctgctccagctgctgctgctgccccgtctccagccactgccgctgctactgctgctgctgtttctccagctgctgctggtcagattccagctgctgcctctgttgcctcagctgctgccgttgctccttctgctgctgctgctgctgctgttcaggttgctccagctgctccggctccagttccagctccggctctggttccggttccagctccagcagcggctcaggcttctgctcctgctcagactcaggcaccaacttcagctccggctgtggctccaactccagctccaactccaactccagctgtggctcaggctgaggttcctgcaagtccagctaccggtcctggaccacatcgtttgtctataccaagtttgacctgcaatccagacaaaacagatgggcctgtgttccactccaatactctggaaagaaaaactcccattcagatcctgggacaagagcctgatgcagagatggtggaatatctcatctaa

SEQ ID NO: 1928 - DNA, 1922 bp, Homo sapiens
  source 1..1922: mol_type = unassigned DNA
tgcagctgcaggcaagcctggccactgttggctgcagcaggacatcccaggcacagcccctagggctctgagcagacatccctcgccattgacacatcttcagatgctctcccagctagccatgctgcagggcagcctcctccttgtggttgccaccatgtctgtggctcaacagacaaggcaggaggcggataggggctgcgagacacttgtagtccagcacggccactgtagctacaccttcttgctgcccaagtctgagccctgccctccggggcctgaggtctccagggactccaacaccctccagagagaatcactggccaacccactgcacctggggaagttgcccacccagcaggtgaaacagctggagcaggcactgcagaacaacacgcagtggctgaagaagctagagagggccatcaagacgatcttgaggtcgaagctggagcaggtccagcagcaaatggcccagaatcagacggcccccatgctagagctgggcaccagcctcctgaaccagaccactgcccagatccgcaagctgaccgacatggaggctcagctcctgaaccagacatcaagaatggatgcccagatgccagagacctttctgtccaccaacaagctggagaaccagctgctgctacagaggcagaagctccagcagcttcagggccaaaacagcgcgctcgagaagcggttgcaggccctggagaccaagcagcaggaggagctggccagcatcctcagcaagaaggcgaagctgctgaacacgctgagccgccagagcgccgccctcaccaacatcgagcgcggcctgcgcggtgtcaggcacaactccagcctcctgcaggaccagcagcacagcctgcgccagctgctggtgttgttgcggcacctggtgcaagaaagggctaacgcctcggccccggccttcataatggcaggtgagcaggtgttccaggactgtgcagagatccagcgctctggggccagtgccagtggtgtctacaccatccaggtgtccaatgcaacgaagcccaggaaggtgttctgtgacctgcagagcagtggaggcaggtggaccctcatccagcgccgtgagaatggcaccgtgaattttcagcggaactggaaggattacaaacagggcttcggagacccagctggggagcactggctgggcaatgaagtggtgcaccagctcaccagaagggcagcctactctctgcgtgtggagctgcaagactgggaaggccacgaggcctatgcccagtacgaacatttccacctgggcagtgagaaccagctatacaggctttctgtggtcgggtacagcggctcagcagggcgccagagcagcctggtcctgcagaacaccagctttagcacccttgactcagacaacgaccactgtctctgcaagtgtgcccaagtgatgtctggagggtggtggtttgacgcctgtggcctgtcaaacctcaacggcgtctactaccacgctcccgacaacaagtacaagatggacggcatccgctggcactacttcaagggccccagctactcactgcgtgcctctcgcatgatgatacggcctttggacatctaacgagcagctgtgccagaggctggaccacacaggagaagctcggacttggcactcctggacaacctggacccagatgcaagacactgtgccaccgccttccctgacaccctgggcttcctgagccagccctccttgacccagaagtccagaagggtcatctgccccccaactcccctccgtctgtgacatggagggtgttcggggcccatccctctgatgtagtcctcgcccctcttctctccctcccccttcaggggctccctgcctgagggtcacagtaccttgaatgggctgagaacagaccaaa

SEQ ID NO: 1929 - DNA, 1702 bp, Homo sapiens
  source 1..1702: mol_type = unassigned DNA
agacagaggtttgtagctgcagctgcaggcaagcctggccactgttggctgcagcaggacatcccaggcacagcccctagggctctgagcagacatccctcgccattgacacatcttcagatgctctcccagctagccatgctgcagggcagcctcctccttgtggttgccaccatgtctgtggctcaacagacaaggcaggaggcggataggggctgcgagacacttgtagtccagcacggccactgtagctacaccttcttgctgcccaagtctgagccctgccctccggggcctgaggtctccagggactccaacaccctccagagagaatcactggccaacccactgcacctggggaagttgcccacccagcaggtgaaacagctggagcaggcactgcagaacaacacgcagtggctgaagaagctagagagggccatcaagacgatcttgaggtcgaagctggagcaggtccagcagcaaatggcccagaatcagacggcccccatgctagagctgggcaccagcctcctgaaccagaccactgcccagatccgcaagctgaccgacatggaggctcagctcctgaaccagacatcaagaatggatgcccagatgccagagacctttctgtccaccaacaagctggagaaccagctgctgctacagaggcagaagctccagcagcttcagggccaaaacagcgcgctcgagaagcggttgcaggccctggagaccaagcagcaggaggagctggccagcatcctcagcaagaaggcgaagctgctgaacacgctgagccgccagagcgccgccctcaccaacatcgagcgcggcctgcgcggtgtcaggcacaactccagcctcctgcaggaccagcagcacagcctgcgccagctgctggtgttgttgcggcacctggtgcaagaaagggctaacgcctcggccccggccttcataatggcaggtgagcaggtgttccaggactgtgcagagatccagcgctctggggccagtgccagtggtgtctacaccatccaggtgtccaatgcaacgaagcccaggaaggtgttctgtgacctgcagagcagtggaggcaggtggaccctcatccagcgccgtgagaatggcaccgtgaattttcagcggaactggaaggattacaaacagggcttcggagacccagctggggagcactggctgggcaatgaagtggtgcaccagctcaccagaagggcagcctactctctgcgtgtggagctgcaagactgggaaggccacgaggcctatgcccagtacgaacatttccacctgggcagtgagaaccagctatacagggtggtggtttgacgcctgtggcctgtcaaacctcaacggcgtctactaccacgctcccgacaacaagtacaagatggacggcatccgctggcactacttcaagggccccagctactcactgcgtgcctctcgcatgatgatacggcctttggacatctaacgagcagctgtgccagaggctggaccacacaggagaagctcggacttggcactcctggacaacctggacccagatgcaagacactgtgccaccgccttccctgacaccctgggcttcctgagccagccctccttgacccagaagtccagaagggtcatctgccccccaactcccctccgtctgtgacatggagggtgttcg

SEQ ID NO: 1930 - DNA, 2805 bp, Homo sapiens
  source 1..2805: mol_type = unassigned DNA
atatatagagttaagaagtctaggtctgcttccagaagaaaacagttccacgttgcttgaaattgaaaatcaagataaaaatgttcacaattaagctccttctttttattgttcctctagttatttcctccagaattgatcaagacaattcatcatttgattctctatctccagagccaaaatcaagatttgctatgttagacgatgtaaaaattttagccaatggcctccttcagttgggacatggtcttaaagactttgtccataagacgaagggccaaattaatgacatatttcaaaaactcaacatatttgatcagtctttttatgatctatcgctgcaaaccagtgaaatcaaagaagaagaaaaggaactgagaagaactacatataaactacaagtcaaaaatgaagaggtaaagaatatgtcacttgaactcaactcaaaacttgaaagcctcctagaagaaaaaattctacttcaacaaaaagtgaaatatttagaagagcaactaactaacttaattcaaaatcaacctgaaactccagaacacccagaagtaacttcacttaaaacttttgtagaaaaacaagataatagcatcaaagaccttctccagaccgtggaagaccaatataaacaattaaaccaacagcatagtcaaataaaagaaatagaaaatcagctcagaaggactagtattcaagaacccacagaaatttctctatcttccaagccaagagcaccaagaactactccctttcttcagttgaatgaaataagaaatgtaaaacatgatggcattcctgctgaatgtaccaccatttataacagaggtgaacatacaagtggcatgtatgccatcagacccagcaactctcaagtttttcatgtctactgtgatgttatatcaggtagtccatggacattaattcaacatcgaatagatggatcacaaaacttcaatgaaacgtgggagaactacaaatatggttttgggaggcttgatggagaattttggttgggcctagagaagatatactccatagtgaagcaatctaattatgttttacgaattgagttggaagactggaaagacaacaaacattatattgaatattctttttacttgggaaatcacgaaaccaactatacgctacatctagttgcgattactggcaatgtccccaatgcaatcccggaaaacaaagatttggtgttttctacttgggatcacaaagcaaaaggacacttcaactgtccagagggttattcaggaggctggtggtggcatgatgagtgtggagaaaacaacctaaatggtaaatataacaaaccaagagcaaaatctaagccagagaggagaagaggattatcttggaagtctcaaaatggaaggttatactctataaaatcaaccaaaatgttgatccatccaacagattcagaaagctttgaatgaactgaggcaaatttaaaaggcaataatttaaacattaacctcattccaagttaatgtggtctaataatctggtattaaatccttaagagaaagcttgagaaatagattttttttatcttaaagtcactgtctatttaagattaaacatacaatcacataaccttaaagaataccgtttacatttctcaatcaaaattcttataatactatttgttttaaattttgtgatgtgggaatcaattttagatggtcacaatctagattataatcaataggtgaacttattaaataacttttctaaataaaaaatttagagacttttattttaaaaggcatcatatgagctaatatcacaactttcccagtttaaaaaactagtactcttgttaaaactctaaacttgactaaatacagaggactggtaattgtacagttcttaaatgttgtagtattaatttcaaaactaaaaatcgtcagcacagagtatgtgtaaaaatctgtaatacaaatttttaaactgatgcttcattttgctacaaaataatttggagtaaatgtttgatatgatttatttatgaaacctaatgaagcagaattaaatactgtattaaaataagttcgctgtctttaaacaaatggagatgactactaagtcacattgactttaacatgaggtatcactataccttatttgttaaaatatatactgtatacattttatatattttaacacttaatactatgaaaacaaataattgtaaaggaatcttgtcagattacagtaagaatgaacatatttgtggcatcgagttaaagtttatatttcccctaaatatgctgtgattctaatacattcgtgtaggttttcaagtagaaataaacctcgtaacaagttactgaacgtttaaacagcctgacaagcatgtatatatgtttaaaattcaataaacaaagacccagtccctaaattatagaaatttaaattattcttgcatgtttatcgacatcacaacagatccctaaatccctaaatccctaaagattagatacaaattttttaccacagtatcacttgtcagaatttatttttaaatatgattttttaaaactgccagtaagaaattttaaattaaacccatttgttaaaggatatagtgcccaagttatatggtgacctacctttgtcaatacttagcattatgtatttcaaattatccaatatacatgtcatatatatttttatatgtcacatatataaaagatatgtatgatctatgtgaatcctaagtaaatattttgttccagaaaagtacaaaataataaaggtaaaaataatctataa

SEQ ID NO: 1931 - DNA, 2368 bp, Homo sapiens
  source 1..2368: mol_type = unassigned DNA
gatgagaggaactagaagcagctattgcaagctaccattttgagaacctgcccaaagaaagaaaagactgaagggatggaagattgcagaaagcatgatcggagaagagatattttacttttagtgaagctctatacacatttgtcttcctcactagatttgtatccctagaacctagaacagagtcagccaaagagcaggcactcaatacaaattgttgacttgctgctaaaattgtaacagagtacaaagaacatcctagaaattggagacaaaggggataagaaaacagagttaacttggaaagagaagacactcatctctgacaagactgaagatgattacacaacaccatcattgccaaccaagtcctttgggaatacaaaggttaaatcctaatcatcacaacagtctctaaaggaataaacctgatttacagattttgataacaaaatacttctcctctttccattttctacaatgcaaccaacagcaacatcaaagaggtttttaactgaagactctatgctctgtagttctttccacaaagagctgactgatatttgaagaagtgttttcatctatccaagaaaaatatgatgtctccatcccaagcctcactcttattcttaaatgtatgtatttttatttgtggagaagctgtacaaggtaactgtgtacatcattctacggactcttcagtagttaacattgtagaagatggatctaatgcaaaagatgaaagtaaaagtaatgatactgtttgtaaggaagactgtgaggaatcatgtgatgttaaaactaaaattacacgagaagaaaaacatttcatgtgtagaaatttgcaaaattctattgtttcctacacaagaagtaccaaaaaactactaaggaatatgatggatgagcaacaagcttccttggattatttatctaatcaggttaacgagctcatgaatagagttctccttttgactacagaagtttttagaaaacagctggatccttttcctcacagacctgttcagtcacatggtttagattgcactgatattaaggataccattggctctgtcaccaaaacaccgagtggtttatacataattcacccagaaggatctagctacccatttgaggtaatgtgtgacatggattacagaggaggtggacggactgtgatacagaaaagaattgatgggataattgatttccagaggttgtggtgtgattatctggatggatttggagatcttctaggagaattttggctaggactgaaaaagattttttatatagtaaatcagaaaaataccagttttatgctgtatgtggctttggaatctgaagatgacactcttgcttatgcatcatatgataatttttggctagaggatgaaacgagattttttaaaatgcacttaggacggtattcaggaaatgctggtgatgcattccggggtctcaaaaaagaagataatcaaaatgcaatgccttttagcacatcagatgttgataatgatgggtgtcgccctgcatgcctggtcaatggtcagtctgtgaagagctgcagtcacctccataacaagaccggctggtggtttaacgagtgtggtctagcaaatctaaatggcattcatcacttctctggaaaattgcttgcaactggaattcaatggggcacgtggaccaaaaacaactcacctgtcaagattaaatctgtttcaatgaaaattagaagaatgtacaatccatattttaaataatctcatttaacattgtaatgcaagttctacaatgataatatattaaagatttttaaaagtttatcttttcacttagtgtttcaaacatattaggcaaaatttaactgtagatggcatttagatgttatgagtttaattagaaaacttcaattttgtagtattctataaaagaaaacatggcttattgtatgtttttacttctgactatattaacaatatacaatgaaatttgtttcaagtgaactacaacttgtcttcctaaaatttatagtgattttaaaggattttgccttttctttgaagcatttttaaaccataatatgttgtaaggaaaattgaagggaatattttacttatttttatactttatatgattatataatctacagataatttctactgaagacagttacaataaataactttatgcagattaatatataagctacacatgatgtaaaaaccttactatttctaggtgatgccataccattttaaaagtagtaagagtttgctgcccaaatagtttttcttgttttcatatctaatcatggttaactattttgttattgtttgtaataaatatatgtacttttatatcctga

SEQ ID NO: 1932 - DNA, 1857 bp, Homo sapiens
  source 1..1857: mol_type = unassigned DNA
gcatcccagctccactcccaggctctgggggctggggagtggttaccaagcctcctctctccttctgtcccactgccctctccccgtctctagctcagaggccccactggaccctcggctcttccttggacttcttgtgtgttctgtgagcttcgctggattcagggtcttgggcatcagaggtccgccgcgatggggaagccctggctgcgtgcgctacagctgctgctcctgctgggcgcgtcgtgggcgcgggcgggcgccccgcgctgcacctacaccttcgtgctgcccccgcagaagttcacgggcgctgtgtgctggagcggccccgcatccacgcgggcgacgcccgaggccgccaacgccagcgagctggcggcgctgcgcatgcgcgtcggccgccacgaggagctgttacgcgagctgcagaggctggcggcggccgacggcgccgtggccggcgaggtgcgcgcgctgcgcaaggagagccgcggcctgagcgcgcgcctgggccagttgcgcgcgcagctgcagcacgaggcggggcccggggcgggcccgggggcggatctgggggcggagcctgccgcggcgctggcgctgctcggggagcgcgtgctcaacgcgtccgccgaggctcagcgcgcagccgcccggttccaccagctggacgtcaagttccgcgagctggcgcagctcgtcacccagcagagcagtctcatcgcccgcctggagcgcctgtgcccgggaggcgcgggcgggcagcagcaggtcctgccgccacccccactggtgcctgtggttccggtccgtcttgtgggtagcaccagtgacaccagtaggatgctggacccagccccagagccccagagagaccagacccagagacagcaggagcccatggcttctcccatgcctgcaggtcaccctgcggtccccaccaagcctgtgggcccgtggcaggattgtgcagaggcccgccaggcaggccatgaacagagtggagtgtatgaactgcgagtgggccgtcacgtagtgtcagtatggtgtgagcagcaactggagggtggaggctggactgtgatccagcggaggcaagatggttcagtcaacttcttcactacctggcagcactataaggcgggctttgggcggccagacggagaatactggctgggccttgaacccgtgtatcagctgaccagccgtggggaccatgagctgctggttctcctggaggactgggggggccgtggagcacgtgcccactatgatggcttctccctggaacccgagagcgaccactaccgcctgcggcttggccagtaccatggtgatgctggagactctctttcctggcacaatgacaagcccttcagcaccgtggatagggaccgagactcctattctggtaactgtgccctgtaccagcggggaggctggtggtaccatgcctgtgcccactccaacctcaacggtgtgtggcaccacggcggccactaccgaagccgctaccaggatggtgtctactgggctgagtttcgtggtggggcatattctctcaggaaggccgccatgctcattcggcccctgaagctgtgactctgtgttcctctgtcccctaggccctagaggacattggtcagcaggagcccaagttgttctggccacaccttctttgtggctcagtgccaatgtgtcccacagaacttcccactgtggatctgtgaccctgggcgctgaaaatgggacccaggaatcccccccgtcaatatcttggcctcagatggctccccaaggtcattcatatctcggtttgagctcatatcttataataacacaaagtagccacag

SEQ ID NO: 1933 - DNA, 2503 bp, Homo sapiens
  source 1..2503: mol_type = unassigned DNA
cgctcttattggccaggggacggtagctgcaggactctgctctcctgcggccatgggccagggttgggctactgcaggacttcccagcctcctcttcctgctgctctgctacgggcaccctctgctggtccccagccaggaggcatcccaacaggtgacagtcacccatgggacaagcagccaggcaacaaccagcagccagacaaccacccaccaggcgacggcccaccagacatcagcccagagcccaaacctggtgactgatgaggctgaggccagcaagtttgtggaggaatatgaccggacatcccaggtggtgtggaacgagtatgccgaggccaactggaactacaacaccaacatcaccacagagaccagcaagattctgctgcagaagaacatgcaaatagccaaccacaccctgaagtacggcacccaggccaggaagtttgatgtgaaccagttgcagaacaccactatcaagcggatcataaagaaggttcaggacctagaacgggcagcactgcctgcccaggagctggaggagtacaacaagatcctgttggatatggaaaccacctacagcgtggccactgtgtgccacccgaatggcagctgcctgcagctcgagccagatctgacgaatgtgatggccacgtcccggaaatatgaagacctgttatgggcatgggagggctggcgagacaaggcggggagagccatcctccagttttacccgaaatacgtggaactcatcaaccaggctgcccggctcaatggctatgtagatgcaggggactcgtggaggtctatgtacgagacaccatccctggagcaagacctggagcggctcttccaggagctgcagccactctacctcaacctgcatgcctacgtgcgccgggccctgcaccgtcactacggggcccagcacatcaacctggaggggcccattcctgctcacctgctggggaacatgtgggcgcagacctggtccaacatctatgacttggtggtgcccttcccttcagccccctcgatggacaccacagaggctatgctaaagcagggctggacgcccaggaggatgtttaaggaggctgatgatttcttcacctccctggggctgctgcccgtgcctcctgagttctggaacaagtcgatgctggagaagccaaccgacgggcgggaggtggtctgccacgcctcggcctgggacttctacaacggcaaggacttccggatcaagcagtgcaccaccgtgaacttggaggacctggtggtggcccaccacgaaatgggccacatccagtatttcatgcagtacaaagacttacctgtggccttgagggagggtgccaaccccggcttccatgaggccattggggacgtgctagccctctcagtgtctacgcccaagcacctgcacagtctcaacctgctgagcagtgagggtggcagcgacgagcatgacatcaactttctgatgaagatggcccttgacaagatcgcctttatccccttcagctacctcgtcgatcagtggcgctggagggtatttgatggaagcatcaccaaggagaactataaccaggagtggtggagcctcaggctgaagtaccagggcctctgccccccagtgcccaggactcaaggtgactttgacccaggggccaagttccacattccttctagcgtgccttacatcaggtactttgtcagcttcatcatccagttccagttccacgaggcactgtgccaggcagctggccacacgggccccctgcacaagtgtgacatctaccagtccaaggaggccgggcagcgcctggcgaccgccatgaagctgggcttcagtaggccgtggccggaagccatgcagctgatcacgggccagcccaacatgagcgcctcggccatgttgagctacttcaagccgctgctggactggctccgcacggagaacgagctgcatggggagaagctgggctggccgcagtacaactggacgccgaactccgctcgctcagaagggcccctcccagacagcggccgcgtcagcttcctgggcctggacctggatgcgcagcaggcccgcgtgggccagtggctgctgctcttcctgggcatcgccctgctggtagccaccctgggcctcagccagcggctcttcagcatccgccaccgcagcctccaccggcactcccacgggccccagttcggctccgaggtggagctgagacactcctgaggtgacccggctgggtcggccctgcccaagggcctcccaccagagactgggatgggaacactggtgggcagctgaggacacaccccacaccccagcccaccctgctcctcctgccctgtccctgtccccctcccctcccagtcctccagaccaccagccgccccagccccttctcccagcacacggctgcctgacactgagccccacctctccaagtctctctgtgaatacaattaaaggtcctgccctccc

SEQ ID NO: 1934 - DNA, 4022 bp, Homo sapiens
  source 1..4022: mol_type = unassigned DNA
gagccgagcaccgcgcaccgcgtcatgggggccgcctcgggccgccgggggccggggctgctgctgccgctgccgctgctgttgctgctgccgccgcagcccgccctggcgttggaccccgggctgcagcccggcaacttttctgctgacgaggccggggcgcagctcttcgcgcagagctacaactccagcgccgaacaggtgctgttccagagcgtggccgccagctgggcgcacgacaccaacatcaccgcggagaatgcaaggcgccaggaggaagcagccctgctcagccaggagtttgcggaggcctggggccagaaggccaaggagctgtatgaaccgatctggcagaacttcacggacccgcagctgcgcaggatcatcggagctgtgcgcaccctgggctctgccaacctgcccctggctaagcggcagcagtacaacgccctgctaagcaacatgagcaggatctactccaccgccaaggtctgcctccccaacaagactgccacctgctggtccctggacccagatctcaccaacatcctggcttcctcgcgaagctacgccatgctcctgtttgcctgggagggctggcacaacgctgcgggcatcccgctgaaaccgctgtacgaggatttcactgccctcagcaatgaagcctacaagcaggacggcttcacagacacgggggcctactggcgctcctggtacaactcccccaccttcgaggacgatctggaacacctctaccaacagctagagcccctctacctgaacctccatgccttcgtccgccgcgcactgcatcgccgatacggagacagatacatcaacctcaggggacccatccctgctcatctgctgggagacatgtgggcccagagctgggaaaacatctacgacatggtggtgcctttcccagacaagcccaacctcgatgtcaccagtactatgctgcagcagggctggaacgccacgcacatgttccgggtggcagaggagttcttcacctccctggagctctcccccatgcctcccgagttctgggaagggtcgatgctggagaagccggccgacgggcgggaagtggtgtgccacgcctcggcttgggacttctacaacaggaaagacttcaggatcaagcagtgcacacgggtcacgatggaccagctctccacagtgcaccatgagatgggccatatacagtactacctgcagtacaaggatctgcccgtctccctgcgtcggggggccaaccccggcttccatgaggccattggggacgtgctggcgctctcggtctccactcctgaacatctgcacaaaatcggcctgctggaccgtgtcaccaatgacacggaaagtgacatcaattacttgctaaaaatggcactggaaaaaattgccttcctgccctttggctacttggtggaccagtggcgctggggggtctttagtgggcgtacccccccttcccgctacaacttcgactggtggtatcttcgaaccaagtatcaggggatctgtcctcctgttacccgaaacgaaacccactttgatgctggagctaagtttcatgttccaaatgtgacaccatacatcaggtactttgtgagttttgtcctgcagttccagttccatgaagccctgtgcaaggaggcaggctatgagggcccactgcaccagtgtgacatctaccggtccaccaaggcaggggccaagctccggaaggtgctgcaggctggctcctccaggccctggcaggaggtgctgaaggacatggtcggcttagatgccctggatgcccagccgctgctcaagtacttccagccagtcacccagtggctgcaggagcagaaccagcagaacggcgaggtcctgggctggcccgagtaccagtggcacccgccgttgcctgacaactacccggagggcatagacctggtgactgatgaggctgaggccagcaagtttgtggaggaatatgaccggacatcccaggtggtgtggaacgagtatgccgaggccaactggaactacaacaccaacatcaccacagagaccagcaagattctgctgcagaagaacatgcaaatagccaaccacaccctgaagtacggcacccaggccaggaagtttgatgtgaaccagttgcagaacaccactatcaagcggatcataaagaaggttcaggacctagaacgggcagcactgcctgcccaggagctggaggagtacaacaagatcctgttggatatggaaaccacctacagcgtggccactgtgtgccacccgaatggcagctgcctgcagctcgagccagatctgacgaatgtgatggccacgtcccggaaatatgaagacctgttatgggcatgggagggctggcgagacaaggcggggagagccatcctccagttttacccgaaatacgtggaactcatcaaccaggctgcccggctcaatggctatgtagatgcaggggactcgtggaggtctatgtacgagacaccatccctggagcaagacctggagcggctcttccaggagctgcagccactctacctcaacctgcatgcctacgtgcgccgggccctgcaccgtcactacggggcccagcacatcaacctggaggggcccattcctgctcacctgctggggaacatgtgggcgcagacctggtccaacatctatgacttggtggtgcccttcccttcagccccctcgatggacaccacagaggctatgctaaagcagggctggacgcccaggaggatgtttaaggaggctgatgatttcttcacctccctggggctgctgcccgtgcctcctgagttctggaacaagtcgatgctggagaagccaaccgacgggcgggaggtggtctgccacgcctcggcctgggacttctacaacggcaaggacttccggatcaagcagtgcaccaccgtgaacttggaggacctggtggtggcccaccacgaaatgggccacatccagtatttcatgcagtacaaagacttacctgtggccttgagggagggtgccaaccccggcttccatgaggccattggggacgtgctagccctctcagtgtctacgcccaagcacctgcacagtctcaacctgctgagcagtgagggtggcagcgacgagcatgacatcaactttctgatgaagatggcccttgacaagatcgcctttatccccttcagctacctcgtcgatcagtggcgctggagggtatttgatggaagcatcaccaaggagaactataaccaggagtggtggagcctcaggctgaagtaccagggcctctgccccccagtgcccaggactcaaggtgactttgacccaggggccaagttccacattccttctagcgtgccttacatcaggtactttgtcagcttcatcatccagttccagttccacgaggcactgtgccaggcagctggccacacgggccccctgcacaagtgtgacatctaccagtccaaggaggccgggcagcgcctggcgaccgccatgaagctgggcttcagtaggccgtggccggaagccatgcagctgatcacgggccagcccaacatgagcgcctcggccatgttgagctacttcaagccgctgctggactggctccgcacggagaacgagctgcatggggagaagctgggctggccgcagtacaactggacgccgaactccgctcgctcagaagggcccctcccagacagcggccgcgtcagcttcctgggcctggacctggatgcgcagcaggcccgcgtgggccagtggctgctgctcttcctgggcatcgccctgctggtagccaccctgggcctcagccagcggctcttcagcatccgccaccgcagcctccaccggcactcccacgggccccagttcggctccgaggtggagctgagacactcctgaggtgacccggctgggtcggccctgcccaagggcctcccaccagagactgggatgggaacactggtgggcagctgagg

SEQ ID NO: 1935 - DNA, 3141 bp, Homo sapiens
  source 1..3141: mol_type = unassigned DNA
gctcttattggccaggggacggtagctgcaggactctgctctcctgcggccatgggccagggttgggctactgcaggacttcccagcctcctcttcctgctgctctgctacgggcaccctctgctggtccccagccaggaggcatcccaacaggtgacagtcacccatgggacaagcagccaggcaacaaccagcagccagacaaccacccaccaggcgacggcccaccagacatcagcccagagcccaaacctggtgactgatgaggctgaggccagcaagtttgtggaggaatatgaccggacatcccaggtggtgtggaacgagtatgccgaggccaactggaactacaacaccaacatcaccacagagaccagcaagattctgctgcagaagaacatgcaaatagccaaccacaccctgaagtacggcacccaggccaggaagtttgatgtgaaccagttgcagaacaccactatcaagcggatcataaagaaggttcaggacctagaacgggcagcactgcctgcccaggagctggaggagtacaacaagatcctgttggatatggaaaccacctacagcgtggccactgtgtgccacccgaatggcagctgcctgcagctcgagccagatctgacgaatgtgatggccacgtcccggaaatatgaagacctgttatgggcatgggagggctggcgagacaaggcggggagagccatcctccagttttacccgaaatacgtggaactcatcaaccaggctgcccggctcaatggctatgtagatgcaggggactcgtggaggtctatgtacgagacaccatccctggagcaagacctggagcggctcttccaggagctgcagccactctacctcaacctgcatgcctacgtgcgccgggccctgcaccgtcactacggggcccagcacatcaacctggaggggcccattcctgctcacctgctggggaacatgtgggcgcagacctggtccaacatctatgacttggtggtgcccttcccttcagccccctcgatggacaccacagaggctatgctaaagcagggctggacgcccaggaggatgtttaaggaggctgatgatttcttcacctccctggggctgctgcccgtgcctcctgagttctggaacaagtcgatgctggagaagccaaccgacgggcgggaggtggtctgccacgcctcggcctgggacttctacaacggcaaggacttccggatcaagcagtgcaccaccgtgaacttggaggacctggtggtggcccaccacgaaatgggccacatccagtatttcatgcagtacaaagacttacctgtggccttgagggagggtgccaaccccggcttccatgaggccattggggacgtgctagccctctcagtgtctacgcccaagcacctgcacagtctcaacctgctgagcagtgagggtggcagcgacgagcatgacatcaactttctgatgaagatggcccttgacaagatcgcctttatccccttcagctacctcgtcgatcagtggcgctggagggtatttgatggaagcatcaccaaggagaactataaccaggagtggtggagcctcaggctgaagtaccagggcctctgccccccagtgcccaggactcaaggtgactttgacccaggggccaagttccacattccttctagcgtgccttacatcaggaccgccatgaagctgggcttcagtaggccgtggccggaagccatgcagctgatcacgggccagcccaacatgagcgcctcggccatgttgagctacttcaagccgctgctggactggctccgcacggagaacgagctgcatggggagaagctgggctggccgcagtacaactggacgccgaactccgctcgctcagaagggcccctcccagacagcggccgcgtcagcttcctgggcctggacctggatgcgcagcaggcccgcgtgggccagtggctgctgctcttcctgggcatcgccctgctggtagccaccctgggcctcagccagcggctcttcagcatccgccaccgcagcctccaccggcactcccacgggccccagttcggctccgaggtggagctgagacactcctgaggtgacccggctgggtcggccctgcccaagggcctcccaccagagactgggatgggaacactggtgggcagctgaggacacaccccacaccccagcccaccctgctcctcctgccctgtccctgtccccctcccctcccagtcctccagaccaccagccgccccagccccttctcccagcacacggctgcctgacactgagccccacctctccaagtctctctgtgaatacaattaaaggtcctgccctccccatctgagtctgtgtccctcacagggaagccagggacagggacaggctgctttcctgcctcctggcagtcaagtgggtcccgttactaggtttgttcctccatcctccttcaggagccggggaggatccccagagctctgccccagcacctcctggcgctggcgcctgtcttccctccagcccaggcagcccgccactgtcctgccaccgcaggcagcccctgtctggcccaagcactgacccacgcggactctgggaagcagacatcctgggctgctggcctcacatttccactggcagtggagcctttccctgctccacaaatggccaggtccccccaggggaaggcttccggctgttatcggctgcctcagggggcgagtaccttggagggcctgcttcaaggagggtgccccctggagggcacacaccagcctagtgcttaccttggctcctgcctgtaccagctccatgactctgctcgggtgaacagccttggctctcagacagccattctaacactgccagtgcagaggggcctcagacgctggagtgtagcagtggctgcacctgcacagggattagctgccagcagccaccctgctggcgtcccagcacacacctcctcactccctgcattggagggagtgtcattttaagggacatttttatgacttttatgtgtatgtttatgtagaaatttggaaaatacagaaaactgtaaagaaaataaaagccctttatatcaacgtcaagagataa

SEQ ID NO: 1936 - DNA, 1881 bp, Homo sapiens
  source 1..1881: mol_type = unassigned DNA
aggactctgctctcctgcggccatgggccagggttgggctactgcaggacttcccagcctcctcttcctgctgctctgctacgggcaccctctgctggtccccagccaggaggcatcccaacagacctggtgactgatgaggctgaggccagcaagtttgtggaggaatatgaccggacatcccaggtggtgtggaacgagtatgccgaggccaactggaactacaacaccaacatcaccacagagaccagcaagattctgctgcagaagaacatgcaaatagccaaccacaccctgaagtacggcacccaggccaggaagtttgatgtgaaccagttgcagaacaccactatcaagcggatcataaagaaggttcaggacctagaacgggcagcactgcctgcccaggagctggaggagtacaacaagatcctgttggatatggaaaccacctacagcgtggccactgtgtgccacccgaatggcagctgcctgcagctcgagccagatctgacgaatgtgatggccacgtcccggaaatatgaagacctgttatgggcatgggagggctggcgagacaaggcggggagagccatcctccagttttacccgaaatacgtggaactcatcaaccaggctgcccggctcaatgggaacatgtgggcgcagacctggtccaacatctatgacttggtggtgcccttcccttcagccccctcgatggacaccacagaggctatgctaaagcagggctggacgcccaggaggatgtttaaggaggctgatgatttcttcacctccctggggctgctgcccgtgcctcctgagttctggaacaagtcgatgctggagaagccaaccgacgggcgggaggtggtctgccacgcctcggcctgggacttctacaacggcaaggacttccggatcaagcagtgcaccaccgtgaacttggaggacctggtggtggcccaccacgaaatgggccacatccagtatttcatgcagtacaaagacttacctgtggccttgagggagggtgccaaccccggcttccatgaggccattggggacgtgctagccctctcagtgtctacgcccaagcacctgcacagtctcaacctgctgagcagtgagggtggcagcgacgagcatgacatcaactttctgatgaagatggcccttgacaagatcgcctttatccccttcagctacctcgtcgatcagtggcgctggagggtatttgatggaagcatcaccaaggagaactataaccaggagtggtggagcctcaggctgaagtaccagggcctctgccccccagtgcccaggactcaaggtgactttgacccaggggccaagttccacattccttctagcgtgccttacatcaggaccgccatgaagctgggcttcagtaggccgtggccggaagccatgcagctgatcacgggccagcccaacatgagcgcctcggccatgttgagctacttcaagccgctgctggactggctccgcacggagaacgagctgcatggggagaagctgggctggccgcagtacaactggacgccgaactccgctcgctcagaagggcccctcccagacagcggccgcgtcagcttcctgggcctggacctggatgcgcagcaggcccgcgtgggccagtggctgctgctcttcctgggcatcgccctgctggtagccaccctgggcctcagccagcggctcttcagcatccgccaccgcagcctccaccggcactcccacgggccccagttcggctccgaggtggagctgagacactcctgaggtgacccggctgggtcggccctgcccaagggcctcccaccagagactgggatgggaacactggtgggcagc

SEQ ID NO: 1937 - DNA, 3460 bp, Homo sapiens
  source 1..3460: mol_type = unassigned DNA
gccgagcaccgcgcaccgcgtcatgggggccgcctcgggccgccgggggccggggctgctgctgccgctgccgctgctgttgctgctgccgccgcagcccgccctggcgttggaccccgggctgcagcccggcaacttttctgctgacgaggccggggcgcagctcttcgcgcagagctacaactccagcgccgaacaggtgctgttccagagcgtggccgccagctgggcgcacgacaccaacatcaccgcggagaatgcaaggcgccaggaggaagcagccctgctcagccaggagtttgcggaggcctggggccagaaggccaaggagctgtatgaaccgatctggcagaacttcacggacccgcagctgcgcaggatcatcggagctgtgcgcaccctgggctctgccaacctgcccctggctaagcggcagcagtacaacgccctgctaagcaacatgagcaggatctactccaccgccaaggtctgcctccccaacaagactgccacctgctggtccctggacccagatctcaccaacatcctggcttcctcgcgaagctacgccatgctcctgtttgcctgggagggctggcacaacgctgcgggcatcccgctgaaaccgctgtacgaggatttcactgccctcagcaatgaagcctacaagcaggacggcttcacagacacgggggcctactggcgctcctggtacaactcccccaccttcgaggacgatctggaacacctctaccaacagctagagcccctctacctgaacctccatgccttcgtccgccgcgcactgcatcgccgatacggagacagatacatcaacctcaggggacccatccctgctcatctgctgggagacatgtgggcccagagctgggaaaacatctacgacatggtggtgcctttcccagacaagcccaacctcgatgtcaccagtactatgctgcagcagggctggaacgccacgcacatgttccgggtggcagaggagttcttcacctccctggagctctcccccatgcctcccgagttctgggaagggtcgatgctggagaagccggccgacgggcgggaagtggtgtgccacgcctcggcttgggacttctacaacaggaaagacttcaggatcaagcagtgcacacgggtcacgatggaccagctctccacagtgcaccatgagatgggccatatacagtactacctgcagtacaaggatctgcccgtctccctgcgtcggggggccaaccccggcttccatgaggccattggggacgtgctggcgctctcggtctccactcctgaacatctgcacaaaatcggcctgctggaccgtgtcaccaatgacacggaaagtgacatcaattacttgctaaaaatggcactggaaaaaattgccttcctgccctttggctacttggtggaccagtggcgctggggggtctttagtgggcgtacccccccttcccgctacaacttcgactggtggtatcttcgaaccaagtatcaggggatctgtcctcctgttacccgaaacgaaacccactttgatgctggagctaagtttcatgttccaaatgtgacaccatacatcaggtactttgtgagttttgtcctgcagttccagttccatgaagccctgtgcaaggaggcaggctatgagggcccactgcaccagtgtgacatctaccggtccaccaaggcaggggccaagctccggaaggtgctgcaggctggctcctccaggccctggcaggaggtgctgaaggacatggtcggcttagatgccctggatgcccagccgctgctcaagtacttccagccagtcacccagtggctgcaggagcagaaccagcagaacggcgaggtcctgggctggcccgagtaccagtggcacccgccgttgcctgacaactacccggagggcatagacctggtgactgatgaggctgaggccagcaagtttgtggaggaatatgaccggacatcccaggtggtgtggaacgagtatgccgaggccaactggaactacaacaccaacatcaccacagagaccagcaagattctgctgcagaagaacatgcaaatagccaaccacaccctgaagtacggcacccaggccaggaagtttgatgtgaaccagttgcagaacaccactatcaagcggatcataaagaaggttcaggacctagaacgggcagcactgcctgcccaggagctggaggagtacaacaagatcctgttggatatggaaaccacctacagcgtggccactgtgtgccacccgaatggcagctgcctgcagctcgagccagatctgacgaatgtgatggccacgtcccggaaatatgaagacctgttatgggcatgggagggctggcgagacaaggcggggagagccatcctccagttttacccgaaatacgtggaactcatcaaccaggctgcccggctcaatggctatgtagatgcaggggactcgtggaggtctatgtacgagacaccatccctggagcaagacctggagcggctcttccaggagctgcagccactctacctcaacctgcatgcctacgtgcgccgggccctgcaccgtcactacggggcccagcacatcaacctggaggggcccattcctgctcacctgctggggaacatgtgggcgcagacctggtccaacatctatgacttggtggtgcccttcccttcagccccctcgatggacaccacagaggctatgctaaagcagggctggacgcccaggaggatgtttaaggaggctgatgatttcttcacctccctggggctgctgcccgtgcctcctgagttctggaacaagtcgatgctggagaagccaaccgacgggcgggaggtggtctgccacgcctcggcctgggacttctacaacggcaaggacttccggatcaagcagtgcaccaccgtgaacttggaggacctggtggtggcccaccacgaaatgggccacatccagtatttcatgcagtacaaagacttacctgtggccttgagggagggtgccaaccccggcttccatgaggccattggggacgtgctagccctctcagtgtctacgcccaagcacctgcacagtctcaacctgctgagcagtgagggtggcagcgacgagcatgacatcaactttctgatgaagatggcccttgacaagatcgcctttatccccttcagctacctcgtcgatcagtggcgctggagggtatttgatggaagcatcaccaaggagaactataaccaggagtggtggagcctcaggctgaagtaccagggcctctgccccccagtgcccaggactcaaggtgactttgacccaggggccaagttccacattccttctagcgtgccttacatcaggtactttgtcagcttcatcatccagttccaccccttctcccagcacacggctgcctga

SEQ ID NO: 1938 - DNA, 1478 bp, Homo sapiens
  source 1..1478: mol_type = unassigned DNA
agaaggggcagagccgagcaccgcgcaccgcgtcatgggggccgcctcgggccgccgggggccggggctgctgctgccgctgccgctgctgttgctgctgccgccgcagcccgccctggcgttggaccccgggctgcagcccggcaacttttctgctgacgaggccggggcgcagctcttcgcgcagagctacaactccagcgccgaacaggtgctgttccagagcgtggccgccagctgggcgcacgacaccaacatcaccgcggagaatgcaaggcgccaggaggaagcagccctgctcagccaggagtttgcggaggcctggggccagaaggccaaggagctgtatgaaccgatctggcagaacttcacggacccgcagctgcgcaggatcatcggagctgtgcgcaccctgggctctgccaacctgcccctggctaagcggcagcagtacaacgccctgctaagcaacatgagcaggatctactccaccgccaaggtctgcctccccaacaagactgccacctgctggtccctggacccagatctcaccaacatcctggcttcctcgcgaagctacgccatgctcctgtttgcctgggagggctggcacaacgctgcgggcatcccgctgaaaccgctgtacgaggatttcactgccctcagcaatgaagcctacaagcaggacggcttcacagacacgggggcctactggcgctcctggtacaactcccccaccttcgaggacgatctggaacacctctaccaacagctagagcccctctacctgaacctccatgccttcgtccgccgcgcactgcatcgccgatacggagacagatacatcaacctcaggggacccatccctgctcatctgctgggagacatgtgggcccagagctgggaaaacatctacgacatggtggtgcctttcccagacaagcccaacctcgatgtcaccagtactatgctgcagcagggctggaacgccacgcacatgttccgggtggcagaggagttcttcacctccctggagctctcccccatgcctcccgagttctgggaagggtcgatgctggagaagccggccgacgggcgggaagtggtgtgccacgcctcggcttgggacttctacaacaggaaagacttcaggatcaagcagtgcacacgggtcacgatggaccagctctccacagtgcaccatgagatgggccatatacagtactacctgcagtacaaggatctgcccgtctccctgcgtcggggggccaaccccggcttccatgaggccattggggacgtgctggcgctctcggtctccactcctgaacatctgcacaaaatcggcctgctggaccgtgtcaccaatgacacggaaccaagtatcaggggatctgtcctcctgttacccgaaacgaaacccactttgatgctggagctaagtttcatgttccaaatgtgacaccatacatcaggta

SEQ ID NO: 1939 - DNA, 2356 bp, Homo sapiens
  source 1..2356: mol_type = unassigned DNA
actataaattcggagctgcctcctcgccaatgattccagcgcctgacagccaggaccccaggcagcagcgagtgacaggacgtctggaccggcgcgccgctagcagctctgccgggccgcggcggtgatcgatggggagcggctggagcggacccagcgagtgagggcgcacagccgggacgccgaggcggcgggcgggagacccgcaccagcgcagccggccctcggcgggacgtgacgcagcgcccggggcgcgggtttgatatttgacaaattgatctaaaatggctgggtttttatctgaataactcactgatgccatcccagaaagtcggcaccaggtgtatttgatatagtgtttgcaacaaattcgacccaggtgatcaaaatgattctcaactcttctactgaagatggtattaaaagaatccaagatgattgtcccaaagctggaaggcataattacatatttgtcatgattcctactttatacagtatcatctttgtggtgggaatatttggaaacagcttggtggtgatagtcatttacttttatatgaagctgaagactgtggccagtgtttttcttttgaatttagcactggctgacttatgctttttactgactttgccactatgggctgtctacacagctatggaataccgctggccctttggcaattacctatgtaagattgcttcagccagcgtcagtttcaacctgtacgctagtgtgtttctactcacgtgtctcagcattgatcgatacctggctattgttcacccaatgaagtcccgccttcgacgcacaatgcttgtagccaaagtcacctgcatcatcatttggctgctggcaggcttggccagtttgccagctataatccatcgaaatgtatttttcattgagaacaccaatattacagtttgtgctttccattatgagtcccaaaattcaaccctcccgatagggctgggcctgaccaaaaatatactgggtttcctgtttccttttctgatcattcttacaagttatactcttatttggaaggccctaaagaaggcttatgaaattcagaagaacaaaccaagaaatgatgatatttttaagataattatggcaattgtgcttttctttttcttttcctggattccccaccaaatattcacttttctggatgtattgattcaactaggcatcatacgtgactgtagaattgcagatattgtggacacggccatgcctatcaccatttgtatagcttattttaacaattgcctgaatcctcttttttatggctttctggggaaaaaatttaaaagatattttctccagcttctaaaatatattcccccaaaagccaaatcccactcaaacctttcaacaaaaatgagcacgctttcctaccgcccctcagataatgtaagctcatccaccaagaagcctgcaccatgttttgaggttgagtgacatgttcgaaacctgtccataaagtaattttgtgaaagaaggagcaagagaacattcctctgcagcacttcactaccaaatgagcattagctacttttcagaattgaaggagaaaatgcattatgtggactgaaccgacttttctaaagctctgaacaaaagcttttctttccttttgcaacaagacaaagcaaagccacattttgcattagacagatgacggctgctcgaagaacaatgtcagaaactcgatgaatgtgttgatttgagaaattttactgacagaaatgcaatctccctagcctgcttttgtcctgttattttttatttccacataaaggtatttagaatatattaaatcgttagaggagcaacaggagatgagagttccagattgttctgtccagtttccaaagggcagtaaagttttcgtgccggttttcagctattagcaactgtgctacacttgcacctggtactgcacattttgtacaaagatatgctaagcagtagtcgtcaagttgcagatctttttgtgaaattcaacctgtgtcttataggtttccactgccaaaacaatgcccgtaagatggcttatttgtataatggtgttactaaagtcacatataaaagttaaactacttgtaaaggtgctgcactggtcccaagtagtagtgtcttcctagtatattagtttgatttaatatctgagaagtgtatatagtttgtggtaaaaagattatatatcataaagtatgccttcctgtttaaaaaaagtatatattctacacatatatgtatatgtatatctatatctctaaactgctgttaattgattaaaatctggcaaagttatatttactttaaaataaaataattttattgcaa

SEQ ID NO: 1940 - DNA, 2172 bp, Homo sapiens
  source 1..2172: mol_type = unassigned DNA
agggcatgccattgcaagagaatgctcagccatgttcatctggggacctgctcctggtagagcaataggatctgtgtgcccagcaccactgcccacctagctgtcctggcctgtgcccaatgctgaccttcacctcagagtgtggctgtaccacattcggtgtatttgatatagtgtttgcaacaaattcgacccaggtgatcaaaatgattctcaactcttctactgaagatggtattaaaagaatccaagatgattgtcccaaagctggaaggcataattacatatttgtcatgattcctactttatacagtatcatctttgtggtgggaatatttggaaacagcttggtggtgatagtcatttacttttatatgaagctgaagactgtggccagtgtttttcttttgaatttagcactggctgacttatgctttttactgactttgccactatgggctgtctacacagctatggaataccgctggccctttggcaattacctatgtaagattgcttcagccagcgtcagtttcaacctgtacgctagtgtgtttctactcacgtgtctcagcattgatcgatacctggctattgttcacccaatgaagtcccgccttcgacgcacaatgcttgtagccaaagtcacctgcatcatcatttggctgctggcaggcttggccagtttgccagctataatccatcgaaatgtatttttcattgagaacaccaatattacagtttgtgctttccattatgagtcccaaaattcaaccctcccgatagggctgggcctgaccaaaaatatactgggtttcctgtttccttttctgatcattcttacaagttatactcttatttggaaggccctaaagaaggcttatgaaattcagaagaacaaaccaagaaatgatgatatttttaagataattatggcaattgtgcttttctttttcttttcctggattccccaccaaatattcacttttctggatgtattgattcaactaggcatcatacgtgactgtagaattgcagatattgtggacacggccatgcctatcaccatttgtatagcttattttaacaattgcctgaatcctcttttttatggctttctggggaaaaaatttaaaagatattttctccagcttctaaaatatattcccccaaaagccaaatcccactcaaacctttcaacaaaaatgagcacgctttcctaccgcccctcagataatgtaagctcatccaccaagaagcctgcaccatgttttgaggttgagtgacatgttcgaaacctgtccataaagtaattttgtgaaagaaggagcaagagaacattcctctgcagcacttcactaccaaatgagcattagctacttttcagaattgaaggagaaaatgcattatgtggactgaaccgacttttctaaagctctgaacaaaagcttttctttccttttgcaacaagacaaagcaaagccacattttgcattagacagatgacggctgctcgaagaacaatgtcagaaactcgatgaatgtgttgatttgagaaattttactgacagaaatgcaatctccctagcctgcttttgtcctgttattttttatttccacataaaggtatttagaatatattaaatcgttagaggagcaacaggagatgagagttccagattgttctgtccagtttccaaagggcagtaaagttttcgtgccggttttcagctattagcaactgtgctacacttgcacctggtactgcacattttgtacaaagatatgctaagcagtagtcgtcaagttgcagatctttttgtgaaattcaacctgtgtcttataggtttccactgccaaaacaatgcccgtaagatggcttatttgtataatggtgttactaaagtcacatataaaagttaaactacttgtaaaggtgctgcactggtcccaagtagtagtgtcttcctagtatattagtttgatttaatatctgagaagtgtatatagtttgtggtaaaaagattatatatcataaagtatgccttcctgtttaaaaaaagtatatattctacacatatatgtatatgtatatctatatctctaaactgctgttaattgattaaaatctggcaaagttatatttactttaaaataaaataattttattgc

SEQ ID NO: 1941 - DNA, 2252 bp, Homo sapiens
  source 1..2252: mol_type = unassigned DNA
agccaggaccccaggcagcagcgagtgacaggacgtctggaccggcgcgccgctagcagctctgccgggccgcggcggtgatcgatggggagcggctggagcggacccagcgagtgagggcgcacagccgggacgccgaggcggcgggcgggagacccgcaccagcgcagccggccctcggcgggacgtgacgcagcgcccggggcgcgggtgagtccgcgcggaccgccaggtgtatttgatatagtgtttgcaacaaattcgacccaggtgatcaaaatgattctcaactcttctactgaagatggtattaaaagaatccaagatgattgtcccaaagctggaaggcataattacatatttgtcatgattcctactttatacagtatcatctttgtggtgggaatatttggaaacagcttggtggtgatagtcatttacttttatatgaagctgaagactgtggccagtgtttttcttttgaatttagcactggctgacttatgctttttactgactttgccactatgggctgtctacacagctatggaataccgctggccctttggcaattacctatgtaagattgcttcagccagcgtcagtttcaacctgtacgctagtgtgtttctactcacgtgtctcagcattgatcgatacctggctattgttcacccaatgaagtcccgccttcgacgcacaatgcttgtagccaaagtcacctgcatcatcatttggctgctggcaggcttggccagtttgccagctataatccatcgaaatgtatttttcattgagaacaccaatattacagtttgtgctttccattatgagtcccaaaattcaaccctcccgatagggctgggcctgaccaaaaatatactgggtttcctgtttccttttctgatcattcttacaagttatactcttatttggaaggccctaaagaaggcttatgaaattcagaagaacaaaccaagaaatgatgatatttttaagataattatggcaattgtgcttttctttttcttttcctggattccccaccaaatattcacttttctggatgtattgattcaactaggcatcatacgtgactgtagaattgcagatattgtggacacggccatgcctatcaccatttgtatagcttattttaacaattgcctgaatcctcttttttatggctttctggggaaaaaatttaaaagatattttctccagcttctaaaatatattcccccaaaagccaaatcccactcaaacctttcaacaaaaatgagcacgctttcctaccgcccctcagataatgtaagctcatccaccaagaagcctgcaccatgttttgaggttgagtgacatgttcgaaacctgtccataaagtaattttgtgaaagaaggagcaagagaacattcctctgcagcacttcactaccaaatgagcattagctacttttcagaattgaaggagaaaatgcattatgtggactgaaccgacttttctaaagctctgaacaaaagcttttctttccttttgcaacaagacaaagcaaagccacattttgcattagacagatgacggctgctcgaagaacaatgtcagaaactcgatgaatgtgttgatttgagaaattttactgacagaaatgcaatctccctagcctgcttttgtcctgttattttttatttccacataaaggtatttagaatatattaaatcgttagaggagcaacaggagatgagagttccagattgttctgtccagtttccaaagggcagtaaagttttcgtgccggttttcagctattagcaactgtgctacacttgcacctggtactgcacattttgtacaaagatatgctaagcagtagtcgtcaagttgcagatctttttgtgaaattcaacctgtgtcttataggtttccactgccaaaacaatgcccgtaagatggcttatttgtataatggtgttactaaagtcacatataaaagttaaactacttgtaaaggtgctgcactggtcccaagtagtagtgtcttcctagtatattagtttgatttaatatctgagaagtgtatatagtttgtggtaaaaagattatatatcataaagtatgccttcctgtttaaaaaaagtatatattctacacatatatgtatatgtatatctatatctctaaactgctgttaattgattaaaatctggcaaagttatatttactttaaaataaaataattttattgcaatgtat

SEQ ID NO: 1942 - DNA, 2328 bp, Homo sapiens
  source 1..2328: mol_type = unassigned DNA
actataaattcggagctgcctcctcgccaatgattccagcgcctgacagccaggaccccaggcagcagcgagtgacaggacgtctggaccggcgcgccgctagcagctctgccgggccgcggcggtgatcgatggggagcggctggagcggacccagcgagtgagggcgcacagccgggacgccgaggcggcgggcgggagacccgcaccagcgcagccggccctcggcgggacgtgacgcagcgcccggggcgcggatgaagaaaatgaatcacaagtcaactgacagtccaaaggctccacagctcagaggaggtgtatttgatatagtgtttgcaacaaattcgacccaggtgatcaaaatgattctcaactcttctactgaagatggtattaaaagaatccaagatgattgtcccaaagctggaaggcataattacatatttgtcatgattcctactttatacagtatcatctttgtggtgggaatatttggaaacagcttggtggtgatagtcatttacttttatatgaagctgaagactgtggccagtgtttttcttttgaatttagcactggctgacttatgctttttactgactttgccactatgggctgtctacacagctatggaataccgctggccctttggcaattacctatgtaagattgcttcagccagcgtcagtttcaacctgtacgctagtgtgtttctactcacgtgtctcagcattgatcgatacctggctattgttcacccaatgaagtcccgccttcgacgcacaatgcttgtagccaaagtcacctgcatcatcatttggctgctggcaggcttggccagtttgccagctataatccatcgaaatgtatttttcattgagaacaccaatattacagtttgtgctttccattatgagtcccaaaattcaaccctcccgatagggctgggcctgaccaaaaatatactgggtttcctgtttccttttctgatcattcttacaagttatactcttatttggaaggccctaaagaaggcttatgaaattcagaagaacaaaccaagaaatgatgatatttttaagataattatggcaattgtgcttttctttttcttttcctggattccccaccaaatattcacttttctggatgtattgattcaactaggcatcatacgtgactgtagaattgcagatattgtggacacggccatgcctatcaccatttgtatagcttattttaacaattgcctgaatcctcttttttatggctttctggggaaaaaatttaaaagatattttctccagcttctaaaatatattcccccaaaagccaaatcccactcaaacctttcaacaaaaatgagcacgctttcctaccgcccctcagataatgtaagctcatccaccaagaagcctgcaccatgttttgaggttgagtgacatgttcgaaacctgtccataaagtaattttgtgaaagaaggagcaagagaacattcctctgcagcacttcactaccaaatgagcattagctacttttcagaattgaaggagaaaatgcattatgtggactgaaccgacttttctaaagctctgaacaaaagcttttctttccttttgcaacaagacaaagcaaagccacattttgcattagacagatgacggctgctcgaagaacaatgtcagaaactcgatgaatgtgttgatttgagaaattttactgacagaaatgcaatctccctagcctgcttttgtcctgttattttttatttccacataaaggtatttagaatatattaaatcgttagaggagcaacaggagatgagagttccagattgttctgtccagtttccaaagggcagtaaagttttcgtgccggttttcagctattagcaactgtgctacacttgcacctggtactgcacattttgtacaaagatatgctaagcagtagtcgtcaagttgcagatctttttgtgaaattcaacctgtgtcttataggtttccactgccaaaacaatgcccgtaagatggcttatttgtataatggtgttactaaagtcacatataaaagttaaactacttgtaaaggtgctgcactggtcccaagtagtagtgtcttcctagtatattagtttgatttaatatctgagaagtgtatatagtttgtggtaaaaagattatatatcataaagtatgccttcctgtttaaaaaaagtatatattctacacatatatgtatatgtatatctatatctctaaactgctgttaattgattaaaatctggcaaagttatatttactttaaaataaaataattttattgc

SEQ ID NO: 1943 - DNA, 1545 bp, Homo sapiens
  source 1..1545: mol_type = unassigned DNA
cttgctacttcatcatcctcatcgtgaacattattattattatcatcattttccagatgaagaaaatgaatcacaagtcaactgacagtccaaaggctccacagctcagaggaggtagatcttagttcttcctgagaaggtatgaaggtgggtattccaccctacctgaattataggaatttcagatatctgtgagcagctgcaaaggggattttactagatgacatcctgctgggcacactttacgccagtcctgaatgtgtaatagaaatctgcagtttaatgagtgtatttgatatagtgtttgcaacaaattcgacccaggtgatcaaaatgattctcaactcttctactgaagatggtattaaaagaatccaagatgattgtcccaaagctggaaggcataattacatatttgtcatgattcctactttatacagtatcatctttgtggtgggaatatttggaaacagcttggtggtgatagtcatttacttttatatgaagctgaagactgtggccagtgtttttcttttgaatttagcactggctgacttatgctttttactgactttgccactatgggctgtctacacagctatggaataccgctggccctttggcaattacctatgtaagattgcttcagccagcgtcagtttcaacctgtacgctagtgtgtttctactcacgtgtctcagcattgatcgatacctggctattgttcacccaatgaagtcccgccttcgacgcacaatgcttgtagccaaagtcacctgcatcatcatttggctgctggcaggcttggccagtttgccagctataatccatcgaaatgtatttttcattgagaacaccaatattacagtttgtgctttccattatgagtcccaaaattcaaccctcccgatagggctgggcctgaccaaaaatatactgggtttcctgtttccttttctgatcattcttacaagttatactcttatttggaaggccctaaagaaggcttatgaaattcagaagaacaaaccaagaaatgatgatatttttaagataattatggcaattgtgcttttctttttcttttcctggattccccaccaaatattcacttttctggatgtattgattcaactaggcatcatacgtgactgtagaattgcagatattgtggacacggccatgcctatcaccatttgtatagcttattttaacaattgcctgaatcctcttttttatggctttctggggaaaaaatttaaaagatattttctccagcttctaaaatatattcccccaaaagccaaatcccactcaaacctttcaacaaaaatgagcacgctttcctaccgcccctcagataatgtaagctcatccaccaagaagcctgcaccatgttttgaggttgagtgacatgttcgaaacctgtccataaagtaattttgtgaaagaaggagcaagagaacattcctctgcagcacttcactaccaaatgagcattagctacttttcagaattgaaggagaaaatgcattatgtggactg

SEQ ID NO: 1944 - DNA, 1795 bp, Homo sapiens
  source 1..1795: mol_type = unassigned DNA
gttttgcaccaaactggacacatgcttgctacttcatcatcctcatcgtgaacattattattattatcatcattttccagatgaagaaaatgaatcacaagtcaactgacagtccaaaggctccacagctcagaggaggtaaatcatgtgcttaattcagaacttttggctcccatcactatgctcttcccactgtcttaactctggttgtcacctgagccattgtgtttcttctcaggtagatcttagttcttcctgagaaggtatgaaggtgggtattccaccctacctgaattataggaatttcagatatctgtgagcagctgcaaaggggattttactagatgacatcctgctgggcacactttacgccagtcctgaatgtgtaatagaaatctgcagtttaatgacactgaactaaagaaccagaaaatagaggggtgtattagtgaactacagaaaattcaagtcccaaaagctgtaaatactctgaggaccaaagaaaatatatacgttgttcagatttgccctgaggggtgtatttgatatagtgtttgcaacaaattcgacccaggtgatcaaaatgattctcaactcttctactgaagatggtattaaaagaatccaagatgattgtcccaaagctggaaggcataattacatatttgtcatgattcctactttatacagtatcatctttgtggtgggaatatttggaaacagcttggtggtgatagtcatttacttttatatgaagctgaagactgtggccagtgtttttcttttgaatttagcactggctgacttatgctttttactgactttgccactatgggctgtctacacagctatggaataccgctggccctttggcaattacctatgtaagattgcttcagccagcgtcagtttcaacctgtacgctagtgtgtttctactcacgtgtctcagcattgatcgatacctggctattgttcacccaatgaagtcccgccttcgacgcacaatgcttgtagccaaagtcacctgcatcatcatttggctgctggcaggcttggccagtttgccagctataatccatcgaaatgtatttttcattgagaacaccaatattacagtttgtgctttccattatgagtcccaaaattcaaccctcccgatagggctgggcctgaccaaaaatatactgggtttcctgtttccttttctgatcattcttacaagttatactcttatttggaaggccctaaagaaggcttatgaaattcagaagaacaaaccaagaaatgatgatatttttaagataattatggcaattgtgcttttctttttcttttcctggattccccaccaaatattcacttttctggatgtattgattcaactaggcatcatacgtgactgtagaattgcagatattgtggacacggccatgcctatcaccatttgtatagcttattttaacaattgcctgaatcctcttttttatggctttctggggaaaaaatttaaaagatattttctccagcttctaaaatatattcccccaaaagccaaatcccactcaaacctttcaacaaaaatgagcacgctttcctaccgcccctcagataatgtaagctcatccaccaagaagcctgcaccatgttttgaggttgagtgacatgttcgaaacctgtccataaagtaattttgtgaaagaaggagcaagagaacattcctctgcagcacttcactaccaaatgagcattagctacttttcagaattgaaggagaaaatgcattatgtggactg

SEQ ID NO: 1945 - DNA, 1669 bp, Homo sapiens
  source 1..1669: mol_type = unassigned DNA
gttttgcaccaaactggacacatgcttgctacttcatcatcctcatcgtgaacattattattattatcatcattttccagatgaagaaaatgaatcacaagtcaactgacagtccaaaggctccacagctcagaggaggtaaatcatgtgcttaattcagaacttttggctcccatcactatgctcttcccactgtcttaactctggttgtcacctgagccattgtgtttcttctcaggtagatcttagttcttcctgagaaggtatgaaggtgggtattccaccctacctgaattataggaatttcagatatctgtgagcagctgcaaaggggattttactagatgacatcctgctgggcacactttacgccagtcctgaatgtgtaatagaaatctgcagtttaatgagtgtatttgatatagtgtttgcaacaaattcgacccaggtgatcaaaatgattctcaactcttctactgaagatggtattaaaagaatccaagatgattgtcccaaagctggaaggcataattacatatttgtcatgattcctactttatacagtatcatctttgtggtgggaatatttggaaacagcttggtggtgatagtcatttacttttatatgaagctgaagactgtggccagtgtttttcttttgaatttagcactggctgacttatgctttttactgactttgccactatgggctgtctacacagctatggaataccgctggccctttggcaattacctatgtaagattgcttcagccagcgtcagtttcaacctgtacgctagtgtgtttctactcacgtgtctcagcattgatcgatacctggctattgttcacccaatgaagtcccgccttcgacgcacaatgcttgtagccaaagtcacctgcatcatcatttggctgctggcaggcttggccagtttgccagctataatccatcgaaatgtatttttcattgagaacaccaatattacagtttgtgctttccattatgagtcccaaaattcaaccctcccgatagggctgggcctgaccaaaaatatactgggtttcctgtttccttttctgatcattcttacaagttatactcttatttggaaggccctaaagaaggcttatgaaattcagaagaacaaaccaagaaatgatgatatttttaagataattatggcaattgtgcttttctttttcttttcctggattccccaccaaatattcacttttctggatgtattgattcaactaggcatcatacgtgactgtagaattgcagatattgtggacacggccatgcctatcaccatttgtatagcttattttaacaattgcctgaatcctcttttttatggctttctggggaaaaaatttaaaagatattttctccagcttctaaaatatattcccccaaaagccaaatcccactcaaacctttcaacaaaaatgagcacgctttcctaccgcccctcagataatgtaagctcatccaccaagaagcctgcaccatgttttgaggttgagtgacatgttcgaaacctgtccataaagtaattttgtgaaagaaggagcaagagaacattcctctgcagcacttcactaccaaatgagcattagctacttttcagaattgaaggagaaaatgcattatgtggactg

SEQ ID NO: 1946 - DNA, 2359 bp, Homo sapiens
  source 1..2359: mol_type = unassigned DNA
cgggagggtctcccggggcggggcggaggaggagggaatgcaaaacagagcctcgtccccggaacccaagaagcagcaacgcccctcactataaattcggagctgcctcctcgccaatgattccagcgcctgacagccaggaccccaggcagcagcgagtgacaggacgtctggaccggcgcgccgctagcagctctgccgggccgcggcggtgatcgatggggagcggctggagcggacccagcgagtgagggcgcacagccgggacgccgaggcggcgggcgggagacccgcaccagcgcagccggccctcggcgggacgtgacgcagcgcccggggcgcgggtgtatttgatatagtgtttgcaacaaattcgacccaggtgatcaaaatgattctcaactcttctactgaagatggtattaaaagaatccaagatgattgtcccaaagctggaaggcataattacatatttgtcatgattcctactttatacagtatcatctttgtggtgggaatatttggaaacagcttggtggtgatagtcatttacttttatatgaagctgaagactgtggccagtgtttttcttttgaatttagcactggctgacttatgctttttactgactttgccactatgggctgtctacacagctatggaataccgctggccctttggcaattacctatgtaagattgcttcagccagcgtcagtttcaacctgtacgctagtgtgtttctactcacgtgtctcagcattgatcgatacctggctattgttcacccaatgaagtcccgccttcgacgcacaatgcttgtagccaaagtcacctgcatcatcatttggctgctggcaggcttggccagtttgccagctataatccatcgaaatgtatttttcattgagaacaccaatattacagtttgtgctttccattatgagtcccaaaattcaaccctcccgatagggctgggcctgaccaaaaatatactgggtttcctgtttccttttctgatcattcttacaagttatactcttatttggaaggccctaaagaaggcttatgaaattcagaagaacaaaccaagaaatgatgatatttttaagataattatggcaattgtgcttttctttttcttttcctggattccccaccaaatattcacttttctggatgtattgattcaactaggcatcatacgtgactgtagaattgcagatattgtggacacggccatgcctatcaccatttgtatagcttattttaacaattgcctgaatcctcttttttatggctttctggggaaaaaatttaaaagatattttctccagcttctaaaatatattcccccaaaagccaaatcccactcaaacctttcaacaaaaatgagcacgctttcctaccgcccctcagataatgtaagctcatccaccaagaagcctgcaccatgttttgaggttgagtgacatgttcgaaacctgtccataaagtaattttgtgaaagaaggagcaagagaacattcctctgcagcacttcactaccaaatgagcattagctacttttcagaattgaaggagaaaatgcattatgtggactgaaccgacttttctaaagctctgaacaaaagcttttctttccttttgcaacaagacaaagcaaagccacattttgcattagacagatgacggctgctcgaagaacaatgtcagaaactcgatgaatgtgttgatttgagaaattttactgacagaaatgcaatctccctagcctgcttttgtcctgttattttttatttccacataaaggtatttagaatatattaaatcgttagaggagcaacaggagatgagagttccagattgttctgtccagtttccaaagggcagtaaagttttcgtgccggttttcagctattagcaactgtgctacacttgcacctggtactgcacattttgtacaaagatatgctaagcagtagtcgtcaagttgcagatctttttgtgaaattcaacctgtgtcttataggtttccactgccaaaacaatgcccgtaagatggcttatttgtataatggtgttactaaagtcacatataaaagttaaactacttgtaaaggtgctgcactggtcccaagtagtagtgtcttcctagtatattagtttgatttaatatctgagaagtgtatatagtttgtggtaaaaagattatatatcataaagtatgccttcctgtttaaaaaaagtatatattctacacatatatgtatatgtatatctatatctctaaactgctgttaattgattaaaatctggcaaagttatatttactttaaaataaaataattttattgcaa

SEQ ID NO: 1947 - DNA, 2412 bp, Homo sapiens
  source 1..2412: mol_type = unassigned DNA
actataaattcggagctgcctcctcgccaatgattccagcgcctgacagccaggaccccaggcagcagcgagtgacaggacgtctggaccggcgcgccgctagcagctctgccgggccgcggcggtgatcgatggggagcggctggagcggacccagcgagtgagggcgcacagccgggacgccgaggcggcgggcgggagacccgcaccagcgcagccggccctcggcgggacgtgacgcagcgcccggggcgcgggtttgatatttgacaaattgatctaaaatggctgggtttttatctgaataactcactgatgccatcccagaaagtcggcaccagatgaagaaaatgaatcacaagtcaactgacagtccaaaggctccacagctcagaggaggtgtatttgatatagtgtttgcaacaaattcgacccaggtgatcaaaatgattctcaactcttctactgaagatggtattaaaagaatccaagatgattgtcccaaagctggaaggcataattacatatttgtcatgattcctactttatacagtatcatctttgtggtgggaatatttggaaacagcttggtggtgatagtcatttacttttatatgaagctgaagactgtggccagtgtttttcttttgaatttagcactggctgacttatgctttttactgactttgccactatgggctgtctacacagctatggaataccgctggccctttggcaattacctatgtaagattgcttcagccagcgtcagtttcaacctgtacgctagtgtgtttctactcacgtgtctcagcattgatcgatacctggctattgttcacccaatgaagtcccgccttcgacgcacaatgcttgtagccaaagtcacctgcatcatcatttggctgctggcaggcttggccagtttgccagctataatccatcgaaatgtatttttcattgagaacaccaatattacagtttgtgctttccattatgagtcccaaaattcaaccctcccgatagggctgggcctgaccaaaaatatactgggtttcctgtttccttttctgatcattcttacaagttatactcttatttggaaggccctaaagaaggcttatgaaattcagaagaacaaaccaagaaatgatgatatttttaagataattatggcaattgtgcttttctttttcttttcctggattccccaccaaatattcacttttctggatgtattgattcaactaggcatcatacgtgactgtagaattgcagatattgtggacacggccatgcctatcaccatttgtatagcttattttaacaattgcctgaatcctcttttttatggctttctggggaaaaaatttaaaagatattttctccagcttctaaaatatattcccccaaaagccaaatcccactcaaacctttcaacaaaaatgagcacgctttcctaccgcccctcagataatgtaagctcatccaccaagaagcctgcaccatgttttgaggttgagtgacatgttcgaaacctgtccataaagtaattttgtgaaagaaggagcaagagaacattcctctgcagcacttcactaccaaatgagcattagctacttttcagaattgaaggagaaaatgcattatgtggactgaaccgacttttctaaagctctgaacaaaagcttttctttccttttgcaacaagacaaagcaaagccacattttgcattagacagatgacggctgctcgaagaacaatgtcagaaactcgatgaatgtgttgatttgagaaattttactgacagaaatgcaatctccctagcctgcttttgtcctgttattttttatttccacataaaggtatttagaatatattaaatcgttagaggagcaacaggagatgagagttccagattgttctgtccagtttccaaagggcagtaaagttttcgtgccggttttcagctattagcaactgtgctacacttgcacctggtactgcacattttgtacaaagatatgctaagcagtagtcgtcaagttgcagatctttttgtgaaattcaacctgtgtcttataggtttccactgccaaaacaatgcccgtaagatggcttatttgtataatggtgttactaaagtcacatataaaagttaaactacttgtaaaggtgctgcactggtcccaagtagtagtgtcttcctagtatattagtttgatttaatatctgagaagtgtatatagtttgtggtaaaaagattatatatcataaagtatgccttcctgtttaaaaaaagtatatattctacacatatatgtatatgtatatctatatctctaaactgctgttaattgattaaaatctggcaaagttatatttactttaaaataaaataattttattgc

SEQ ID NO: 1948 - DNA, 2882 bp, Homo sapiens
  source 1..2882: mol_type = unassigned DNA
agaaggaaaccagagatctggtgctattacgtcccagcgtctgagagaacgagtaagcacagaattcaaagcattctgcagcctgaattttgaaggagtgtgtttaggcactaagcaagctgatttatgataactgctttaaacttcaacaaccaaaggcataagaactaggagctgctgacatttcaatatgaagggcaactccacccttgccactactagcaaaaacattaccagcggtcttcacttcgggcttgtgaacatctctggcaacaatgagtctaccttgaactgttcacagaaaccatcagataagcatttagatgcaattcctattctttactacattatatttgtaattggatttctggtcaatattgtcgtggttacactgttttgttgtcaaaagggtcctaaaaaggtttctagcatatacatcttcaacctcgctgtggctgatttactccttttggctactcttcctctatgggcaacctattattcttatagatatgactggctctttggacctgtgatgtgcaaagtttttggttcttttcttaccctgaacatgtttgcaagcattttttttatcacctgcatgagtgttgataggtaccaatctgtcatctacccctttctgtctcaaagaagaaatccctggcaagcatcttatatagttccccttgtttggtgtatggcctgtttgtcctcattgccaacattttattttcgagacgtcagaaccattgaatacttaggagtgaatgcttgcattatggctttcccacctgagaaatatgcccaatggtcagctgggattgccttaatgaaaaatatccttggttttattatccctttaatattcatagcaacatgctattttggaattagaaaacacttactgaagacgaatagctatgggaagaacaggataacccgtgaccaagtcctgaagatggcagctgctgttgttctggccttcatcatttgctggcttcccttccatgttctgaccttcctggatgctctggcctggatgggtgtcattaatagctgcgaagttatagcagtcattgacctggcacttccttttgccatcctcttgggattcaccaacagctgcgttaatccgtttctgtattgttttgttggaaaccggttccaacagaagctccgcagtgtgtttagggttccaattacttggctccaagggaaaagagagagtatgtcttgccggaaaagcagttctcttagagaaatggagacctttgtgtcttaaacgtgagagcaaaatgcatgtaatcaacatggctacttgctttgaggctcaccagaattatttttaagtggttttaataaaataataaaatttcccctaatcttttctgaatcttctgaaaccaaatgtaactatgttttatcgtccagtgactttcaggaattgcccattgtttttctgatatgtttgtacaagattgtcattagtgagacatatttacaacctagaagtaactggtgatatatctcaaattgtaattaataatagattgtgaataatgatttggggattcagatttctctttgaaacatgcttgtgtttcttagtggggttttatatccatttttatcaggatttcctcttgaaccagaaccagtctttcaactcattgcatcatttacaagacaacattgtaagagagatgagcacttctaagttgagtatattataatagattagtactggattattcaggctttaggcatatgcttctttaaaaaagctataaattatattcctcttgcatttcacttgagtggaggtttatagttaatctataactacatattgaatagggctaggaatatagattaaatcatactcctatgctttagcttatttttacagttatagaaagcaagatgtactataacatagaattgcaatctataatatttgtgtgttcactaaactctgaataagcactttttaaaaaactttctactcattttaatgattgtttaaaggtttctattttctctgatacttttttgaaatcagtaaacactgtgtattgttgtaaaatgtaaaggtcacttttcacatccttgactttttagatgtgctgctttgatatataggacattgatttgatttttattattaatgctttggttctgggttgtttcctaaaatatctgggtggcttaaaaaaaactctttaacttgtaataaacccttaactggcataggaaatggtatccagaatggaattttgctacatggggtctgggtgggggcaaagagacccagtcaattacatgtttggtaccaagaaaggaacctgtcagggcagtacaatgtgactttgaaaatatataccgtgggggtagttttaccctatatctataaacactgtttgttccagaatctgtatgattctatggagctattttaaaccaattgcaggtctagatacctccttctcagcactattaaagctcctaagttagaggagtgcctaaaactgagttacctaaagtttacttacattaaagtatgaatattaattttagaaatttgagactttattctgtaccagccctgtataataacaggttatctaggaccttcctctgaggtaggtctaaatactgatctctgaggcggaactaacgttttggggactcagcatctctgccaggttccaggattatagacagaagagtcctgtcataccactttctggaaaagtcctaatttcatgtaatccttttattttcaataaaaacaaatagctaaatgtataaccaactatgatgttatgttttcaataattttgtaaaacagctcatataaataaaatttttaattggaagaa

SEQ ID NO: 1949 - DNA, 2291 bp, Homo sapiens
  source 1..2291: mol_type = unassigned DNA
aagacttcctggaagaggtcccagcgtgagtgtcgcttctggcatctgtccttctggccagcctgtggtctggccaagtgatgtaaccctcctctccagcctgtgcacaggcagcctgggaacagctccatccccacccctcagctataaatagggcatcgtgacccggccgggggaagaagctgccgttgttctgggtactacagcagaagggtatgcggaagcgagcaccccagtctgagatggctcctgccggtgtgagcctgagggccaccatcctctgcctcctggcctgggctggcctggctgcaggtgaccgggtgtacatacaccccttccacctcgtcatccacaatgagagtacctgtgagcagctggcaaaggccaatgccgggaagcccaaagaccccaccttcatacctgctccaattcaggccaagacatcccctgtggatgaaaaggccctacaggaccagctggtgctagtcgctgcaaaacttgacaccgaagacaagttgagggccgcaatggtcgggatgctggccaacttcttgggcttccgtatatatggcatgcacagtgagctatggggcgtggtccatggggccaccgtcctctccccaacggctgtctttggcaccctggcctctctctatctgggagccttggaccacacagctgacaggctacaggcaatcctgggtgttccttggaaggacaagaactgcacctcccggctggatgcgcacaaggtcctgtctgccctgcaggctgtacagggcctgctagtggcccagggcagggctgatagccaggcccagctgctgctgtccacggtggtgggcgtgttcacagccccaggcctgcacctgaagcagccgtttgtgcagggcctggctctctatacccctgtggtcctcccacgctctctggacttcacagaactggatgttgctgctgagaagattgacaggttcatgcaggctgtgacaggatggaagactggctgctccctgatgggagccagtgtggacagcaccctggctttcaacacctacgtccacttccaagggaagatgaagggcttctccctgctggccgagccccaggagttctgggtggacaacagcacctcagtgtctgttcccatgctctctggcatgggcaccttccagcactggagtgacatccaggacaacttctcggtgactcaagtgcccttcactgagagcgcctgcctgctgctgatccagcctcactatgcctctgacctggacaaggtggagggtctcactttccagcaaaactccctcaactggatgaagaaactatctccccggaccatccacctgaccatgccccaactggtgctgcaaggatcttatgacctgcaggacctgctcgcccaggctgagctgcccgccattctgcacaccgagctgaacctgcaaaaattgagcaatgaccgcatcagggtgggggaggtgctgaacagcattttttttgagcttgaagcggatgagagagagcccacagagtctacccaacagcttaacaagcctgaggtcttggaggtgaccctgaaccgcccattcctgtttgctgtgtatgatcaaagcgccactgccctgcacttcctgggccgcgtggccaacccgctgagcacagcatgaggccagggccccagaacacagtgcctggcaaggcctctgcccctggcctttgaggcaaaggccagcagcagataacaaccccggacaaatcagcgatgtgtcacccccagtctcccaccttttcttctaatgagtcgactttgagctggaaagcagccgtttctccttggtctaagtgtgctgcatggagtgagcagtagaagcctgcagcggcacaaatgcacctcccagtttgctgggtttattttagagaatgggggtggggaggcaagaaccagtgtttagcgcgggactactgttccaaaaagaattccaaccgaccagcttgtttgtgaaacaaaaaagtgttcccttttcaagttgagaacaaaaattgggttttaaaattaaagtatacatttttgcattgccttcggtttgtatttagtgtcttgaatgtaagaacatgacctccgtgtagtgtctgtaataccttagttttttccacagatgcttgtgatttttgaacaatacgtgaaagatgcaagcacctgaatttctgtttgaatgcggaaccatagctggttatttctcccttgtgttagtaataaacgtcttgccacaataagcctccaaaaa

SEQ ID NO: 1950 - DNA, 1691 bp, Homo sapiens
  source 1..1691: mol_type = unassigned DNA
aagaagctgccgttgttctgggtactacagcagaagggtatgcggaagcgagcaccccagtctgagatggctcctgccggtgtgagcctgagggccaccatcctctgcctcctggcctgggctggcctggctgcaggtgaccgggtgtacatacaccccttccacctcgtcatccacaatgagagtacctgtgagcagctggcaaaggccaatgccgggaagcccaaagaccccaccttcatacctgctccaattcaggccaagacatcccctgtggatgaaaaggccctacaggaccagctggtgctagtcgctgcaaaacttgacaccgaagacaagttgagggccgcaatggtcgggatgctggccaacttcttgggcttccgtatatatggcatgcacagtgagctatggggcgtggtccatggggccaccgtcctctccccaacggctgtctttggcaccctggcctctctctatctgggagccttggaccacacagctgacaggctacaggcaatcctggatgttgctgctgagaagattgacaggttcatgcaggctgtgacaggatggaagactggctgctccctgatgggagccagtgtggacagcaccctggctttcaacacctacgtccacttccaagggaagatgaagggcttctccctgctggccgagccccaggagttctgggtggacaacagcacctcagtgtctgttcccatgctctctggcatgggcaccttccagcactggagtgacatccaggacaacttctcggtgactcaagtgcccttcactgagagcgcctgcctgctgctgatccagcctcactatgcctctgacctggacaaggtggagggtctcactttccagcaaaactccctcaactggatgaagaaactatctccccggaccatccacctgaccatgccccaactggtgctgcaaggatcttatgacctgcaggacctgctcgcccaggctgagctgcccgccattctgcacaccgagctgaacctgcaaaaattgagcaatgaccgcatcagggtgggggaggtgctgaacagcattttttttgagcttgaagcggatgagagagagcccacagagtctacccaacagcttaacaagcctgaggtcttggaggtgaccctgaaccgcccattcctgtttgctgtgtatgatcaaagcgccactgccctgcacttcctgggccgcgtggccaacccgctgagcacagcatgaggccagggccccagaacacagtgcctggcaaggcctctgcccctggcctttgaggcaaaggccagcagcagataacaaccccggacaaatcagcgatgtgtcacccccagtctcccaccttttcttctaatgagtcgactttgagctggaaagcagccgtttctccttggtctaagtgtgctgcatggagtgagcagtagaagcctgcagcggcacaaatgcacctcccagtttgctgggtttattttagagaatgggggtggggaggcaagaaccagtgtttagcgcgggactactgttccaaaaagaattccaaccgaccagcttgtttgtgaaacaaaaaagtgttcccttttcaagttgagaacaaaaattgggttttaaaattaaagtatacatttttgcattgccttcggtttgtatttagtgtcttgaatgta

SEQ ID NO: 1951 - DNA, 8203 bp, Homo sapiens
  source 1..8203: mol_type = unassigned DNA
agagcgcttataatggagccgctgtcagcagaaccttctgccgccgccgccgccgccgccgtccctcctcttttttttcccggcagatctttgttgtgtgggagggcagcagggatggacttgagcttgcggatcccctgctagagcagccgcgctcggagaaggcgccgcagccgcgaggaggagccgccgccgccgcgcccgaggccccgccgcccgcggcctctgtcggcccgcgccccgctcgccccgtcgccccgtcgcccctcgcctccccgcagagtcccctcgcggcagcagatgtgtgtggggtcagcccacggcggggactatggtgaaattcccggcgctcacgcactactggcccctgatccggttcttggtgcccctgggcatcaccaacatagccatcgacttcggggagcaggccttgaaccggggcattgctgctgtcaaggaggatgcagtcgagatgctggccagctacgggctggcgtactccctcatgaagttcttcacgggtcccatgagtgacttcaaaaatgtgggcctggtgtttgtgaacagcaagagagacaggaccaaagccgtcctgtgtatggtggtggcaggggccatcgctgccgtctttcacacactgatagcttatagtgatttaggatactacattatcaataaactgcaccatgtggacgagtcggtggggagcaagacgagaagggccttcctgtacctcgccgcctttcctttcatggacgcaatggcatggacccatgctggcattctcttaaaacacaaatacagtttcctggtgggatgtgcctcaatctcagatgtcatagctcaggttgtttttgtagccattttgcttcacagtcacctggaatgccgggagcccctgctcatcccgatcctctccttgtacatgggcgcacttgtgcgctgcaccaccctgtgcctgggctactacaagaacattcacgacatcatccctgacagaagtggcccggagctggggggagatgcaacaataagaaagatgctgagcttctggtggcctttggctctaattctggccacacagagaatcagtcggcctattgtcaacctctttgtttcccgggaccttggtggcagttctgcagccacagaggcagtggcgattttgacagccacataccctgtgggtcacatgccatacggctggttgacggaaatccgtgctgtgtatcctgctttcgacaagaataaccccagcaacaaactggtgagcacgagcaacacagtcacggcagcccacatcaagaagttcaccttcgtctgcatggctctgtcactcacgctctgtttcgtgatgttttggacacccaacgtgtctgagaaaatcttgatagacatcatcggagtggactttgcctttgcagaactctgtgttgttcctttgcggatcttctccttcttcccagttccagtcacagtgagggcgcatctcaccgggtggctgatgacactgaagaaaaccttcgtccttgcccccagctctgtgctgcggatcatcgtcctcatcgccagcctcgtggtcctaccctacctgggggtgcacggtgcgaccctgggcgtgggctccctcctggcgggctttgtgggagaatccaccatggtcgccatcgctgcgtgctatgtctaccggaagcagaaaaagaagatggagaatgagtcggccacggagggggaagactctgccatgacagacatgcctccgacagaggaggtgacagacatcgtggaaatgagagaggagaatgaataaggcacgggacgccatgggcactgcagggacagtcagtcaggatgacacttcggcatcatctcttccctctcccatcgtattttgttcccttttttttgttttgttttggtaatgaaagaggccttgatttaaaggtttcgtgtcaattctctagcatactgggtatgctcacactgacggggggacctagtgaatggtctttactgttgctatgtaaaaacaaacgaaacaactgacttcatacccctgcctcacgaaaacccaaaagacacagctgcctcacggttgacgttgtgtcctcctcccctggacaatctcctcttggaaccaaaggactgcagctgtgccatcgcgcctcggtcaccctgcacagcaggccacagactctcctgtcccccttcatcgctcttaagaatcaacaggttaaaactcggcttcctttgatttgcttcccagtcacatggccgtacaaagagatggagccccggtggcctcttaaatttcccttccgccacggagttcgaaaccatctactccacacatgcaggaggcgggtggcacgctgcagcccggagtccccgttcacactgaggaacggagacctgtgaccacagcaggctgacagatggacagaatctcccgtagaaaggtttggtttgaaatgccccgggggcagcaaactgacatggttgaatgatagcatttcactctgcgttctcctagatctgagcaagctgtcagttctcacccccaccgtgtatatacatgagctaacttttttaaattgtcacaaaagcgcatctccagattccagaccctgccgcatgacttttcctgaaggcttgcttttccctcgcctttcctgaaggtcgcattagagcgagtcacatggagcatcctaactttgcattttagtttttacagtgaactgaagctttaagtctcatccagcattctaatgccaggttgctgtagggtaacttttgaagtagatatattacctggttctgctatccttagtcataactctgcggtacaggtaattgagaatgtactacggtacttccctcccacaccatacgataaagcaagacattttataacgataccagagtcactatgtggtcctccctgaaataacgcattcgaaatccatgcagtgcagtatatttttctaagttttggaaagcaggttttttcctttaaaaaaattatagacacggttcactaaattgatttagtcagaattcctagactgaaagaacctaaaaaaaaaaatattttaaagatataaatatatgctgtatatgttatgtaatttattttaggctataatacatttcctattttcgcattttcaataaaatgtctctaatacaatacggtgattgcttgtgtgctcaacatacctgcagttgaaacgtattgtatcaatgaacattgtaccttattggcagcagttttataaagtccgtcatttgcatttgaatgtaaggctcagtaaatgacagaactatttttcattatgggtaactggggaataaatgggtcactggagtaggaatagaagtgcaagctggaaaggcaaaaatgagaaagaaaaaggcaggccctttgtgtctaccgttttcagtgctgtgtgatcatattgttcctcacagcaaaaaagaatgcaagggcataatgttagctgtgaacatgccagggttgcattcacattcctgggtacccagtgctgatggggtgtgcccacgtggggacatgtccttggcgtgcttcctcagagtggcttttcctccattaatacatatatgagtactgaaaaattaagttgcatagctgctttgcagtggtttcagaggcagatctgagaagattaaaaaaaaatctcaatgtatcagctttttttaaaggacattactagaaaattaaacagtattttttaacatgtgtgactttcatgcttctggggttggagcttaaagatccaaactgagaaagcaggccgggcatggtggctcatgcctgtaatcccaacactttgggaggccaaggagggtggatcacttaaggtcaggagtttgagaccagcctggccaacatggcaaaaccctgtctctactaaaaacataaaaattagctgggggtggtagcacatacctgtaatcccagctactcaggaggctgaggcaggagaatttgcttgatcctgggaggcagaggttgtagtgagccgagatcgcgccatcgcactccagcctgggtgacaagagcaaaactccatctcaaaaaaaaaaaaaatcctttccctctaaatccaggaaggatcagcaagggcctcctcattatgagatgaggaaatacaactccagagattccttcagtgatcaagatcagtgggccataatatttggttagagtttctgagaacacaggaagcaatgccacactcaggccaccacaatggagctgatttggcaggacttgttcaaacctttcaccttaaagcacgtgatccttcttcgtacattttcttcacttgggctgcttaagtcacagcctaacaactttgaggcaaaactgagaactggcatattctcctgcgtttcttctaatcgagtcccatcatccagctagacatgagagatcaaaccagggagggtgacctttctccttcccacttttcagagtcattggggcaactttttgacttttgtgaccaaagaaacattcccccaaaacatttatttttcattgtagggcattcagctgacagctgcattttagaaagttaccatgcctgtgagattctcatgtcaaagaccagggaaagaccaggtgtgactttctccaaaactgagtgattgcttgtggatgaatacaatctaaaaatacaaggccatgaagtagtttttcatttagatgctgagaaataataggtttgggcagctcaaagcataggaaatagtaagggttttctagagctcctcctttggtggcctgtttgagtagcacaagggacgtcatcctaaatgtgcagttgccatttgttctgtagtgacttacagggatctcagtggcaaagggcgtcagtgagacaacaactgagcaaaaagaactagacgaggcttgcgcttggaaagtcacggtaggattggacctgccggccacatggctcagggagtattgacggatttgcacattggcaggaaactctcccgtttgggattctttaaatggggcacagaaggccacttgtttgcatttctgggtaaaaaacagtcatcccccatgactgcctgcatcgggtttgtcttgtgccaaagttactcttcctttgtttttactttgccttgatttttagcattagctggtagtttggcttggaaatgtcctggatagccgattccctaagaaactgaaacatttaatattggcttaggatgtatcagatggggccaaataaagcttctttacaatagtaaaagcactttatacttcactctctgagtcttcccaataaataaccttgggaggtgcagggggtggggggcccaggatggggaggcctgggagctcccagggtagtgacagagttgggctgagttctccagacgccaggatgcgtcgcagcggggccagctcaggagtgctcactcccagccctctggatctctctcctggttggaataatcattacatatcgtaactctcaaaatttattcacttatattttcagaataagaagtgtgaaatgttaacagctctctgctctcttacttgttccccatttggggatcttctggagggaaggggcagggggagagtaacttttctatatccttggtttctaggaacacatcgatttgaagactcagtagctgactggtttttttttttcccccttcaaactgaagtgcgagtgtgcgtgtgttccacaaaatagcaagtatttatagtgttgtaattacatttccttgagaaatattttcttgtatttaaaaatctttctacttcagtaactcccagcagaacagtgcccaggacagcatgtgccggttagtaccagctttgcaggtgagctgacttctaaacttaggacgacgtcttcatcaatcaaactagtgcacagtccagaaaaaggggtcctttatcttctaagttctgctcctcacctttctttggaaccaaaattgcagtggagtgtgaggaagagctttgaaagacgtggagtgttgagatgtctgcattgcacattcagccggttcaaagccagcagctcctgcctgcattctgtagacatcgccctcacacacagtcctctgatggctctcatataaagcactcaaaccgtaggaaagcatgtttttgagcaacgtgtctgggatactcctctgtgtggttattttgaatctctatttctgtcattgaagcagcaaaaaacatcatgtgactcatcaactgatctaatcacacttaaaacaggatgtagagaaaaatctgatgagaaacgtaaaagggcctgttgcctgcccttttaaaggcaaaatgtctaaaatcatgcaaatgttcaaaatgagagaaattgcattgtggaatcaaaataacccaaactccactcagaaaagtcacaaatatatagtatactatctgatctcaaaagggaaaaacgagatgataagaccttaagtttagactttattttcttctcaagagtggacattaaatctattaacttgcaactttctgctgggaagagcatcaaaggtgggcctcctaaatcatttttgaaaaacctctgtcaagtccaagtggttccaggagaattatagccagtatcttttaaaatatttcattttagtgataatgtttttctctgcttcatttgcaatcaaccaggatctctaaaagactgcataagatatatgcacttttataggtggctgtcagctacacatagattcagcaaattttttttatatagtacctgtttttaagttaggctacataacttaaagtgcactttactaacaagacttgacattagcgtctacaatatgtatatgtaaacaaaagcacacaagaactaggcaccctttctctctccaagagtttaagtggtttccttaggttaaagaaggggacagaccagctaaaaatggttgtaccactcactgtacaacctcatggaaattctcactataagatttagaggcaatgttccctagctataagccagggcaagaaatggcgcctctggagttggggaacattaggggaacattacaaccgggtagatgctggttccctgaagtgtggggccatgaacatgcagggacccacggtttgaatgaaacagctactgaaagctaagttcaaaccacccttgcgtaacaaaggagtacagggtacacatcaacaccaatcacccagcaccccacagcgatggtcatgtcaccgtgcagcaggtcccttaccccagggctgccacatccacaagccttgcagtggcaaatacgctgctccttggatttaatgagatattttggttgcttaatgatgtactgatcagggaactgtctaaagctagtagggccaaggagttaatcaaagggcttcgggaaagtggacaagagccacacacgtgattctgttccatgccgacactcattcatttaagaagtgtattcaagctggaggcttccatatcactcacgcttcttggcctcaccttgctcatctgtccaatgggaggcttgagccattattgctaaggccccttcctgatctaacattctgtttatgatctaggatttagaacgtcgtatgagatcctacaatggaagaataaaatcacctcattcttcatttcagatctgaacattagcagtgatctagatttttttttttttaaacaaaattaagtgtgcttagagtcattcctctacatgggctgtggctgtcagcccataggtttgtcagtttcacatcaaaactgtgggtataaactgttgaaaccaatcacattaaaatatttagctgggcacagtggtgtgcatctgtagtcccagctacttgggaggctgaggcaggaggatcgcttaagcacaggagttggaatccagcctgagcaacagagcaaaaccccgtctctaaaatacaaataaaatatttgtgtagtttttgattaaaattgactacagcggtcagtataaaatacatgtcgcttttaaggaagtgctctttatgtatctaacagatggaagtttttgcattggtaagagcatttatatatgctttgtttcagggtttatggatttgtattcatatattgtcaaataggtttcatactctaattttactttaagtaaagcttaaacacttggcatacaa

SEQ ID NO: 1952 - DNA, 1722 bp, Homo sapiens
  source 1..1722: mol_type = unassigned DNA
gtcacctggaatgccgggagcccctgctcatcccgatcctctccttgtacatgggcgcacttgtgcgctgcaccaccctgtgcctgggctactacaagaacattcacgacatcatccctgacagaagtggcccggagctggggggagatgcaacaataagaaagatgctgagcttctggtggcctttggctctaattctggccacacagagaatcagtcggcctattgtcaacctctttgtttcccgggaccttggtggcagttctgcagccacagaggcagtggcgattttgacagccacataccctgtgggtcacatgccatacggctggttgacggaaatccgtgctgtgtatcctgctttcgacaagaataaccccagcaacaaactggtgagcacgagcaacacagtcacggcagcccacatcaagaagttcaccttcgtctgcatggctctgtcactcacgctctgtttcgtgatgttttggacacccaacgtgtctgagaaaatcttgatagacatcatcggagtggactttgcctttgcagaactctgtgttgttcctttgcggatcttctccttcttcccagttccagtcacagtgagggcgcatctcaccgggtggctgatgacactgaagaaaaccttcgtccttgcccccagctctgtgctgcggatcatcgtcctcatcgccagcctcgtggtcctaccctacctgggggtgcacggtgcgaccctgggcgtgggctccctcctggcgggctttgtgggagaatccaccatggtcgccatcgctgcgtgctatgtctaccggaagcagaaaaagaagatggagaatgagtcggccacggagggggaagactctgccatgacagacatgcctccgacagaggaggtgacagacatcgtggaaatgagagaggagaatgaataaggcacgggacgccatgggcactgcagggacagtcagtcaggatgacacttcggcatcatctcttccctctcccatcgtattttgttcccttttttttgttttgttttggtaatgaaagaggccttgatttaaaggtttcgtgtcaattctctagcatactgggtatgccccttcctgatctaacattctgtttatgatctaggatttagaacgtcgtatgagatcctacaatggaagaataaaatcacctcattcttcatttcagatctgaacattagcagtgatctagatttttttttttttaaacaaaattaagtgtgcttagagtcattcctctacatgggctgtggctgtcagcccataggtttgtcagtttcacatcaaaactgtgggtataaactgttgaaaccaatcacattaaaatatttagctgggcacagtggtgtgcatctgtagtcccagctacttgggaggctgaggcaggaggatcgcttaagcacaggagttggaatccagcctgagcaacagagcaaaaccccgtctctaaaatacaaataaaatatttgtgtagtttttgattaaaattgactacagcggtcagtataaaatacatgtcgcttttaaggaagtgctctttatgtatctaacagatggaagtttttgcattggtaagagcatttatatatgctttgtttcagggtttatggatttgtattcatatattgtcaaataggtttcatactctaattttactttaagtaaagcttaaacacttggcatacaactg

SEQ ID NO: 1953 - DNA, 1160 bp, Homo sapiens
  source 1..1160: mol_type = unassigned DNA
gtcacccgggccactcagggcagagcctggctgctgggcagaagggcacttgggccgggctgcttcagccgagagggccattcggtgtcctgcccacagagagagaaacagtgagagaccaagagagcaaaccagagagatagggagggggaatgcaaggggtccctgggggactcaggagtcccagtggagaatgagaggcaggccccccgtggtggccggggccctggctgccagaggaccgggctggtgaggaggcgaggatgtggactttcgtcacccagctgttggtcacgctggtgctgctgagcttcttcctggtcagctgtcagaacgtgatgcacattgtcagggggtccctgtgctttgtgctaaagcacatccaccaggagctggacaaggagctgggggagagcgagggcctcagtgacgacgaggagaccatctccaccagggtggtccggcggcgggtcttcctgaaggggaatgagtttcagaatattccaggggagcaggtgacagaggagcaattcacggatgagcagggcaacattgtcaccaagaagatcattcgcaaggtggttcgacagatagacttgtccagcgccgatgccgcccaggagcacgaggaggtgactgtagaggggcccctggaggatcccagtgagctggaggtcgatattgattactttatgaaacactccaaggatcacacctcgacacccaacccctgaaccccacacactctgccatgcacacaggaggagagctggacctgagggccaccgcagcggtgcacacattcctctgggctgacggcatgacctctgtaagggactcctgctagtcccctcttggcatgaatgactgactgtagacgcatgacctccaggcttcaatcctgcctcttgcaatgacagctgatctgtcggaaccaggacacaaaagcagcaagaagcggggagagagagggatagaaaacaagcgcaggagagcctgcgaacgcaaaagtgaatgagggctttttgtggctggggatgggttttggttttggggttttttttttaaattgttttgacttcgtacagggtactttttcccaacctcatctgtcagaaatccatgtgggcttcctggaaagaaaaaaaaaaaaaagaaaa

SEQ ID NO: 1954 - DNA, 6379 bp, Homo sapiens
  source 1..6379: mol_type = unassigned DNA
gggaggcggcgggccctgcccagagcccgtcccgggcgccggcaagcgagctccggccgcggcggcagcgccatcccgggccgcgggcagccgcccctcgccctccgcgtccggaactgccttcgccttcccgcgaccccgcagcagccggccctcggggcgccacgaacgctgtcccctctgtggagcagagacccccttccccttcttagggggtgtcgcctcggggatcgctgagcgctaggggtccaggaggcggggacgggagcgccgtgacccgccatggctcaagcggccaaacagctgaagaaaatcaaagacatcgaggcgcaggccctccaggagcagaaggagaaggaggaatccaacaggaagcggagaaaccgctcccgtgaccgaaagaagaaggccgatgctgctaccagctttctgagagcagcaagatcaggtaacttggacaaagctttggatcacctgcggaatggggtagatattaacacctgtaaccagaatgggttgaatggcttgcatctggcttctaaggaaggccatgtgaaaatggtggttgaacttctgcacaaagaaatcattctagaaacgacaaccaagaaggggaacacggccctgcacatcgctgctctagccgggcaggatgaggtggtccgggagcttgtcaactatggagccaacgtcaacgcccagtcacagaaaggttttacacccctgtacatggcagcacaagagaaccacttggaagtggttaagtttttactggaaaatggagctaaccagaatgtagccacagaagacggcttcacgcctctggcggtagccctgcagcagggccatgagaacgtcgtcgcgcacctcatcaactacggcaccaaggggaaggtgcgcctcccggccctgcacatcgcggcccgcaacgacgacacgcgcacggctgcggtgctgctgcagaacgaccccaacccggacgtgctttccaagacgggattcacgcccctgcacattgcggctcactacgagaacctcaacgtggcccagttgctcctcaacagaggagccagcgtcaatttcacaccacagaacggcatcacgccactgcacatcgcctcccgcaggggcaacgtgatcatggtgcggctgctgctggatcggggagcccagatagaaaccaagaccaaggacgaattgacacctctccactgtgcagctcgaaatgggcacgtgcgaatctcagagatcctgctggaccacggggcaccaatccaagccaaaaccaagaacggcctgtccccaattcacatggcggctcagggagaccacctcgactgtgtccggctcctgttgcaatacgacgcagagatagacgacatcaccctggaccacctgaccccactccacgtggctgcccactgtggacaccacagggtggctaaggtccttctggataaaggggccaaacccaactccagagccctgaatggctttacccccttacacatcgcctgcaaaaagaaccacgtccgtgtcatggagctgctgctgaagacgggagcctcgatcgacgcggtcaccgagtctggcctgacacctctccacgtggcctccttcatggggcaccttcccatcgtgaagaacctcctgcagcggggggcgtcgcccaacgtctccaacgtgaaagtggagaccccgctacacatggcagccagagccgggcacacggaagtggccaaatatttactccagaacaaagccaaagtcaatgccaaggccaaggatgaccagaccccacttcactgtgcagctcgcatcggccacacaaacatggtgaagctcctgctggaaaataacgccaaccccaacctggccaccaccgccgggcacacccccctgcacattgcagcccgtgagggccatgtggaaacagtcctggcccttctggaaaaggaagcatcccaggcctgcatgaccaagaaaggatttacccctctgcacgtggcggccaagtacgggaaggtgcgggtggcagagctgctgctggagcgggacgcacacccgaatgctgccggaaaaaatggcctgacccccctgcacgtggccgtccatcacaacaacctggacatcgtcaagctgctgcttccccggggcggctccccgcacagccctgcctggaatggctacacccctttgcacatcgctgccaagcagaaccaggtggaggtggcccgtagtctgctgcagtatgggggctcagcaaacgccgagtcggtgcaaggtgtgacgccccttcacctggccgcccaggagggccacgcagagatggtggctctgctgctctcgaaacaagccaatggcaacctggggaacaagagcggactcactcccctccatctggtagcacaagaaggccacgttccagtggcagatgtgctgatcaaacacggcgtcatggtggacgccaccacccggatgggctacactcccctccatgtggccagtcactatggaaacatcaagctggtgaagtttctgctgcagcaccaggcagatgtcaatgccaagaccaagctaggatacagccccctgcaccaggcagcccagcagggacacacagacatcgtgactctgcttctgaaaaacggtgcttccccaaacgaggtcagctcggatggaaccacacctctggccatagccaagcgcttgggctacatttctgtcaccgacgtgctcaaggtcgtcacggatgaaaccagtttcgtgttagtcagtgataagcatcgaatgagtttccctgagacagttgatgagatcctggatgtctcggaagatgaaggaactgctcatataactataatgggggaagaactcatcagcttcaaggctgagaggcgggattccagggatgttgatgaagagaaggagctgctggattttgtgccgaagctagaccaagtggtggaatctccagccatccccaggattccctgtgccatgcctgagacagtggtgatcaggtcagaagagcaggagcaggcatctaaagagtatgatgaggactccctcatccccagcagcccggccaccgagacctcagacaacatcagcccggtggccagcccggtgcatacagggtttctggtgagcttcatggttgacgcccggggtggttccatgagaggaagtcgccacaacggcctgcgagtggtgatcccgccacggacgtgcgcagcgcccacccgcatcacctgccgcctggtcaagccccagaagctcagcacgccgcccccactggccgaggaggagggcctggccagcaggatcatagcactggggcccacgggggcacagttcctgagccctgtaatcgtggagatcccgcactttgcctcccatggccgtggagaccgcgagctcgtggttctgaggagcgaaaacggctccgtgtggaaggagcacaggagccgctatggagagagctacctggatcagatcctcaacgggatggacgaagagctggggagcctggaggagctagagaagaagagggtgtgccgaatcatcaccaccgacttcccgctgtacttcgtgatcatgtcacggctctgccaggactacgacaccatcggtcccgaagggggctccctgaagagcaagctggtgcccctggtacaggcaacgttcccggagaatgccgtcaccaagagagtgaagctggctctgcaggcccagcctgtcccggatgagcttgtcactaagctcctgggcaaccaggccacattcagccccattgtcaccgtggagccccggcgccggaagttccaccgccccattgggcttcggatcccactacctccttcctggaccgacaacccgagggacagcggggagggagacaccaccagcctgcgcctgctttgcagcgtcattggaggaacagaccaagcccagtgggaagacataacaggaaccaccaaacttgtatatgccaacgagtgcgccaacttcaccaccaatgtctctgccaggttttggctgtcggactgtcctcggactgctgaggctgtgaactttgccaccctgctgtacaaagagctcactgcagtgccctacatggccaaattcgtcatctttgccaagatgaatgacccccgagaggggcgcctgcgctgctactgcatgacagatgataaagtggacaagaccctggagcagcatgagaacttcgtggaggtggcccggagcagggacatagaggtgttggaaggaatgtccctgtttgcagaactctctgggaacctggtgcctgtgaagaaagctgcccagcagcggagcttccacttccagtcatttcgggagaaccgtctggccatgcctgtaaaggtgagggacagcagtcgagagccgggagggtccctgtcgtttctgcgcaaggcgatgaagtacgaggacacccagcacattctctgccacctgaacatcaccatgcccccctgcgccaagggaagtggagccgaagataggagaaggaccccgacgcccctggccctgcgatacagcattctcagtgagtccacaccaggttctctcagtgggacagagcaggcagagatgaagatggctgttatctcagagcacctcggtctcagctgggcagagttggcccgggagctgcagttcagtgtggaagacatcaacaggatccgagtggaaaatcccaactccctgttggagcagagtgtggccttgctgaacctctgggtcatccgtgaaggccaaaacgcaaacatggagaatctgtacacagccctgcagagcattgaccgtggcgagatcgtgaacatgctggagggttccggccgacagagccgcaacttgaagccagacaggcggcacaccgaccgcgactactcgctgtcaccctcccagatgaatggttactcctcactgcaggacgagctgctgtcccctgcctccctgggctgtgcactttcctctccgctacgtgcagaccagtactggaatgaggtggccgtcctagacgccatccccttggcggccacggagcatgacaccatgctggagatgtctgacatgcaggtgtggtctgcgggcctcacgccttctctggtcactgctgaggactcctctctggagtgtagcaaggctgaggactctgatgccacaggtcacgagtggaagttggagggggcactctcagaggaaccgcggggccccgagttgggctctctggaacttgtggaggacgacacagtggattcagatgccacaaatggccttatcgatttgcttgaacaggaggaaggtcagaggtcagaagagaagctgccaggttctaagaggcaggatgacgcgacaggtgcagggcaggactcagagaatgaagtgtctcttgtttcaggccatcagagggggcaagcccgaatcacacattcccccaccgtgagtcaggtgacggagaggagtcaggacagactgcaggactgggatgcagacggctcgattgtctcatacctgcaagatgctgcacaaggttcctggcaagaggaggtcacgcaaggtccacactcattccagggaacaagtaccatgactgaagggctagagcccggtggatctcaggagtacgagaaggtcctggtgtctgtaagtgagcacacgtggacagaacagcccgaggctgagagctcccaggccgacagggaccggaggcagcaaggccaagaagagcaggtgcaggaggccaagaacaccttcacccaagtggtgcaggggaatgagtttcagaatattccaggggagcaggtgacagaggagcaattcacggatgagcagggcaacattgtcaccaagaagatcattcgcaaggtggttcgacagatagacttgtccagcgccgatgccgcccaggagcacgaggaggatcacacctcgacacccaacccctgaaccccacacactctgccatgcacacaggaggagagctggacctgagggccaccgcagcggtgcacacattcctctgggctgacggcatgacctctgtaagggactcctgctagtcccctcttggcatgaatgactgactgtagacgcatgacctccaggcttcaatcctgcctcttgcaatgacagctgatctgtcggaaccaggacacaaaagcagcaagaagcggggagagagagggatagaaaacaagcgcaggagagcctgcgaacgcaaaagtgaatgagggctttttgtggctggggatgggttttggttttggggttttttttttaaattgttttgacttcgtacagggtactttttcccaacctcatctgtcagaaatccatgtgggcttcctgg

SEQ ID NO: 1955 - DNA, 8297 bp, Homo sapiens
  source 1..8297: mol_type = unassigned DNA
agaggctgcggtgagtccgccagccccagctgctcctcctcaagcccccaaggcccttcggcgggcccctgctgaaagaccggcatgccctattctgtgggcttccgcgaagccgatgctgctaccagctttctgagagcagcaagatcaggtaacttggacaaagctttggatcacctgcggaatggggtagatattaacacctgtaaccagaatgggttgaatggcttgcatctggcttctaaggaaggccatgtgaaaatggtggttgaacttctgcacaaagaaatcattctagaaacgacaaccaagaaggggaacacggccctgcacatcgctgctctagccgggcaggatgaggtggtccgggagcttgtcaactatggagccaacgtcaacgcccagtcacagaaaggttttacacccctgtacatggcagcacaagagaaccacttggaagtggttaagtttttactggaaaatggagctaaccagaatgtagccacagaagacggcttcacgcctctggcggtagccctgcagcagggccatgagaacgtcgtcgcgcacctcatcaactacggcaccaaggggaaggtgcgcctcccggccctgcacatcgcggcccgcaacgacgacacgcgcacggctgcggtgctgctgcagaacgaccccaacccggacgtgctttccaagacgggattcacgcccctgcacattgcggctcactacgagaacctcaacgtggcccagttgctcctcaacagaggagccagcgtcaatttcacaccacagaacggcatcacgccactgcacatcgcctcccgcaggggcaacgtgatcatggtgcggctgctgctggatcggggagcccagatagaaaccaagaccaaggacgaattgacacctctccactgtgcagctcgaaatgggcacgtgcgaatctcagagatcctgctggaccacggggcaccaatccaagccaaaaccaagaacggcctgtccccaattcacatggcggctcagggagaccacctcgactgtgtccggctcctgttgcaatacgacgcagagatagacgacatcaccctggaccacctgaccccactccacgtggctgcccactgtggacaccacagggtggctaaggtccttctggataaaggggccaaacccaactccagagccctgaatggctttacccccttacacatcgcctgcaaaaagaaccacgtccgtgtcatggagctgctgctgaagacgggagcctcgatcgacgcggtcaccgagtctggcctgacacctctccacgtggcctccttcatggggcaccttcccatcgtgaagaacctcctgcagcggggggcgtcgcccaacgtctccaacgtgaaagtggagaccccgctacacatggcagccagagccgggcacacggaagtggccaaatatttactccagaacaaagccaaagtcaatgccaaggccaaggatgaccagaccccacttcactgtgcagctcgcatcggccacacaaacatggtgaagctcctgctggaaaataacgccaaccccaacctggccaccaccgccgggcacacccccctgcacattgcagcccgtgagggccatgtggaaacagtcctggcccttctggaaaaggaagcatcccaggcctgcatgaccaagaaaggatttacccctctgcacgtggcggccaagtacgggaaggtgcgggtggcagagctgctgctggagcgggacgcacacccgaatgctgccggaaaaaatggcctgacccccctgcacgtggccgtccatcacaacaacctggacatcgtcaagctgctgcttccccggggcggctccccgcacagccctgcctggaatggctacacccctttgcacatcgctgccaagcagaaccaggtggaggtggcccgtagtctgctgcagtatgggggctcagcaaacgccgagtcggtgcaaggtgtgacgccccttcacctggccgcccaggagggccacgcagagatggtggctctgctgctctcgaaacaagccaatggcaacctggggaacaagagcggactcactcccctccatctggtagcacaagaaggccacgttccagtggcagatgtgctgatcaaacacggcgtcatggtggacgccaccacccggatgggctacactcccctccatgtggccagtcactatggaaacatcaagctggtgaagtttctgctgcagcaccaggcagatgtcaatgccaagaccaagctaggatacagccccctgcaccaggcagcccagcagggacacacagacatcgtgactctgcttctgaaaaacggtgcttccccaaacgaggtcagctcggatggaaccacacctctggccatagccaagcgcttgggctacatttctgtcaccgacgtgctcaaggtcgtcacggatgaaaccagtttcgtgttagtcagtgataagcatcgaatgagtttccctgagacagttgatgagatcctggatgtctcggaagatgaaggggaagaactcatcagcttcaaggctgagaggcgggattccagggatgttgatgaagagaaggagctgctggattttgtgccgaagctagaccaagtggtggaatctccagccatccccaggattccctgtgccatgcctgagacagtggtgatcaggtcagaagagcaggagcaggcatctaaagagtatgatgaggactccctcatccccagcagcccggccaccgagacctcagacaacatcagcccggtggccagcccggtgcatacagggtttctggtgagcttcatggttgacgcccggggtggttccatgagaggaagtcgccacaacggcctgcgagtggtgatcccgccacggacgtgcgcagcgcccacccgcatcacctgccgcctggtcaagccccagaagctcagcacgccgcccccactggccgaggaggagggcctggccagcaggatcatagcactggggcccacgggggcacagttcctgagccctgtaatcgtggagatcccgcactttgcctcccatggccgtggagaccgcgagctcgtggttctgaggagcgaaaacggctccgtgtggaaggagcacaggagccgctatggagagagctacctggatcagatcctcaacgggatggacgaagagctggggagcctggaggagctagagaagaagagggtgtgccgaatcatcaccaccgacttcccgctgtacttcgtgatcatgtcacggctctgccaggactacgacaccatcggtcccgaagggggctccctgaagagcaagctggtgcccctggtacaggcaacgttcccggagaatgccgtcaccaagagagtgaagctggctctgcaggcccagcctgtcccggatgagcttgtcactaagctcctgggcaaccaggccacattcagccccattgtcaccgtggagccccggcgccggaagttccaccgccccattgggcttcggatcccactacctccttcctggaccgacaacccgagggacagcggggagggagacaccaccagcctgcgcctgctttgcagcgtcattggaggaacagaccaagcccagtgggaagacataacaggaaccaccaaacttgtatatgccaacgagtgcgccaacttcaccaccaatgtctctgccaggttttggctgtcggactgtcctcggactgctgaggctgtgaactttgccaccctgctgtacaaagagctcactgcagtgccctacatggccaaattcgtcatctttgccaagatgaatgacccccgagaggggcgcctgcgctgctactgcatgacagatgataaagtggacaagaccctggagcagcatgagaacttcgtggaggtggcccggagcagggacatagaggtgttggaaggaatgtccctgtttgcagaactctctgggaacctggtgcctgtgaagaaagctgcccagcagcggagcttccacttccagtcatttcgggagaaccgtctggccatgcctgtaaaggtgagggacagcagtcgagagccgggagggtccctgtcgtttctgcgcaaggcgatgaagtacgaggacacccagcacattctctgccacctgaacatcaccatgcccccctgcgccaagggaagtggagccgaagataggagaaggaccccgacgcccctggccctgcgatacagcattctcagtgagtccacaccaggttctctcagtgggacagagcaggcagagatgaagatggctgttatctcagagcacctcggtctcagctgggcagagttggcccgggagctgcagttcagtgtggaagacatcaacaggatccgagtggaaaatcccaactccctgttggagcagagtgtggccttgctgaacctctgggtcatccgtgaaggccaaaacgcaaacatggagaatctgtacacagccctgcagagcattgaccgtggcgagatcgtgaacatgctggagggttccggccgacagagccgcaacttgaagccagacaggcggcacaccgaccgcgactactcgctgtcaccctcccagatgaatggttactcctcactgcaggacgagctgctgtcccctgcctccctgggctgtgcactttcctctccgctacgtgcagaccagtactggaatgaggtggccgtcctagacgccatccccttggcggccacggagcatgacaccatgctggagatgtctgacatgcaggtgtggtctgcgggcctcacgccttctctggtcactgctgaggactcctctctggagtgtagcaaggctgaggactctgatgccacaggtcacgagtggaagttggagggggcactctcagaggaaccgcggggccccgagttgggctctctggaacttgtggaggacgacacagtggattcagatgccacaaatggccttatcgatttgcttgaacaggaggaaggtcagaggtcagaagagaagctgccaggttctaagaggcaggatgacgcgacaggtgcagggcaggactcagagaatgaagtgtctcttgtttcaggccatcagagggggcaagcccgaatcacacattcccccaccgtgagtcaggtgacggagaggagtcaggacagactgcaggactgggatgcagacggctcgattgtctcatacctgcaagatgctgcacaaggttcctggcaagaggaggtcacgcaaggtccacactcattccagggaacaagtaccatgactgaagggctagagcccggtggatctcaggagtacgagaaggtcctggtgtctgtaagtgagcacacgtggacagaacagcccgaggctgagagctcccaggccgacagggaccggaggcagcaaggccaagaagagcaggtgcaggaggccaagaacaccttcacccaagtggtgcaggggaatgagtttcagaatattccaggggagcaggtgacagaggagcaattcacggatgagcagggcaacattgtcaccaagaagatcattcgcaaggtggttcgacagatagacttgtccagcgccgatgccgcccaggagcacgaggaggtggagctgagagggagtggcctacagccggacctgatagagggcaggaagggggcgcagatagtgaagcgggccagcctgaaaagggggaaacagtgaccccgagccgctctccttggagtagcctctcgggaggatcacacctcgacacccaacccctgaaccccacacactctgccatgcacacaggaggagagctggacctgagggccaccgcagcggtgcacacattcctctgggctgacggcatgacctctgtaagggactcctgctagtcccctcttggcatgaatgactgactgtagacgcatgacctccaggcttcaatcctgcctcttgcaatgacagctgatctgtcggaaccaggacacaaaagcagcaagaagcggggagagagagggatagaaaacaagcgcaggagagcctgcgaacgcaaaagtgaatgagggctttttgtggctggggatgggttttggttttggggttttttttttaaattgttttgacttcgtacagggtactttttcccaacctcatctgtcagaaatccatgtgggcttcctggaaagaaaaaaaaaaaaaagaaaactaggcatgaaatcagtttaacaccttaatcttaagccatgtcctcatctgcccaccctccccaacccacatacctccattccacttgtgacaccccctcgactccctggtgacgctcctcccagatcgctctacatgacattcaggacacacacacacacacacacacaccactcgcctccactgaatctacacacagattttactgtgacttctgaagctgtatagactctgctgtggataaattggaattttttatgttgtctctctctctgccaatttcaatacgaatcatcttccaatggaaaatcattaccttgaagagtgcattcggggttccttgtgttagggacttaagaatctgaggcgaggacccccaggcttacctgtaggactcaaagggagccaggaccccatctgaaagggtctcctctctcagttgggggacaggccggtggctgacccaggattgcaccagcatgtccatagagaagaggttttctatgtcttcaagcactatatcatagtccgtgttcaaagtgtaaactgtacagtaatcagccttgtgtatatgaaaaacaataaatactatgcaaaccaatagaaacatttagcagtacgtacagagcctgacagcgcagctcctgaggacttctgcggctgcaggagaaggagctgtggcctgtctttcagtgaaagaggaaggaaaggagtagggctagtgaatgtatctgccaggtcttagaagtcaggaccacccagggtctcccagagtgaacttggtgctctaagtccaggcagcctgcaggctggggaccctgggtgcaggtgccaggctcgaggctgttccctgtcctgcctcagtgcctcccctctgcccagcccctgtggcctcttggagaggcgagccagggggctccccggaccgcatggccggtgagagtagagtcggaggcggagagcctggacgcccagaggccggggccaggctctgggtcaaggcaggaaggagacagacagctggcagttcctcgcctcggtgccatcagggaggagccttaagttccactagagcctccggcccagggaggccagaatcagcacaatcccggccccgccctcgcggcgggcgcccccagggccaggagagagagacagggctggctcctctcgcccctggagccgcggtgtggacggcccggccccgtccgccccgccgctctgcgggagtgtcctcgggacacacttaaaccttccaagtagcacagaagccccctccacgtcagaggccccctggccgcggggcctgtgagcggagaggggccctgcttcccacacaaatccgccccggtgcacccccggccaggcaggccccggggcggcctaggcgccttgtcggccgggggtggggctgcttttgcttcctttagaggggcgggcagggagaggaagctctagctccgggcctgagtttccccgaggctgcgtcggaggagctgcagggcgagcccggacggctgccgtctccgccagaggccaccccggcccggcctccagggcgcagaggcgcccccctccatcctcccccatcccgggggccacggcaggggggccgcacagcgcggctgggaccgattcggtgacggcccaaggaagctgggctcagggctcgcctctcccgcctcgatcctgcaccttcctctcccaggtcgctgctgcagccaacccagtagcccccttagcgcccccgcggaccccgcagctccagactccgctttggcacctctgctccggctggcatggctgcacgctccggctgctagtaggagccgttaggggaggagtttggggtctccacacgatgcctagagaatgctgcagtctgcacattagacgctttttagaagttttgaaattaccttgatttttttaattgttatgaaaatggatcttttcttgactctcccacatgctctgttatgggagagaatcccctaccctactctgatgtatagaccattctcccttcaccagccgaaccaatgtcaaaattaataaagaaatggactaatggcacaggg

SEQ ID NO: 1956 - DNA, 1185 bp, Homo sapiens
  source 1..1185: mol_type = unassigned DNA
actcagggcagagcctggctgctgggcagaagggcacttgggccgggctgcttcagccgagagggccattcggtgtcctgcccacagagagagaaacagtgagagaccaagagagcaaaccagagagatagggagggggaatgcaaggggtccctgggggactcaggagtcccagtggagaatgagaggcaggccccccgtggtggccggggccctggctgccagaggaccgggctggtgaggaggcgaggatgtggactttcgtcacccagctgttggtcacgctggtgctgctgagcttcttcctggtcagctgtcagaacgtgatgcacattgtcagggggtccctgtgctttgtgctaaagcacatccaccaggagctggacaaggagctgggggagagcgagggcctcagtgacgacgaggagaccatctccaccagggtggtccggcggcgggtcttcctgaaggggaatgagtttcagaatattccaggggagcaggtgacagaggagcaattcacggatgagcagggcaacattgtcaccaagaagatcattcgcaaggtggttcgacagatagacttgtccagcgccgatgccgcccaggagcacgaggaggtggagctgagagggagtggcctacagccggacctgatagagggcaggaagggggcgcagatagtgaagcgggccagcctgaaaagggggaaacagtgaccccgagccgctctccttggagtagcctctcgggaggatcacacctcgacacccaacccctgaaccccacacactctgccatgcacacaggaggagagctggacctgagggccaccgcagcggtgcacacattcctctgggctgacggcatgacctctgtaagggactcctgctagtcccctcttggcatgaatgactgactgtagacgcatgacctccaggcttcaatcctgcctcttgcaatgacagctgatctgtcggaaccaggacacaaaagcagcaagaagcggggagagagagggatagaaaacaagcgcaggagagcctgcgaacgcaaaagtgaatgagggctttttgtggctggggatgggttttggttttggggttttttttttaaattgttttgacttcgtacagggtactttttcccaacctcatctgtcagaaatccatgtgggcttcctgg

SEQ ID NO: 1957 - DNA, 8237 bp, Homo sapiens
  source 1..8237: mol_type = unassigned DNA
agaggctgcggtgagtccgccagccccagctgctcctcctcaagcccccaaggcccttcggcgggcccctgctgaaagaccggcatgccctattctgtgggcttccgcgaagccgatgctgctaccagctttctgagagcagcaagatcaggtaacttggacaaagctttggatcacctgcggaatggggtagatattaacacctgtaaccagaatgggttgaatggcttgcatctggcttctaaggaaggccatgtgaaaatggtggttgaacttctgcacaaagaaatcattctagaaacgacaaccaagaaggggaacacggccctgcacatcgctgctctagccgggcaggatgaggtggtccgggagcttgtcaactatggagccaacgtcaacgcccagtcacagaaaggttttacacccctgtacatggcagcacaagagaaccacttggaagtggttaagtttttactggaaaatggagctaaccagaatgtagccacagaagacggcttcacgcctctggcggtagccctgcagcagggccatgagaacgtcgtcgcgcacctcatcaactacggcaccaaggggaaggtgcgcctcccggccctgcacatcgcggcccgcaacgacgacacgcgcacggctgcggtgctgctgcagaacgaccccaacccggacgtgctttccaagacgggattcacgcccctgcacattgcggctcactacgagaacctcaacgtggcccagttgctcctcaacagaggagccagcgtcaatttcacaccacagaacggcatcacgccactgcacatcgcctcccgcaggggcaacgtgatcatggtgcggctgctgctggatcggggagcccagatagaaaccaagaccaaggacgaattgacacctctccactgtgcagctcgaaatgggcacgtgcgaatctcagagatcctgctggaccacggggcaccaatccaagccaaaaccaagaacggcctgtccccaattcacatggcggctcagggagaccacctcgactgtgtccggctcctgttgcaatacgacgcagagatagacgacatcaccctggaccacctgaccccactccacgtggctgcccactgtggacaccacagggtggctaaggtccttctggataaaggggccaaacccaactccagagccctgaatggctttacccccttacacatcgcctgcaaaaagaaccacgtccgtgtcatggagctgctgctgaagacgggagcctcgatcgacgcggtcaccgagtctggcctgacacctctccacgtggcctccttcatggggcaccttcccatcgtgaagaacctcctgcagcggggggcgtcgcccaacgtctccaacgtgaaagtggagaccccgctacacatggcagccagagccgggcacacggaagtggccaaatatttactccagaacaaagccaaagtcaatgccaaggccaaggatgaccagaccccacttcactgtgcagctcgcatcggccacacaaacatggtgaagctcctgctggaaaataacgccaaccccaacctggccaccaccgccgggcacacccccctgcacattgcagcccgtgagggccatgtggaaacagtcctggcccttctggaaaaggaagcatcccaggcctgcatgaccaagaaaggatttacccctctgcacgtggcggccaagtacgggaaggtgcgggtggcagagctgctgctggagcgggacgcacacccgaatgctgccggaaaaaatggcctgacccccctgcacgtggccgtccatcacaacaacctggacatcgtcaagctgctgcttccccggggcggctccccgcacagccctgcctggaatggctacacccctttgcacatcgctgccaagcagaaccaggtggaggtggcccgtagtctgctgcagtatgggggctcagcaaacgccgagtcggtgcaaggtgtgacgccccttcacctggccgcccaggagggccacgcagagatggtggctctgctgctctcgaaacaagccaatggcaacctggggaacaagagcggactcactcccctccatctggtagcacaagaaggccacgttccagtggcagatgtgctgatcaaacacggcgtcatggtggacgccaccacccggatgggctacactcccctccatgtggccagtcactatggaaacatcaagctggtgaagtttctgctgcagcaccaggcagatgtcaatgccaagaccaagctaggatacagccccctgcaccaggcagcccagcagggacacacagacatcgtgactctgcttctgaaaaacggtgcttccccaaacgaggtcagctcggatggaaccacacctctggccatagccaagcgcttgggctacatttctgtcaccgacgtgctcaaggtcgtcacggatgaaaccagtttcgtgttagtcagtgataagcatcgaatgagtttccctgagacagttgatgagatcctggatgtctcggaagatgaaggggaagaactcatcagcttcaaggctgagaggcgggattccagggatgttgatgaagagaaggagctgctggattttgtgccgaagctagaccaagtggtggaatctccagccatccccaggattccctgtgccatgcctgagacagtggtgatcaggtcagaagagcaggagcaggcatctaaagagtatgatgaggactccctcatccccagcagcccggccaccgagacctcagacaacatcagcccggtggccagcccggtgcatacagggtttctggtgagcttcatggttgacgcccggggtggttccatgagaggaagtcgccacaacggcctgcgagtggtgatcccgccacggacgtgcgcagcgcccacccgcatcacctgccgcctggtcaagccccagaagctcagcacgccgcccccactggccgaggaggagggcctggccagcaggatcatagcactggggcccacgggggcacagttcctgagccctgtaatcgtggagatcccgcactttgcctcccatggccgtggagaccgcgagctcgtggttctgaggagcgaaaacggctccgtgtggaaggagcacaggagccgctatggagagagctacctggatcagatcctcaacgggatggacgaagagctggggagcctggaggagctagagaagaagagggtgtgccgaatcatcaccaccgacttcccgctgtacttcgtgatcatgtcacggctctgccaggactacgacaccatcggtcccgaagggggctccctgaagagcaagctggtgcccctggtacaggcaacgttcccggagaatgccgtcaccaagagagtgaagctggctctgcaggcccagcctgtcccggatgagcttgtcactaagctcctgggcaaccaggccacattcagccccattgtcaccgtggagccccggcgccggaagttccaccgccccattgggcttcggatcccactacctccttcctggaccgacaacccgagggacagcggggagggagacaccaccagcctgcgcctgctttgcagcgtcattggaggaacagaccaagcccagtgggaagacataacaggaaccaccaaacttgtatatgccaacgagtgcgccaacttcaccaccaatgtctctgccaggttttggctgtcggactgtcctcggactgctgaggctgtgaactttgccaccctgctgtacaaagagctcactgcagtgccctacatggccaaattcgtcatctttgccaagatgaatgacccccgagaggggcgcctgcgctgctactgcatgacagatgataaagtggacaagaccctggagcagcatgagaacttcgtggaggtggcccggagcagggacatagaggtgttggaaggaatgtccctgtttgcagaactctctgggaacctggtgcctgtgaagaaagctgcccagcagcggagcttccacttccagtcatttcgggagaaccgtctggccatgcctgtaaaggtgagggacagcagtcgagagccgggagggtccctgtcgtttctgcgcaaggcgatgaagtacgaggacacccagcacattctctgccacctgaacatcaccatgcccccctgcgccaagggaagtggagccgaagataggagaaggaccccgacgcccctggccctgcgatacagcattctcagtgagtccacaccaggttctctcagtgggacagagcaggcagagatgaagatggctgttatctcagagcacctcggtctcagctgggcagagttggcccgggagctgcagttcagtgtggaagacatcaacaggatccgagtggaaaatcccaactccctgttggagcagagtgtggccttgctgaacctctgggtcatccgtgaaggccaaaacgcaaacatggagaatctgtacacagccctgcagagcattgaccgtggcgagatcgtgaacatgctggagggttccggccgacagagccgcaacttgaagccagacaggcggcacaccgaccgcgactactcgctgtcaccctcccagatgaatggttactcctcactgcaggacgagctgctgtcccctgcctccctgggctgtgcactttcctctccgctacgtgcagaccagtactggaatgaggtggccgtcctagacgccatccccttggcggccacggagcatgacaccatgctggagatgtctgacatgcaggtgtggtctgcgggcctcacgccttctctggtcactgctgaggactcctctctggagtgtagcaaggctgaggactctgatgccacaggtcacgagtggaagttggagggggcactctcagaggaaccgcggggccccgagttgggctctctggaacttgtggaggacgacacagtggattcagatgccacaaatggccttatcgatttgcttgaacaggaggaaggtcagaggtcagaagagaagctgccaggttctaagaggcaggatgacgcgacaggtgcagggcaggactcagagaatgaagtgtctcttgtttcaggccatcagagggggcaagcccgaatcacacattcccccaccgtgagtcaggtgacggagaggagtcaggacagactgcaggactgggatgcagacggctcgattgtctcatacctgcaagatgctgcacaaggttcctggcaagaggaggtcacgcaaggtccacactcattccagggaacaagtaccatgactgaagggctagagcccggtggatctcaggagtacgagaaggtcctggtgtctgtaagtgagcacacgtggacagaacagcccgaggctgagagctcccaggccgacagggaccggaggcagcaaggccaagaagagcaggtgcaggaggccaagaacaccttcacccaagtggtgcaggggaatgagtttcagaatattccaggggagcaggtgacagaggagcaattcacggatgagcagggcaacattgtcaccaagaagatcattcgcaaggtggttcgacagatagacttgtccagcgccgatgccgcccaggagcacgaggaggtgactgtagaggggcccctggaggatcccagtgagctggaggtcgatattgattactttatgaaacactccaaggatcacacctcgacacccaacccctgaaccccacacactctgccatgcacacaggaggagagctggacctgagggccaccgcagcggtgcacacattcctctgggctgacggcatgacctctgtaagggactcctgctagtcccctcttggcatgaatgactgactgtagacgcatgacctccaggcttcaatcctgcctcttgcaatgacagctgatctgtcggaaccaggacacaaaagcagcaagaagcggggagagagagggatagaaaacaagcgcaggagagcctgcgaacgcaaaagtgaatgagggctttttgtggctggggatgggttttggttttggggttttttttttaaattgttttgacttcgtacagggtactttttcccaacctcatctgtcagaaatccatgtgggcttcctggaaagaaaaaaaaaaaaaagaaaactaggcatgaaatcagtttaacaccttaatcttaagccatgtcctcatctgcccaccctccccaacccacatacctccattccacttgtgacaccccctcgactccctggtgacgctcctcccagatcgctctacatgacattcaggacacacacacacacacacacacaccactcgcctccactgaatctacacacagattttactgtgacttctgaagctgtatagactctgctgtggataaattggaattttttatgttgtctctctctctgccaatttcaatacgaatcatcttccaatggaaaatcattaccttgaagagtgcattcggggttccttgtgttagggacttaagaatctgaggcgaggacccccaggcttacctgtaggactcaaagggagccaggaccccatctgaaagggtctcctctctcagttgggggacaggccggtggctgacccaggattgcaccagcatgtccatagagaagaggttttctatgtcttcaagcactatatcatagtccgtgttcaaagtgtaaactgtacagtaatcagccttgtgtatatgaaaaacaataaatactatgcaaaccaatagaaacatttagcagtacgtacagagcctgacagcgcagctcctgaggacttctgcggctgcaggagaaggagctgtggcctgtctttcagtgaaagaggaaggaaaggagtagggctagtgaatgtatctgccaggtcttagaagtcaggaccacccagggtctcccagagtgaacttggtgctctaagtccaggcagcctgcaggctggggaccctgggtgcaggtgccaggctcgaggctgttccctgtcctgcctcagtgcctcccctctgcccagcccctgtggcctcttggagaggcgagccagggggctccccggaccgcatggccggtgagagtagagtcggaggcggagagcctggacgcccagaggccggggccaggctctgggtcaaggcaggaaggagacagacagctggcagttcctcgcctcggtgccatcagggaggagccttaagttccactagagcctccggcccagggaggccagaatcagcacaatcccggccccgccctcgcggcgggcgcccccagggccaggagagagagacagggctggctcctctcgcccctggagccgcggtgtggacggcccggccccgtccgccccgccgctctgcgggagtgtcctcgggacacacttaaaccttccaagtagcacagaagccccctccacgtcagaggccccctggccgcggggcctgtgagcggagaggggccctgcttcccacacaaatccgccccggtgcacccccggccaggcaggccccggggcggcctaggcgccttgtcggccgggggtggggctgcttttgcttcctttagaggggcgggcagggagaggaagctctagctccgggcctgagtttccccgaggctgcgtcggaggagctgcagggcgagcccggacggctgccgtctccgccagaggccaccccggcccggcctccagggcgcagaggcgcccccctccatcctcccccatcccgggggccacggcaggggggccgcacagcgcggctgggaccgattcggtgacggcccaaggaagctgggctcagggctcgcctctcccgcctcgatcctgcaccttcctctcccaggtcgctgctgcagccaacccagtagcccccttagcgcccccgcggaccccgcagctccagactccgctttggcacctctgctccggctggcatggctgcacgctccggctgctagtaggagccgttaggggaggagtttggggtctccacacgatgcctagagaatgctgcagtctgcacattagacgctttttagaagttttgaaattaccttgatttttttaattgttatgaaaatggatcttttcttgactctcccacatgctctgttatgggagagaatcccctaccctactctgatgtatagaccattctcccttcaccagccgaaccaatgtcaaaattaataaagaaatggactaatggcacaggg

SEQ ID NO: 1958 - DNA, 579 bp, Homo sapiens
  source 1..579: mol_type = unassigned DNA
actcagggcagagcctggctgctgggcagaagggcacttgggccgggctgcttcagccgagagggccattcggtgtcctgcccacagagagagaaacagtgagagaccaagagagcaaaccagagagatagggagggggaatgcaaggggtccctgggggactcaggagtcccagtggagaatgagaggcaggccccccgtggtggccggggccctggctgccagaggaccgggctggtgaggaggcgaggatgtggactttcgtcacccagctgttggtcacgctggtgctgctgagcttcttcctggtcagctgtcagaacgtgatgcacattgtcagggggtccctgtgctttgtgctaaagcacatccaccaggagctggacaaggagctgggggagagcgagggcctcagtgacgacgaggagaccatctccaccagggtggtccggcggcgggtcttcctgaaggggaatgagtttcagaatattccaggggagcaggtgacagaggagcaattcacggatgagcagggcaacattgtcaccaagaaggatcacacctcgacacccaacccct

SEQ ID NO: 1959 - DNA, 8225 bp, Homo sapiens
  source 1..8225: mol_type = unassigned DNA
agaggctgcggtgagtccgccagccccagctgctcctcctcaagcccccaaggcccttcggcgggcccctgctgaaagaccggcatgccctattctgtgggcttccgcgaagccgatgctgctaccagctttctgagagcagcaagatcaggtaacttggacaaagctttggatcacctgcggaatggggtagatattaacacctgtaaccagaatgggttgaatggcttgcatctggcttctaaggaaggccatgtgaaaatggtggttgaacttctgcacaaagaaatcattctagaaacgacaaccaagaaggggaacacggccctgcacatcgctgctctagccgggcaggatgaggtggtccgggagcttgtcaactatggagccaacgtcaacgcccagtcacagaaaggttttacacccctgtacatggcagcacaagagaaccacttggaagtggttaagtttttactggaaaatggagctaaccagaatgtagccacagaagacggcttcacgcctctggcggtagccctgcagcagggccatgagaacgtcgtcgcgcacctcatcaactacggcaccaaggggaaggtgcgcctcccggccctgcacatcgcggcccgcaacgacgacacgcgcacggctgcggtgctgctgcagaacgaccccaacccggacgtgctttccaagacgggattcacgcccctgcacattgcggctcactacgagaacctcaacgtggcccagttgctcctcaacagaggagccagcgtcaatttcacaccacagaacggcatcacgccactgcacatcgcctcccgcaggggcaacgtgatcatggtgcggctgctgctggatcggggagcccagatagaaaccaagaccaaggacgaattgacacctctccactgtgcagctcgaaatgggcacgtgcgaatctcagagatcctgctggaccacggggcaccaatccaagccaaaaccaagaacggcctgtccccaattcacatggcggctcagggagaccacctcgactgtgtccggctcctgttgcaatacgacgcagagatagacgacatcaccctggaccacctgaccccactccacgtggctgcccactgtggacaccacagggtggctaaggtccttctggataaaggggccaaacccaactccagagccctgaatggctttacccccttacacatcgcctgcaaaaagaaccacgtccgtgtcatggagctgctgctgaagacgggagcctcgatcgacgcggtcaccgagtctggcctgacacctctccacgtggcctccttcatggggcaccttcccatcgtgaagaacctcctgcagcggggggcgtcgcccaacgtctccaacgtgaaagtggagaccccgctacacatggcagccagagccgggcacacggaagtggccaaatatttactccagaacaaagccaaagtcaatgccaaggccaaggatgaccagaccccacttcactgtgcagctcgcatcggccacacaaacatggtgaagctcctgctggaaaataacgccaaccccaacctggccaccaccgccgggcacacccccctgcacattgcagcccgtgagggccatgtggaaacagtcctggcccttctggaaaaggaagcatcccaggcctgcatgaccaagaaaggatttacccctctgcacgtggcggccaagtacgggaaggtgcgggtggcagagctgctgctggagcgggacgcacacccgaatgctgccggaaaaaatggcctgacccccctgcacgtggccgtccatcacaacaacctggacatcgtcaagctgctgcttccccggggcggctccccgcacagccctgcctggaatggctacacccctttgcacatcgctgccaagcagaaccaggtggaggtggcccgtagtctgctgcagtatgggggctcagcaaacgccgagtcggtgcaaggtgtgacgccccttcacctggccgcccaggagggccacgcagagatggtggctctgctgctctcgaaacaagccaatggcaacctggggaacaagagcggactcactcccctccatctggtagcacaagaaggccacgttccagtggcagatgtgctgatcaaacacggcgtcatggtggacgccaccacccggatgggctacactcccctccatgtggccagtcactatggaaacatcaagctggtgaagtttctgctgcagcaccaggcagatgtcaatgccaagaccaagctaggatacagccccctgcaccaggcagcccagcagggacacacagacatcgtgactctgcttctgaaaaacggtgcttccccaaacgaggtcagctcggatggaaccacacctctggccatagccaagcgcttgggctacatttctgtcaccgacgtgctcaaggtcgtcacggatgaaaccagtttcgtgttagtcagtgataagcatcgaatgagtttccctgagacagttgatgagatcctggatgtctcggaagatgaaggggaagaactcatcagcttcaaggctgagaggcgggattccagggatgttgatgaagagaaggagctgctggattttgtgccgaagctagaccaagtggtggaatctccagccatccccaggattccctgtgccatgcctgagacagtggtgatcaggtcagaagagcaggagcaggcatctaaagagtatgatgaggactccctcatccccagcagcccggccaccgagacctcagacaacatcagcccggtggccagcccggtgcatacagggtttctggtgagcttcatggttgacgcccggggtggttccatgagaggaagtcgccacaacggcctgcgagtggtgatcccgccacggacgtgcgcagcgcccacccgcatcacctgccgcctggtcaagccccagaagctcagcacgccgcccccactggccgaggaggagggcctggccagcaggatcatagcactggggcccacgggggcacagttcctgagccctgtaatcgtggagatcccgcactttgcctcccatggccgtggagaccgcgagctcgtggttctgaggagcgaaaacggctccgtgtggaaggagcacaggagccgctatggagagagctacctggatcagatcctcaacgggatggacgaagagctggggagcctggaggagctagagaagaagagggtgtgccgaatcatcaccaccgacttcccgctgtacttcgtgatcatgtcacggctctgccaggactacgacaccatcggtcccgaagggggctccctgaagagcaagctggtgcccctggtacaggcaacgttcccggagaatgccgtcaccaagagagtgaagctggctctgcaggcccagcctgtcccggatgagcttgtcactaagctcctgggcaaccaggccacattcagccccattgtcaccgtggagccccggcgccggaagttccaccgccccattgggcttcggatcccactacctccttcctggaccgacaacccgagggacagcggggagggagacaccaccagcctgcgcctgctttgcagcgtcattggaggaacagaccaagcccagtgggaagacataacaggaaccaccaaacttgtatatgccaacgagtgcgccaacttcaccaccaatgtctctgccaggttttggctgtcggactgtcctcggactgctgaggctgtgaactttgccaccctgctgtacaaagagctcactgcagtgccctacatggccaaattcgtcatctttgccaagatgaatgacccccgagaggggcgcctgcgctgctactgcatgacagatgataaagtggacaagaccctggagcagcatgagaacttcgtggaggtggcccggagcagggacatagaggtgttggaaggaatgtccctgtttgcagaactctctgggaacctggtgcctgtgaagaaagctgcccagcagcggagcttccacttccagtcatttcgggagaaccgtctggccatgcctgtaaaggtgagggacagcagtcgagagccgggagggtccctgtcgtttctgcgcaaggcgatgaagtacgaggacacccagcacattctctgccacctgaacatcaccatgcccccctgcgccaagggaagtggagccgaagataggagaaggaccccgacgcccctggccctgcgatacagcattctcagtgagtccacaccaggttctctcagtgggacagagcaggcagagatgaagatggctgttatctcagagcacctcggtctcagctgggcagagttggcccgggagctgcagttcagtgtggaagacatcaacaggatccgagtggaaaatcccaactccctgttggagcagagtgtggccttgctgaacctctgggtcatccgtgaaggccaaaacgcaaacatggagaatctgtacacagccctgcagagcattgaccgtggcgagatcgtgaacatgctggagggttccggccgacagagccgcaacttgaagccagacaggcggcacaccgaccgcgactactcgctgtcaccctcccagatgaatggttactcctcactgcaggacgagctgctgtcccctgcctccctgggctgtgcactttcctctccgctacgtgcagaccagtactggaatgaggtggccgtcctagacgccatccccttggcggccacggagcatgacaccatgctggagatgtctgacatgcaggtgtggtctgcgggcctcacgccttctctggtcactgctgaggactcctctctggagtgtagcaaggctgaggactctgatgccacaggtcacgagtggaagttggagggggcactctcagaggaaccgcggggccccgagttgggctctctggaacttgtggaggacgacacagtggattcagatgccacaaatggccttatcgatttgcttgaacaggaggaaggtcagaggtcagaagagaagctgccaggttctaagaggcaggatgacgcgacaggtgcagggcaggactcagagaatgaagtgtctcttgtttcaggccatcagagggggcaagcccgaatcacacattcccccaccgtgagtcaggtgacggagaggagtcaggacagactgcaggactgggatgcagacggctcgattgtctcatacctgcaagatgctgcacaaggttcctggcaagaggaggtcacgcaaggtccacactcattccagggaacaagtaccatgactgaagggctagagcccggtggatctcaggagtacgagaaggtcctggtgtctgtaagtgagcacacgtggacagaacagcccgaggctgagagctcccaggccgacagggaccggaggcagcaaggccaagaagagcaggtgcaggaggccaagaacaccttcacccaagtggtgcaggggaatgagtttcagaatattccaggggagcaggtgacagaggagcaattcacggatgagcagggcaacattgtcaccaagaaggtggagctgagagggagtggcctacagccggacctgatagagggcaggaagggggcgcagatagtgaagcgggccagcctgaaaagggggaaacagtgaccccgagccgctctccttggagtagcctctcgggaggatcacacctcgacacccaacccctgaaccccacacactctgccatgcacacaggaggagagctggacctgagggccaccgcagcggtgcacacattcctctgggctgacggcatgacctctgtaagggactcctgctagtcccctcttggcatgaatgactgactgtagacgcatgacctccaggcttcaatcctgcctcttgcaatgacagctgatctgtcggaaccaggacacaaaagcagcaagaagcggggagagagagggatagaaaacaagcgcaggagagcctgcgaacgcaaaagtgaatgagggctttttgtggctggggatgggttttggttttggggttttttttttaaattgttttgacttcgtacagggtactttttcccaacctcatctgtcagaaatccatgtgggcttcctggaaagaaaaaaaaaaaaaagaaaactaggcatgaaatcagtttaacaccttaatcttaagccatgtcctcatctgcccaccctccccaacccacatacctccattccacttgtgacaccccctcgactccctggtgacgctcctcccagatcgctctacatgacattcaggacacacacacacacacacacacaccactcgcctccactgaatctacacacagattttactgtgacttctgaagctgtatagactctgctgtggataaattggaattttttatgttgtctctctctctgccaatttcaatacgaatcatcttccaatggaaaatcattaccttgaagagtgcattcggggttccttgtgttagggacttaagaatctgaggcgaggacccccaggcttacctgtaggactcaaagggagccaggaccccatctgaaagggtctcctctctcagttgggggacaggccggtggctgacccaggattgcaccagcatgtccatagagaagaggttttctatgtcttcaagcactatatcatagtccgtgttcaaagtgtaaactgtacagtaatcagccttgtgtatatgaaaaacaataaatactatgcaaaccaatagaaacatttagcagtacgtacagagcctgacagcgcagctcctgaggacttctgcggctgcaggagaaggagctgtggcctgtctttcagtgaaagaggaaggaaaggagtagggctagtgaatgtatctgccaggtcttagaagtcaggaccacccagggtctcccagagtgaacttggtgctctaagtccaggcagcctgcaggctggggaccctgggtgcaggtgccaggctcgaggctgttccctgtcctgcctcagtgcctcccctctgcccagcccctgtggcctcttggagaggcgagccagggggctccccggaccgcatggccggtgagagtagagtcggaggcggagagcctggacgcccagaggccggggccaggctctgggtcaaggcaggaaggagacagacagctggcagttcctcgcctcggtgccatcagggaggagccttaagttccactagagcctccggcccagggaggccagaatcagcacaatcccggccccgccctcgcggcgggcgcccccagggccaggagagagagacagggctggctcctctcgcccctggagccgcggtgtggacggcccggccccgtccgccccgccgctctgcgggagtgtcctcgggacacacttaaaccttccaagtagcacagaagccccctccacgtcagaggccccctggccgcggggcctgtgagcggagaggggccctgcttcccacacaaatccgccccggtgcacccccggccaggcaggccccggggcggcctaggcgccttgtcggccgggggtggggctgcttttgcttcctttagaggggcgggcagggagaggaagctctagctccgggcctgagtttccccgaggctgcgtcggaggagctgcagggcgagcccggacggctgccgtctccgccagaggccaccccggcccggcctccagggcgcagaggcgcccccctccatcctcccccatcccgggggccacggcaggggggccgcacagcgcggctgggaccgattcggtgacggcccaaggaagctgggctcagggctcgcctctcccgcctcgatcctgcaccttcctctcccaggtcgctgctgcagccaacccagtagcccccttagcgcccccgcggaccccgcagctccagactccgctttggcacctctgctccggctggcatggctgcacgctccggctgctagtaggagccgttaggggaggagtttggggtctccacacgatgcctagagaatgctgcagtctgcacattagacgctttttagaagttttgaaattaccttgatttttttaattgttatgaaaatggatcttttcttgactctcccacatgctctgttatgggagagaatcccctaccctactctgatgtatagaccattctcccttcaccagccgaaccaatgtcaaaattaataaagaaatggactaatggc

SEQ ID NO: 1960 - DNA, 4641 bp, Homo sapiens
  source 1..4641: mol_type = unassigned DNA
agaggctgcggtgagtccgccagccccagctgctcctcctcaagcccccaaggcccttcggcgggcccctgctgaaagaccggcatgccctattctgtgggcttccgcgaagccgatgctgctaccagctttctgagagcagcaagatcaggtaacttggacaaagctttggatcacctgcggaatggggtagatattaacacctgtaaccagaatgggttgaatggcttgcatctggcttctaaggaaggccatgtgaaaatggtggttgaacttctgcacaaagaaatcattctagaaacgacaaccaagaaggggaacacggccctgcacatcgctgctctagccgggcaggatgaggtggtccgggagcttgtcaactatggagccaacgtcaacgcccagtcacagaaaggttttacacccctgtacatggcagcacaagagaaccacttggaagtggttaagtttttactggaaaatggagctaaccagaatgtagccacagaagacggcttcacgcctctggcggtagccctgcagcagggccatgagaacgtcgtcgcgcacctcatcaactacggcaccaaggggaaggtgcgcctcccggccctgcacatcgcggcccgcaacgacgacacgcgcacggctgcggtgctgctgcagaacgaccccaacccggacgtgctttccaagacgggattcacgcccctgcacattgcggctcactacgagaacctcaacgtggcccagttgctcctcaacagaggagccagcgtcaatttcacaccacagaacggcatcacgccactgcacatcgcctcccgcaggggcaacgtgatcatggtgcggctgctgctggatcggggagcccagatagaaaccaagaccaaggacgaattgacacctctccactgtgcagctcgaaatgggcacgtgcgaatctcagagatcctgctggaccacggggcaccaatccaagccaaaaccaagaacggcctgtccccaattcacatggcggctcagggagaccacctcgactgtgtccggctcctgttgcaatacgacgcagagatagacgacatcaccctggaccacctgaccccactccacgtggctgcccactgtggacaccacagggtggctaaggtccttctggataaaggggccaaacccaactccagagccctgaatggctttacccccttacacatcgcctgcaaaaagaaccacgtccgtgtcatggagctgctgctgaagacgggagcctcgatcgacgcggtcaccgagtctggcctgacacctctccacgtggcctccttcatggggcaccttcccatcgtgaagaacctcctgcagcggggggcgtcgcccaacgtctccaacgtgaaagtggagaccccgctacacatggcagccagagccgggcacacggaagtggccaaatatttactccagaacaaagccaaagtcaatgccaaggccaaggatgaccagaccccacttcactgtgcagctcgcatcggccacacaaacatggtgaagctcctgctggaaaataacgccaaccccaacctggccaccaccgccgggcacacccccctgcacattgcagcccgtgagggccatgtggaaacagtcctggcccttctggaaaaggaagcatcccaggcctgcatgaccaagaaaggatttacccctctgcacgtggcggccaagtacgggaaggtgcgggtggcagagctgctgctggagcgggacgcacacccgaatgctgccggaaaaaatggcctgacccccctgcacgtggccgtccatcacaacaacctggacatcgtcaagctgctgcttccccggggcggctccccgcacagccctgcctggaatggctacacccctttgcacatcgctgccaagcagaaccaggtggaggtggcccgtagtctgctgcagtatgggggctcagcaaacgccgagtcggtgcaaggtgtgacgccccttcacctggccgcccaggagggccacgcagagatggtggctctgctgctctcgaaacaagccaatggcaacctggggaacaagagcggactcactcccctccatctggtagcacaagaaggccacgttccagtggcagatgtgctgatcaaacacggcgtcatggtggacgccaccacccggatgggctacactcccctccatgtggccagtcactatggaaacatcaagctggtgaagtttctgctgcagcaccaggcagatgtcaatgccaagaccaagctaggatacagccccctgcaccaggcagcccagcagggacacacagacatcgtgactctgcttctgaaaaacggtgcttccccaaacgaggtcagctcggatggaaccacacctctggccatagccaagcgcttgggctacatttctgtcaccgacgtgctcaaggtcgtcacggatgaaaccagtttcgtgttagtcagtgataagcatcgaatgagtttccctgagacagttgatgagatcctggatgtctcggaagatgaaggggaagaactcatcagcttcaaggctgagaggcgggattccagggatgttgatgaagagaaggagctgctggattttgtgccgaagctagaccaagtggtggaatctccagccatccccaggattccctgtgccatgcctgagacagtggtgatcaggtcagaagagcaggagcaggcatctaaagagtatgatgaggactccctcatccccagcagcccggccaccgagacctcagacaacatcagcccggtggccagcccggtgcatacagggtttctggtgagcttcatggttgacgcccggggtggttccatgagaggaagtcgccacaacggcctgcgagtggtgatcccgccacggacgtgcgcagcgcccacccgcatcacctgccgcctggtcaagccccagaagctcagcacgccgcccccactggccgaggaggagggcctggccagcaggatcatagcactggggcccacgggggcacagttcctgagccctgtaatcgtggagatcccgcactttgcctcccatggccgtggagaccgcgagctcgtggttctgaggagcgaaaacggctccgtgtggaaggagcacaggagccgctatggagagagctacctggatcagatcctcaacgggatggacgaagagctggggagcctggaggagctagagaagaagagggtgtgccgaatcatcaccaccgacttcccgctgtacttcgtgatcatgtcacggctctgccaggactacgacaccatcggtcccgaagggggctccctgaagagcaagctggtgcccctggtacaggcaacgttcccggagaatgccgtcaccaagagagtgaagctggctctgcaggcccagcctgtcccggatgagcttgtcactaagctcctgggcaaccaggccacattcagccccattgtcaccgtggagccccggcgccggaagttccaccgccccattgggcttcggatcccactacctccttcctggaccgacaacccgagggacagcggggagggagacaccaccagcctgcgcctgctttgcagcgtcattggaggaacagaccaagcccagtgggaagacataacaggaaccaccaaacttgtatatgccaacgagtgcgccaacttcaccaccaatgtctctgccaggttttggctgtcggactgtcctcggactgctgaggctgtgaactttgccaccctgctgtacaaagagctcactgcagtgccctacatggccaaattcgtcatctttgccaagatgaatgacccccgagaggggcgcctgcgctgctactgcatgacagatgataaagtggacaagaccctggagcagcatgagaacttcgtggaggtggcccggagcagggacatagaggtgttggaaggaatgtccctgtttgcagaactctctgggaacctggtgcctgtgaagaaagctgcccagcagcggagcttccacttccagtcatttcgggagaaccgtctggccatgcctgtaaaggtgagggacagcagtcgagagccgggagggtccctgtcgtttctgcgcaaggcgatgaagtacgaggacacccagcacattctctgccacctgaacatcaccatgcccccctgcgccaagggaagtggagccgaagataggagaaggaccccgacgcccctggccctgcgatacagcattctcagtgagtccacaccaggttctctcagtgggacagagcaggcagagatgaagatggctgttatctcagagcacctcggtctcagctgggcagagttggcccgggagctgcagttcagtgtggaagacatcaacaggatccgagtggaaaatcccaactccctgttggagcagagtgtggccttgctgaacctctgggtcatccgtgaaggccaaaacgcaaacatggagaatctgtacacagccctgcagagcattgaccgtggcgagatcgtgaacatgctggagggttccggccgacagagccgcaacttgaagccagacaggcggcacaccgaccgcgactactcgctgtcaccctcccagatgaatggcatcagcaccaataacccc

SEQ ID NO: 1961 - DNA, 8090 bp, Homo sapiens
  source 1..8090: mol_type = unassigned DNA
agaggctgcggtgagtccgccagccccagctgctcctcctcaagcccccaaggcccttcggcgggcccctgctgaaagaccggcatgccctattctgtgggcttccgcgaagccgatgctgctaccagctttctgagagcagcaagatcaggtaacttggacaaagctttggatcacctgcggaatggggtagatattaacacctgtaaccagaatgggttgaatggcttgcatctggcttctaaggaaggccatgtgaaaatggtggttgaacttctgcacaaagaaatcattctagaaacgacaaccaagaaggggaacacggccctgcacatcgctgctctagccgggcaggatgaggtggtccgggagcttgtcaactatggagccaacgtcaacgcccagtcacagaaaggttttacacccctgtacatggcagcacaagagaaccacttggaagtggttaagtttttactggaaaatggagctaaccagaatgtagccacagaagacggcttcacgcctctggcggtagccctgcagcagggccatgagaacgtcgtcgcgcacctcatcaactacggcaccaaggggaaggtgcgcctcccggccctgcacatcgcggcccgcaacgacgacacgcgcacggctgcggtgctgctgcagaacgaccccaacccggacgtgctttccaagacgggattcacgcccctgcacattgcggctcactacgagaacctcaacgtggcccagttgctcctcaacagaggagccagcgtcaatttcacaccacagaacggcatcacgccactgcacatcgcctcccgcaggggcaacgtgatcatggtgcggctgctgctggatcggggagcccagatagaaaccaagaccaaggacgaattgacacctctccactgtgcagctcgaaatgggcacgtgcgaatctcagagatcctgctggaccacggggcaccaatccaagccaaaaccaagaacggcctgtccccaattcacatggcggctcagggagaccacctcgactgtgtccggctcctgttgcaatacgacgcagagatagacgacatcaccctggaccacctgaccccactccacgtggctgcccactgtggacaccacagggtggctaaggtccttctggataaaggggccaaacccaactccagagccctgaatggctttacccccttacacatcgcctgcaaaaagaaccacgtccgtgtcatggagctgctgctgaagacgggagcctcgatcgacgcggtcaccgagtctggcctgacacctctccacgtggcctccttcatggggcaccttcccatcgtgaagaacctcctgcagcggggggcgtcgcccaacgtctccaacgtgaaagtggagaccccgctacacatggcagccagagccgggcacacggaagtggccaaatatttactccagaacaaagccaaagtcaatgccaaggccaaggatgaccagaccccacttcactgtgcagctcgcatcggccacacaaacatggtgaagctcctgctggaaaataacgccaaccccaacctggccaccaccgccgggcacacccccctgcacattgcagcccgtgagggccatgtggaaacagtcctggcccttctggaaaaggaagcatcccaggcctgcatgaccaagaaaggatttacccctctgcacgtggcggccaagtacgggaaggtgcgggtggcagagctgctgctggagcgggacgcacacccgaatgctgccggaaaaaatggcctgacccccctgcacgtggccgtccatcacaacaacctggacatcgtcaagctgctgcttccccggggcggctccccgcacagccctgcctggaatggctacacccctttgcacatcgctgccaagcagaaccaggtggaggtggcccgtagtctgctgcagtatgggggctcagcaaacgccgagtcggtgcaaggtgtgacgccccttcacctggccgcccaggagggccacgcagagatggtggctctgctgctctcgaaacaagccaatggcaacctggggaacaagagcggactcactcccctccatctggtagcacaagaaggccacgttccagtggcagatgtgctgatcaaacacggcgtcatggtggacgccaccacccggatgggctacactcccctccatgtggccagtcactatggaaacatcaagctggtgaagtttctgctgcagcaccaggcagatgtcaatgccaagaccaagctaggatacagccccctgcaccaggcagcccagcagggacacacagacatcgtgactctgcttctgaaaaacggtgcttccccaaacgaggtcagctcggatggaaccacacctctggccatagccaagcgcttgggctacatttctgtcaccgacgtgctcaaggtcgtcacggatgaaaccagtttcgtgttagtcagtgataagcatcgaatgagtttccctgagacagttgatgagatcctggatgtctcggaagatgaaggggaagaactcatcagcttcaaggctgagaggcgggattccagggatgttgatgaagagaaggagctgctggattttgtgccgaagctagaccaagtggtggaatctccagccatccccaggattccctgtgccatgcctgagacagtggtgatcaggtcagaagagcaggagcaggcatctaaagagtatgatgaggactccctcatccccagcagcccggccaccgagacctcagacaacatcagcccggtggccagcccggtgcatacagggtttctggtgagcttcatggttgacgcccggggtggttccatgagaggaagtcgccacaacggcctgcgagtggtgatcccgccacggacgtgcgcagcgcccacccgcatcacctgccgcctggtcaagccccagaagctcagcacgccgcccccactggccgaggaggagggcctggccagcaggatcatagcactggggcccacgggggcacagttcctgagccctgtaatcgtggagatcccgcactttgcctcccatggccgtggagaccgcgagctcgtggttctgaggagcgaaaacggctccgtgtggaaggagcacaggagccgctatggagagagctacctggatcagatcctcaacgggatggacgaagagctggggagcctggaggagctagagaagaagagggtgtgccgaatcatcaccaccgacttcccgctgtacttcgtgatcatgtcacggctctgccaggactacgacaccatcggtcccgaagggggctccctgaagagcaagctggtgcccctggtacaggcaacgttcccggagaatgccgtcaccaagagagtgaagctggctctgcaggcccagcctgtcccggatgagcttgtcactaagctcctgggcaaccaggccacattcagccccattgtcaccgtggagccccggcgccggaagttccaccgccccattgggcttcggatcccactacctccttcctggaccgacaacccgagggacagcggggagggagacaccaccagcctgcgcctgctttgcagcgtcattggaggaacagaccaagcccagtgggaagacataacaggaaccaccaaacttgtatatgccaacgagtgcgccaacttcaccaccaatgtctctgccaggttttggctgtcggactgtcctcggactgctgaggctgtgaactttgccaccctgctgtacaaagagctcactgcagtgccctacatggccaaattcgtcatctttgccaagatgaatgacccccgagaggggcgcctgcgctgctactgcatgacagatgataaagtggacaagaccctggagcagcatgagaacttcgtggaggtggcccggagcagggacatagaggtgttggaaggaatgtccctgtttgcagaactctctgggaacctggtgcctgtgaagaaagctgcccagcagcggagcttccacttccagtcatttcgggagaaccgtctggccatgcctgtaaaggtgagggacagcagtcgagagccgggagggtccctgtcgtttctgcgcaaggcgatgaagtacgaggacacccagcacattctctgccacctgaacatcaccatgcccccctgcgccaagggaagtggagccgaagataggagaaggaccccgacgcccctggccctgcgatacagcattctcagtgagtccacaccaggttctctcagtgggacagagcaggcagagatgaagatggctgttatctcagagcacctcggtctcagctgggcagagttggcccgggagctgcagttcagtgtggaagacatcaacaggatccgagtggaaaatcccaactccctgttggagcagagtgtggccttgctgaacctctgggtcatccgtgaaggccaaaacgcaaacatggagaatctgtacacagccctgcagagcattgaccgtggcgagatcgtgaacatgctggagggttccggccgacagagccgcaacttgaagccagacaggcggcacaccgaccgcgactactcgctgtcaccctcccagatgaatggttactcctcactgcaggacgagctgctgtcccctgcctccctgggctgtgcactttcctctccgctacgtgcagaccagtactggaatgaggtggccgtcctagacgccatccccttggcggccacggagcatgacaccatgctggagatgtctgacatgcaggtgtggtctgcgggcctcacgccttctctggtcactgctgaggactcctctctggagtgtagcaaggctgaggactctgatgccacaggtcacgagtggaagttggagggggcactctcagaggaaccgcggggccccgagttgggctctctggaacttgtggaggacgacacagtggattcagatgccacaaatggccttatcgatttgcttgaacaggaggaaggtcagaggtcagaagagaagctgccaggttctaagaggcaggatgacgcgacaggtgcagggcaggactcagagaatgaagtgtctcttgtttcaggccatcagagggggcaagcccgaatcacacattcccccaccgtgagtcaggtgacggagaggagtcaggacagactgcaggactgggatgcagacggctcgattgtctcatacctgcaagatgctgcacaaggttcctggcaagaggaggtcacgcaaggtccacactcattccagggaacaagtaccatgactgaagggctagagcccggtggatctcaggagtacgagaaggtcctggtgtctgtaagtgagcacacgtggacagaacagcccgaggctgagagctcccaggccgacagggaccggaggcagcaaggccaagaagagcaggtgcaggaggccaagaacaccttcacccaagtggtgcaggggaatgagtttcagaatattccaggggagcaggtgacagaggagcaattcacggatgagcagggcaacattgtcaccaagaaggatcacacctcgacacccaacccctgaaccccacacactctgccatgcacacaggaggagagctggacctgagggccaccgcagcggtgcacacattcctctgggctgacggcatgacctctgtaagggactcctgctagtcccctcttggcatgaatgactgactgtagacgcatgacctccaggcttcaatcctgcctcttgcaatgacagctgatctgtcggaaccaggacacaaaagcagcaagaagcggggagagagagggatagaaaacaagcgcaggagagcctgcgaacgcaaaagtgaatgagggctttttgtggctggggatgggttttggttttggggttttttttttaaattgttttgacttcgtacagggtactttttcccaacctcatctgtcagaaatccatgtgggcttcctggaaagaaaaaaaaaaaaaagaaaactaggcatgaaatcagtttaacaccttaatcttaagccatgtcctcatctgcccaccctccccaacccacatacctccattccacttgtgacaccccctcgactccctggtgacgctcctcccagatcgctctacatgacattcaggacacacacacacacacacacacaccactcgcctccactgaatctacacacagattttactgtgacttctgaagctgtatagactctgctgtggataaattggaattttttatgttgtctctctctctgccaatttcaatacgaatcatcttccaatggaaaatcattaccttgaagagtgcattcggggttccttgtgttagggacttaagaatctgaggcgaggacccccaggcttacctgtaggactcaaagggagccaggaccccatctgaaagggtctcctctctcagttgggggacaggccggtggctgacccaggattgcaccagcatgtccatagagaagaggttttctatgtcttcaagcactatatcatagtccgtgttcaaagtgtaaactgtacagtaatcagccttgtgtatatgaaaaacaataaatactatgcaaaccaatagaaacatttagcagtacgtacagagcctgacagcgcagctcctgaggacttctgcggctgcaggagaaggagctgtggcctgtctttcagtgaaagaggaaggaaaggagtagggctagtgaatgtatctgccaggtcttagaagtcaggaccacccagggtctcccagagtgaacttggtgctctaagtccaggcagcctgcaggctggggaccctgggtgcaggtgccaggctcgaggctgttccctgtcctgcctcagtgcctcccctctgcccagcccctgtggcctcttggagaggcgagccagggggctccccggaccgcatggccggtgagagtagagtcggaggcggagagcctggacgcccagaggccggggccaggctctgggtcaaggcaggaaggagacagacagctggcagttcctcgcctcggtgccatcagggaggagccttaagttccactagagcctccggcccagggaggccagaatcagcacaatcccggccccgccctcgcggcgggcgcccccagggccaggagagagagacagggctggctcctctcgcccctggagccgcggtgtggacggcccggccccgtccgccccgccgctctgcgggagtgtcctcgggacacacttaaaccttccaagtagcacagaagccccctccacgtcagaggccccctggccgcggggcctgtgagcggagaggggccctgcttcccacacaaatccgccccggtgcacccccggccaggcaggccccggggcggcctaggcgccttgtcggccgggggtggggctgcttttgcttcctttagaggggcgggcagggagaggaagctctagctccgggcctgagtttccccgaggctgcgtcggaggagctgcagggcgagcccggacggctgccgtctccgccagaggccaccccggcccggcctccagggcgcagaggcgcccccctccatcctcccccatcccgggggccacggcaggggggccgcacagcgcggctgggaccgattcggtgacggcccaaggaagctgggctcagggctcgcctctcccgcctcgatcctgcaccttcctctcccaggtcgctgctgcagccaacccagtagcccccttagcgcccccgcggaccccgcagctccagactccgctttggcacctctgctccggctggcatggctgcacgctccggctgctagtaggagccgttaggggaggagtttggggtctccacacgatgcctagagaatgctgcagtctgcacattagacgctttttagaagttttgaaattaccttgatttttttaattgttatgaaaatggatcttttcttgactctcccacatgctctgttatgggagagaatcccctaccctactctgatgtatagaccattctcccttcaccagccgaaccaatgtcaaaattaataaagaaatggactaatggc

SEQ ID NO: 1962 - DNA, 8366 bp, Homo sapiens
  source 1..8366: mol_type = unassigned DNA
agaggctgcggtgagtccgccagccccagctgctcctcctcaagcccccaaggcccttcggcgggcccctgctgaaagaccggcatgccctattctgtgggcttccgcgaagccgatgctgctaccagctttctgagagcagcaagatcaggtaacttggacaaagctttggatcacctgcggaatggggtagatattaacacctgtaaccagaatgggttgaatggcttgcatctggcttctaaggaaggccatgtgaaaatggtggttgaacttctgcacaaagaaatcattctagaaacgacaaccaagaaggggaacacggccctgcacatcgctgctctagccgggcaggatgaggtggtccgggagcttgtcaactatggagccaacgtcaacgcccagtcacagaaaggttttacacccctgtacatggcagcacaagagaaccacttggaagtggttaagtttttactggaaaatggagctaaccagaatgtagccacagaagacggcttcacgcctctggcggtagccctgcagcagggccatgagaacgtcgtcgcgcacctcatcaactacggcaccaaggggaaggtgcgcctcccggccctgcacatcgcggcccgcaacgacgacacgcgcacggctgcggtgctgctgcagaacgaccccaacccggacgtgctttccaagacgggattcacgcccctgcacattgcggctcactacgagaacctcaacgtggcccagttgctcctcaacagaggagccagcgtcaatttcacaccacagaacggcatcacgccactgcacatcgcctcccgcaggggcaacgtgatcatggtgcggctgctgctggatcggggagcccagatagaaaccaagaccaaggacgaattgacacctctccactgtgcagctcgaaatgggcacgtgcgaatctcagagatcctgctggaccacggggcaccaatccaagccaaaaccaagaacggcctgtccccaattcacatggcggctcagggagaccacctcgactgtgtccggctcctgttgcaatacgacgcagagatagacgacatcaccctggaccacctgaccccactccacgtggctgcccactgtggacaccacagggtggctaaggtccttctggataaaggggccaaacccaactccagagccctgaatggctttacccccttacacatcgcctgcaaaaagaaccacgtccgtgtcatggagctgctgctgaagacgggagcctcgatcgacgcggtcaccgagtctggcctgacacctctccacgtggcctccttcatggggcaccttcccatcgtgaagaacctcctgcagcggggggcgtcgcccaacgtctccaacgtgaaagtggagaccccgctacacatggcagccagagccgggcacacggaagtggccaaatatttactccagaacaaagccaaagtcaatgccaaggccaaggatgaccagaccccacttcactgtgcagctcgcatcggccacacaaacatggtgaagctcctgctggaaaataacgccaaccccaacctggccaccaccgccgggcacacccccctgcacattgcagcccgtgagggccatgtggaaacagtcctggcccttctggaaaaggaagcatcccaggcctgcatgaccaagaaaggatttacccctctgcacgtggcggccaagtacgggaaggtgcgggtggcagagctgctgctggagcgggacgcacacccgaatgctgccggaaaaaatggcctgacccccctgcacgtggccgtccatcacaacaacctggacatcgtcaagctgctgcttccccggggcggctccccgcacagccctgcctggaatggctacacccctttgcacatcgctgccaagcagaaccaggtggaggtggcccgtagtctgctgcagtatgggggctcagcaaacgccgagtcggtgcaaggtgtgacgccccttcacctggccgcccaggagggccacgcagagatggtggctctgctgctctcgaaacaagccaatggcaacctggggaacaagagcggactcactcccctccatctggtagcacaagaaggccacgttccagtggcagatgtgctgatcaaacacggcgtcatggtggacgccaccacccggatgggctacactcccctccatgtggccagtcactatggaaacatcaagctggtgaagtttctgctgcagcaccaggcagatgtcaatgccaagaccaagctaggatacagccccctgcaccaggcagcccagcagggacacacagacatcgtgactctgcttctgaaaaacggtgcttccccaaacgaggtcagctcggatggaaccacacctctggccatagccaagcgcttgggctacatttctgtcaccgacgtgctcaaggtcgtcacggatgaaaccagtttcgtgttagtcagtgataagcatcgaatgagtttccctgagacagttgatgagatcctggatgtctcggaagatgaaggggaagaactcatcagcttcaaggctgagaggcgggattccagggatgttgatgaagagaaggagctgctggattttgtgccgaagctagaccaagtggtggaatctccagccatccccaggattccctgtgccatgcctgagacagtggtgatcaggtcagaagagcaggagcaggcatctaaagagtatgatgaggactccctcatccccagcagcccggccaccgagacctcagacaacatcagcccggtggccagcccggtgcatacagggtttctggtgagcttcatggttgacgcccggggtggttccatgagaggaagtcgccacaacggcctgcgagtggtgatcccgccacggacgtgcgcagcgcccacccgcatcacctgccgcctggtcaagccccagaagctcagcacgccgcccccactggccgaggaggagggcctggccagcaggatcatagcactggggcccacgggggcacagttcctgagccctgtaatcgtggagatcccgcactttgcctcccatggccgtggagaccgcgagctcgtggttctgaggagcgaaaacggctccgtgtggaaggagcacaggagccgctatggagagagctacctggatcagatcctcaacgggatggacgaagagctggggagcctggaggagctagagaagaagagggtgtgccgaatcatcaccaccgacttcccgctgtacttcgtgatcatgtcacggctctgccaggactacgacaccatcggtcccgaagggggctccctgaagagcaagctggtgcccctggtacaggcaacgttcccggagaatgccgtcaccaagagagtgaagctggctctgcaggcccagcctgtcccggatgagcttgtcactaagctcctgggcaaccaggccacattcagccccattgtcaccgtggagccccggcgccggaagttccaccgccccattgggcttcggatcccactacctccttcctggaccgacaacccgagggacagcggggagggagacaccaccagcctgcgcctgctttgcagcgtcattggaggaacagaccaagcccagtgggaagacataacaggaaccaccaaacttgtatatgccaacgagtgcgccaacttcaccaccaatgtctctgccaggttttggctgtcggactgtcctcggactgctgaggctgtgaactttgccaccctgctgtacaaagagctcactgcagtgccctacatggccaaattcgtcatctttgccaagatgaatgacccccgagaggggcgcctgcgctgctactgcatgacagatgataaagtggacaagaccctggagcagcatgagaacttcgtggaggtggcccggagcagggacatagaggtgttggaaggaatgtccctgtttgcagaactctctgggaacctggtgcctgtgaagaaagctgcccagcagcggagcttccacttccagtcatttcgggagaaccgtctggccatgcctgtaaaggtgagggacagcagtcgagagccgggagggtccctgtcgtttctgcgcaaggcgatgaagtacgaggacacccagcacattctctgccacctgaacatcaccatgcccccctgcgccaagggaagtggagccgaagataggagaaggaccccgacgcccctggccctgcgatacagcattctcagtgagtccacaccaggttctctcagtgggacagagcaggcagagatgaagatggctgttatctcagagcacctcggtctcagctgggcagagttggcccgggagctgcagttcagtgtggaagacatcaacaggatccgagtggaaaatcccaactccctgttggagcagagtgtggccttgctgaacctctgggtcatccgtgaaggccaaaacgcaaacatggagaatctgtacacagccctgcagagcattgaccgtggcgagatcgtgaacatgctggagggttccggccgacagagccgcaacttgaagccagacaggcggcacaccgaccgcgactactcgctgtcaccctcccagatgaatggttactcctcactgcaggacgagctgctgtcccctgcctccctgggctgtgcactttcctctccgctacgtgcagaccagtactggaatgaggtggccgtcctagacgccatccccttggcggccacggagcatgacaccatgctggagatgtctgacatgcaggtgtggtctgcgggcctcacgccttctctggtcactgctgaggactcctctctggagtgtagcaaggctgaggactctgatgccacaggtcacgagtggaagttggagggggcactctcagaggaaccgcggggccccgagttgggctctctggaacttgtggaggacgacacagtggattcagatgccacaaatggccttatcgatttgcttgaacaggaggaaggtcagaggtcagaagagaagctgccaggttctaagaggcaggatgacgcgacaggtgcagggcaggactcagagaatgaagtgtctcttgtttcaggccatcagagggggcaagcccgaatcacacattcccccaccgtgagtcaggtgacggagaggagtcaggacagactgcaggactgggatgcagacggctcgattgtctcatacctgcaagatgctgcacaaggttcctggcaagaggaggtcacgcaaggtccacactcattccagggaacaagtaccatgactgaagggctagagcccggtggatctcaggagtacgagaaggtcctggtgtctgtaagtgagcacacgtggacagaacagcccgaggctgagagctcccaggccgacagggaccggaggcagcaaggccaagaagagcaggtgcaggaggccaagaacaccttcacccaagtggtgcaggggaatgagtttcagaatattccaggggagcaggtgacagaggagcaattcacggatgagcagggcaacattgtcaccaagaagatcattcgcaaggtggttcgacagatagacttgtccagcgccgatgccgcccaggagcacgaggaggtgactgtagaggggcccctggaggatcccagtgagctggaggtcgatattgattactttatgaaacactccaaggtggagctgagagggagtggcctacagccggacctgatagagggcaggaagggggcgcagatagtgaagcgggccagcctgaaaagggggaaacagtgaccccgagccgctctccttggagtagcctctcgggaggatcacacctcgacacccaacccctgaaccccacacactctgccatgcacacaggaggagagctggacctgagggccaccgcagcggtgcacacattcctctgggctgacggcatgacctctgtaagggactcctgctagtcccctcttggcatgaatgactgactgtagacgcatgacctccaggcttcaatcctgcctcttgcaatgacagctgatctgtcggaaccaggacacaaaagcagcaagaagcggggagagagagggatagaaaacaagcgcaggagagcctgcgaacgcaaaagtgaatgagggctttttgtggctggggatgggttttggttttggggttttttttttaaattgttttgacttcgtacagggtactttttcccaacctcatctgtcagaaatccatgtgggcttcctggaaagaaaaaaaaaaaaaagaaaactaggcatgaaatcagtttaacaccttaatcttaagccatgtcctcatctgcccaccctccccaacccacatacctccattccacttgtgacaccccctcgactccctggtgacgctcctcccagatcgctctacatgacattcaggacacacacacacacacacacacaccactcgcctccactgaatctacacacagattttactgtgacttctgaagctgtatagactctgctgtggataaattggaattttttatgttgtctctctctctgccaatttcaatacgaatcatcttccaatggaaaatcattaccttgaagagtgcattcggggttccttgtgttagggacttaagaatctgaggcgaggacccccaggcttacctgtaggactcaaagggagccaggaccccatctgaaagggtctcctctctcagttgggggacaggccggtggctgacccaggattgcaccagcatgtccatagagaagaggttttctatgtcttcaagcactatatcatagtccgtgttcaaagtgtaaactgtacagtaatcagccttgtgtatatgaaaaacaataaatactatgcaaaccaatagaaacatttagcagtacgtacagagcctgacagcgcagctcctgaggacttctgcggctgcaggagaaggagctgtggcctgtctttcagtgaaagaggaaggaaaggagtagggctagtgaatgtatctgccaggtcttagaagtcaggaccacccagggtctcccagagtgaacttggtgctctaagtccaggcagcctgcaggctggggaccctgggtgcaggtgccaggctcgaggctgttccctgtcctgcctcagtgcctcccctctgcccagcccctgtggcctcttggagaggcgagccagggggctccccggaccgcatggccggtgagagtagagtcggaggcggagagcctggacgcccagaggccggggccaggctctgggtcaaggcaggaaggagacagacagctggcagttcctcgcctcggtgccatcagggaggagccttaagttccactagagcctccggcccagggaggccagaatcagcacaatcccggccccgccctcgcggcgggcgcccccagggccaggagagagagacagggctggctcctctcgcccctggagccgcggtgtggacggcccggccccgtccgccccgccgctctgcgggagtgtcctcgggacacacttaaaccttccaagtagcacagaagccccctccacgtcagaggccccctggccgcggggcctgtgagcggagaggggccctgcttcccacacaaatccgccccggtgcacccccggccaggcaggccccggggcggcctaggcgccttgtcggccgggggtggggctgcttttgcttcctttagaggggcgggcagggagaggaagctctagctccgggcctgagtttccccgaggctgcgtcggaggagctgcagggcgagcccggacggctgccgtctccgccagaggccaccccggcccggcctccagggcgcagaggcgcccccctccatcctcccccatcccgggggccacggcaggggggccgcacagcgcggctgggaccgattcggtgacggcccaaggaagctgggctcagggctcgcctctcccgcctcgatcctgcaccttcctctcccaggtcgctgctgcagccaacccagtagcccccttagcgcccccgcggaccccgcagctccagactccgctttggcacctctgctccggctggcatggctgcacgctccggctgctagtaggagccgttaggggaggagtttggggtctccacacgatgcctagagaatgctgcagtctgcacattagacgctttttagaagttttgaaattaccttgatttttttaattgttatgaaaatggatcttttcttgactctcccacatgctctgttatgggagagaatcccctaccctactctgatgtatagaccattctcccttcaccagccgaaccaatgtcaaaattaataaagaaatggactaatggc

SEQ ID NO: 1963 - DNA, 8006 bp, Homo sapiens
  source 1..8006: mol_type = unassigned DNA
agaggctgcggtgagtccgccagccccagctgctcctcctcaagcccccaaggcccttcggcgggcccctgctgaaagaccggcatgccctattctgtgggcttccgcgaagccgatgctgctaccagctttctgagagcagcaagatcaggtaacttggacaaagctttggatcacctgcggaatggggtagatattaacacctgtaaccagaatgggttgaatggcttgcatctggcttctaaggaaggccatgtgaaaatggtggttgaacttctgcacaaagaaatcattctagaaacgacaaccaagaaggggaacacggccctgcacatcgctgctctagccgggcaggatgaggtggtccgggagcttgtcaactatggagccaacgtcaacgcccagtcacagaaaggttttacacccctgtacatggcagcacaagagaaccacttggaagtggttaagtttttactggaaaatggagctaaccagaatgtagccacagaagacggcttcacgcctctggcggtagccctgcagcagggccatgagaacgtcgtcgcgcacctcatcaactacggcaccaaggggaaggtgcgcctcccggccctgcacatcgcggcccgcaacgacgacacgcgcacggctgcggtgctgctgcagaacgaccccaacccggacgtgctttccaagacgggattcacgcccctgcacattgcggctcactacgagaacctcaacgtggcccagttgctcctcaacagaggagccagcgtcaatttcacaccacagaacggcatcacgccactgcacatcgcctcccgcaggggcaacgtgatcatggtgcggctgctgctggatcggggagcccagatagaaaccaagaccaaggacgaattgacacctctccactgtgcagctcgaaatgggcacgtgcgaatctcagagatcctgctggaccacggggcaccaatccaagccaaaaccaagaacggcctgtccccaattcacatggcggctcagggagaccacctcgactgtgtccggctcctgttgcaatacgacgcagagatagacgacatcaccctggaccacctgaccccactccacgtggctgcccactgtggacaccacagggtggctaaggtccttctggataaaggggccaaacccaactccagagccctgaatggctttacccccttacacatcgcctgcaaaaagaaccacgtccgtgtcatggagctgctgctgaagacgggagcctcgatcgacgcggtcaccgagtctggcctgacacctctccacgtggcctccttcatggggcaccttcccatcgtgaagaacctcctgcagcggggggcgtcgcccaacgtctccaacgtgaaagtggagaccccgctacacatggcagccagagccgggcacacggaagtggccaaatatttactccagaacaaagccaaagtcaatgccaaggccaaggatgaccagaccccacttcactgtgcagctcgcatcggccacacaaacatggtgaagctcctgctggaaaataacgccaaccccaacctggccaccaccgccgggcacacccccctgcacattgcagcccgtgagggccatgtggaaacagtcctggcccttctggaaaaggaagcatcccaggcctgcatgaccaagaaaggatttacccctctgcacgtggcggccaagtacgggaaggtgcgggtggcagagctgctgctggagcgggacgcacacccgaatgctgccggaaaaaatggcctgacccccctgcacgtggccgtccatcacaacaacctggacatcgtcaagctgctgcttccccggggcggctccccgcacagccctgcctggaatggctacacccctttgcacatcgctgccaagcagaaccaggtggaggtggcccgtagtctgctgcagtatgggggctcagcaaacgccgagtcggtgcaaggtgtgacgccccttcacctggccgcccaggagggccacgcagagatggtggctctgctgctctcgaaacaagccaatggcaacctggggaacaagagcggactcactcccctccatctggtagcacaagaaggccacgttccagtggcagatgtgctgatcaaacacggcgtcatggtggacgccaccacccggatgggctacactcccctccatgtggccagtcactatggaaacatcaagctggtgaagtttctgctgcagcaccaggcagatgtcaatgccaagaccaagctaggatacagccccctgcaccaggcagcccagcagggacacacagacatcgtgactctgcttctgaaaaacggtgcttccccaaacgaggtcagctcggatggaaccacacctctggccatagccaagcgcttgggctacatttctgtcaccgacgtgctcaaggtcgtcacggatgaaaccagtttcgtgttagtcagtgataagcatcgaatgagtttccctgagacagttgatgagatcctggatgtctcggaagatgaaggggaagaactcatcagcttcaaggctgagaggcgggattccagggatgttgatgaagagaaggagctgctggattttgtgccgaagctagaccaagtggtggaatctccagccatccccaggattccctgtgccatgcctgagacagtggtgatcaggtcagaagagcaggagcaggcatctaaagagtatgatgaggactccctcatccccagcagcccggccaccgagacctcagacaacatcagcccggtggccagcccggtgcatacagggtttctggtgagcttcatggttgacgcccggggtggttccatgagaggaagtcgccacaacggcctgcgagtggtgatcccgccacggacgtgcgcagcgcccacccgcatcacctgccgcctggtcaagccccagaagctcagcacgccgcccccactggccgaggaggagggcctggccagcaggatcatagcactggggcccacgggggcacagttcctgagccctgtaatcgtggagatcccgcactttgcctcccatggccgtggagaccgcgagctcgtggttctgaggagcgaaaacggctccgtgtggaaggagcacaggagccgctatggagagagctacctggatcagatcctcaacgggatggacgaagagctggggagcctggaggagctagagaagaagagggtgtgccgaatcatcaccaccgacttcccgctgtacttcgtgatcatgtcacggctctgccaggactacgacaccatcggtcccgaagggggctccctgaagagcaagctggtgcccctggtacaggcaacgttcccggagaatgccgtcaccaagagagtgaagctggctctgcaggcccagcctgtcccggatgagcttgtcactaagctcctgggcaaccaggccacattcagccccattgtcaccgtggagccccggcgccggaagttccaccgccccattgggcttcggatcccactacctccttcctggaccgacaacccgagggacagcggggagggagacaccaccagcctgcgcctgctttgcagcgtcattggaggaacagaccaagcccagtgggaagacataacaggaaccaccaaacttgtatatgccaacgagtgcgccaacttcaccaccaatgtctctgccaggttttggctgtcggactgtcctcggactgctgaggctgtgaactttgccaccctgctgtacaaagagctcactgcagtgccctacatggccaaattcgtcatctttgccaagatgaatgacccccgagaggggcgcctgcgctgctactgcatgacagatgataaagtggacaagaccctggagcagcatgagaacttcgtggaggtggcccggagcagggacatagaggtgttggaaggaatgtccctgtttgcagaactctctgggaacctggtgcctgtgaagaaagctgcccagcagcggagcttccacttccagtcatttcgggagaaccgtctggccatgcctgtaaaggtgagggacagcagtcgagagccgggagggtccctgtcgtttctgcgcaaggcgatgaagtacgaggacacccagcacattctctgccacctgaacatcaccatgcccccctgcgccaagggaagtggagccgaagataggagaaggaccccgacgcccctggccctgcgatacagcattctcagtgagtccacaccaggttctctcagtgggacagagcaggcagagatgaagatggctgttatctcagagcacctcggtctcagctgggcagagttggcccgggagctgcagttcagtgtggaagacatcaacaggatccgagtggaaaatcccaactccctgttggagcagagtgtggccttgctgaacctctgggtcatccgtgaaggccaaaacgcaaacatggagaatctgtacacagccctgcagagcattgaccgtggcgagatcgtgaacatgctggagggttccggccgacagagccgcaacttgaagccagacaggcggcacaccgaccgcgactactcgctgtcaccctcccagatgaatggttactcctcactgcaggacgagctgctgtcccctgcctccctgggctgtgcactttcctctccgctacgtgcagaccagtactggaatgaggtggccgtcctagacgccatccccttggcggccacggagcatgacaccatgctggagatgtctgacatgcaggtgtggtctgcgggcctcacgccttctctggtcactgctgaggactcctctctggagtgtagcaaggctgaggactctgatgccacaggtcacgagtggaagttggagggggcactctcagaggaaccgcggggccccgagttgggctctctggaacttgtggaggacgacacagtggattcagatgccacaaatggccttatcgatttgcttgaacaggaggaaggtcagaggtcagaagagaagctgccaggttctaagaggcaggatgacgcgacaggtgcagggcaggactcagagaatgaagtgtctcttgtttcaggccatcagagggggcaagcccgaatcacacattcccccaccgtgagtcaggtgacggagaggagtcaggacagactgcaggactgggatgcagacggctcgattgtctcatacctgcaagatgctgcacaaggttcctggcaagaggaggtcacgcaaggtccacactcattccagggaacaagtaccatgactgaagggctagagcccggtggatctcaggagtacgagaaggtcctggtgtctgtaagtgagcacacgtggacagaacagcccgaggctgagagctcccaggccgacagggaccggaggcagcaaggccaagaagagcaggtgcaggaggccaagaacaccttcacccaagtggtgcaggatcacacctcgacacccaacccctgaaccccacacactctgccatgcacacaggaggagagctggacctgagggccaccgcagcggtgcacacattcctctgggctgacggcatgacctctgtaagggactcctgctagtcccctcttggcatgaatgactgactgtagacgcatgacctccaggcttcaatcctgcctcttgcaatgacagctgatctgtcggaaccaggacacaaaagcagcaagaagcggggagagagagggatagaaaacaagcgcaggagagcctgcgaacgcaaaagtgaatgagggctttttgtggctggggatgggttttggttttggggttttttttttaaattgttttgacttcgtacagggtactttttcccaacctcatctgtcagaaatccatgtgggcttcctggaaagaaaaaaaaaaaaaagaaaactaggcatgaaatcagtttaacaccttaatcttaagccatgtcctcatctgcccaccctccccaacccacatacctccattccacttgtgacaccccctcgactccctggtgacgctcctcccagatcgctctacatgacattcaggacacacacacacacacacacacaccactcgcctccactgaatctacacacagattttactgtgacttctgaagctgtatagactctgctgtggataaattggaattttttatgttgtctctctctctgccaatttcaatacgaatcatcttccaatggaaaatcattaccttgaagagtgcattcggggttccttgtgttagggacttaagaatctgaggcgaggacccccaggcttacctgtaggactcaaagggagccaggaccccatctgaaagggtctcctctctcagttgggggacaggccggtggctgacccaggattgcaccagcatgtccatagagaagaggttttctatgtcttcaagcactatatcatagtccgtgttcaaagtgtaaactgtacagtaatcagccttgtgtatatgaaaaacaataaatactatgcaaaccaatagaaacatttagcagtacgtacagagcctgacagcgcagctcctgaggacttctgcggctgcaggagaaggagctgtggcctgtctttcagtgaaagaggaaggaaaggagtagggctagtgaatgtatctgccaggtcttagaagtcaggaccacccagggtctcccagagtgaacttggtgctctaagtccaggcagcctgcaggctggggaccctgggtgcaggtgccaggctcgaggctgttccctgtcctgcctcagtgcctcccctctgcccagcccctgtggcctcttggagaggcgagccagggggctccccggaccgcatggccggtgagagtagagtcggaggcggagagcctggacgcccagaggccggggccaggctctgggtcaaggcaggaaggagacagacagctggcagttcctcgcctcggtgccatcagggaggagccttaagttccactagagcctccggcccagggaggccagaatcagcacaatcccggccccgccctcgcggcgggcgcccccagggccaggagagagagacagggctggctcctctcgcccctggagccgcggtgtggacggcccggccccgtccgccccgccgctctgcgggagtgtcctcgggacacacttaaaccttccaagtagcacagaagccccctccacgtcagaggccccctggccgcggggcctgtgagcggagaggggccctgcttcccacacaaatccgccccggtgcacccccggccaggcaggccccggggcggcctaggcgccttgtcggccgggggtggggctgcttttgcttcctttagaggggcgggcagggagaggaagctctagctccgggcctgagtttccccgaggctgcgtcggaggagctgcagggcgagcccggacggctgccgtctccgccagaggccaccccggcccggcctccagggcgcagaggcgcccccctccatcctcccccatcccgggggccacggcaggggggccgcacagcgcggctgggaccgattcggtgacggcccaaggaagctgggctcagggctcgcctctcccgcctcgatcctgcaccttcctctcccaggtcgctgctgcagccaacccagtagcccccttagcgcccccgcggaccccgcagctccagactccgctttggcacctctgctccggctggcatggctgcacgctccggctgctagtaggagccgttaggggaggagtttggggtctccacacgatgcctagagaatgctgcagtctgcacattagacgctttttagaagttttgaaattaccttgatttttttaattgttatgaaaatggatcttttcttgactctcccacatgctctgttatgggagagaatcccctaccctactctgatgtatagaccattctcccttcaccagccgaaccaatgtcaaaattaataaagaaatggactaatggc

SEQ ID NO: 1964 - DNA, 3094 bp, Homo sapiens
  source 1..3094: mol_type = unassigned DNA
gtcacccgggccactcagggcagagcctggctgctgggcagaagggcacttgggccgggctgcttcagccgagagggccattcggtgtcctgcccacagagagagaaacagtgagagaccaagagagcaaaccagagagatagggagggggaatgcaaggggtccctgggggactcaggagtcccagtggagaatgagaggcaggccccccgtggtggccggggccctggctgccagaggaccgggctggtgaggaggcgaggatgtggactttcgtcacccagctgttggtcacgctggtgctgctgagcttcttcctggtcagctgtcagaacgtgatgcacattgtcagggggtccctgtgctttgtgctaaagcacatccaccaggagctggacaaggagctgggggagagcgagggcctcagtgacgacgaggagaccatctccaccagggtggtccggcggcgggtcttcctgaaggggaatgagtttcagaatattccaggggagcaggtgacagaggagcaattcacggatgagcagggcaacattgtcaccaagaaggatcacacctcgacacccaacccctgaaccccacacactctgccatgcacacaggaggagagctggacctgagggccaccgcagcggtgcacacattcctctgggctgacggcatgacctctgtaagggactcctgctagtcccctcttggcatgaatgactgactgtagacgcatgacctccaggcttcaatcctgcctcttgcaatgacagctgatctgtcggaaccaggacacaaaagcagcaagaagcggggagagagagggatagaaaacaagcgcaggagagcctgcgaacgcaaaagtgaatgagggctttttgtggctggggatgggttttggttttggggttttttttttaaattgttttgacttcgtacagggtactttttcccaacctcatctgtcagaaatccatgtgggcttcctggaaagaaaaaaaaaaaaaagaaaactaggcatgaaatcagtttaacaccttaatcttaagccatgtcctcatctgcccaccctccccaacccacatacctccattccacttgtgacaccccctcgactccctggtgacgctcctcccagatcgctctacatgacattcaggacacacacacacacacacacacaccactcgcctccactgaatctacacacagattttactgtgacttctgaagctgtatagactctgctgtggataaattggaattttttatgttgtctctctctctgccaatttcaatacgaatcatcttccaatggaaaatcattaccttgaagagtgcattcggggttccttgtgttagggacttaagaatctgaggcgaggacccccaggcttacctgtaggactcaaagggagccaggaccccatctgaaagggtctcctctctcagttgggggacaggccggtggctgacccaggattgcaccagcatgtccatagagaagaggttttctatgtcttcaagcactatatcatagtccgtgttcaaagtgtaaactgtacagtaatcagccttgtgtatatgaaaaacaataaatactatgcaaaccaatagaaacatttagcagtacgtacagagcctgacagcgcagctcctgaggacttctgcggctgcaggagaaggagctgtggcctgtctttcagtgaaagaggaaggaaaggagtagggctagtgaatgtatctgccaggtcttagaagtcaggaccacccagggtctcccagagtgaacttggtgctctaagtccaggcagcctgcaggctggggaccctgggtgcaggtgccaggctcgaggctgttccctgtcctgcctcagtgcctcccctctgcccagcccctgtggcctcttggagaggcgagccagggggctccccggaccgcatggccggtgagagtagagtcggaggcggagagcctggacgcccagaggccggggccaggctctgggtcaaggcaggaaggagacagacagctggcagttcctcgcctcggtgccatcagggaggagccttaagttccactagagcctccggcccagggaggccagaatcagcacaatcccggccccgccctcgcggcgggcgcccccagggccaggagagagagacagggctggctcctctcgcccctggagccgcggtgtggacggcccggccccgtccgccccgccgctctgcgggagtgtcctcgggacacacttaaaccttccaagtagcacagaagccccctccacgtcagaggccccctggccgcggggcctgtgagcggagaggggccctgcttcccacacaaatccgccccggtgcacccccggccaggcaggccccggggcggcctaggcgccttgtcggccgggggtggggctgcttttgcttcctttagaggggcgggcagggagaggaagctctagctccgggcctgagtttccccgaggctgcgtcggaggagctgcagggcgagcccggacggctgccgtctccgccagaggccaccccggcccggcctccagggcgcagaggcgcccccctccatcctcccccatcccgggggccacggcaggggggccgcacagcgcggctgggaccgattcggtgacggcccaaggaagctgggctcagggctcgcctctcccgcctcgatcctgcaccttcctctcccaggtcgctgctgcagccaacccagtagcccccttagcgcccccgcggaccccgcagctccagactccgctttggcacctctgctccggctggcatggctgcacgctccggctgctagtaggagccgttaggggaggagtttggggtctccacacgatgcctagagaatgctgcagtctgcacattagacgctttttagaagttttgaaattaccttgatttttttaattgttatgaaaatggatcttttcttgactctcccacatgctctgttatgggagagaatcccctaccctactctgatgtatagaccattctcccttcaccagccgaaccaatgtcaaaattaataaagaaatggactaatggc

SEQ ID NO: 1965 - DNA, 11775 bp, Homo sapiens
  source 1..11775: mol_type = unassigned DNA
atgatgaacgaagatgcagctcagaaaagcgacagtggagagaagttcaacggcagtagtcagaggagaaaaagacccaagaagtctgacagcaatgcaagcttcctccgtgctgccagagcaggcaacctggacaaagttgtggaatatctgaaggggggcatagacatcaatacctgcaatcagaatggactcaacgctctccatctggctgccaaggaaggccacgtggggctggtgcaggagctgctgggaagagggtcctctgtggattctgccactaagaagggaaataccgctcttcacattgcatctttggctggacaagcagaagttgtcaaagttcttgttaaggaaggagccaatattaatgcacagtctcagaatggctttactcctttatacatggctgcccaagagaatcacattgatgttgtaaaatatttgctggaaaatggagctaatcagagcactgctacagaggatggctttactcctctagctgtggcactccagcaaggacacaaccaggcggtggccatcctcttggagaatgacaccaaagggaaagtgaggctgccagctctgcatattgccgctaggaaagacgacaccaaatctgccgcacttctgcttcagaatgaccacaatgctgacgtacaatccaagatgatggtgaataggacaactgagagtggttttacccctttgcacatagctgcacattacggaaatgtcaacgtggcaactcttcttctaaaccggggagctgctgtggacttcacagccaggaatggaatcactcctctgcatgtggcttccaaaagaggaaatacaaacatggtgaagctcttactggatcgaggcggtcagatcgatgccaaaactagggatgggttgacaccacttcactgtgctgcacgaagtgggcatgaccaagtggtggaacttctgttggaacggggtgcccccttgctggcaaggactaagaatgggctgtctccactacacatggctgcccagggagaccacgtggaatgtgtgaagcacctgttacagcacaaggcacctgttgatgatgtcaccctagactacctgacagccctccacgttgctgcgcactgtggccactaccgtgtaaccaaactccttttagacaagagagccaatccgaacgccagagccctgaatggttttactccactgcacattgcctgcaagaaaaaccgcatcaaagtcatggaactgctggtgaaatatggggcttcaatccaagctataacagagtctggcctcacaccaatacatgtggctgccttcatgggccacttgaacattgtcctccttctgctgcagaacggagcctctccagatgtcactaacattcgtggtgagacggcactacacatggcagcccgagccgggcaggtggaagtggtccgatgcctcctgagaaatggtgcccttgttgatgccagagccagggaggaacagacacctttacatattgcctcccgcctgggtaagacagaaattgtccagctgcttctacaacatatggctcatccagatgcggccactacaaatgggtacacaccactgcacatctctgcccgggagggccaggtggatgtggcatcagtcctattggaagcaggagcagcccactccttagctaccaagaagggttttactcccctgcatgtagcagccaagtatggaagcctggatgtggcaaaacttctcttgcaacgccgtgctgccgcagattctgcagggaagaacggccttaccccgctccatgttgctgctcattatgacaaccagaaggtggcgctgctgttactggagaagggtgcttcccctcatgccactgccaagaatggctatactccgttacatattgctgccaagaagaatcaaatgcagatagcttccacactcctgaactatggagcagagacaaacattgtgacaaagcaaggagtaactccactccatctggcctcgcaggaggggcacacagatatggttaccttgcttctggataagggagccaatatccacatgtcaactaagagtggactcacatccttacaccttgcagcccaggaagataaagtgaatgttgctgatattctcaccaagcatggagctgatcaggatgctcatacaaagcttggttacacacctttaattgtggcctgtcactatggaaatgtgaaaatggtcaactttcttctgaagcagggagcaaatgttaacgcaaaaaccaagaacggctacacgcctttgcaccaggccgctcagcagggtcacacgcacatcatcaacgtcctgctccagcatggggccaagcccaacgccaccactgcgaatggcaacactgccttggcgattgctaagcgtctgggctacatctccgtggtcgacaccctgaaggttgtgactgaggaggtcaccaccaccaccacaactattacagaaaaacacaaactaaatgtacctgagacgatgactgaggttcttgatgtttctgatgaagagggtgatgacacaatgactggtgatgggggagaataccttaggcctgaggacctaaaagaactgggtgatgactcactacccagcagtcagttcctggatggtatgaattacctgcgatacagcttggagggaggacgatctgacagccttcgatccttcagttccgacaggtctcacactctgagccatgcctcctacctgagggacagtgccgtgatggatgactcagttgtgattcccagtcaccaggtgtcaactctagccaaggaggcagaaaggaattcttatcgcctaagctggggcactgagaacttagacaacgtggctctttcttctagtcctattcattcaggtttcctggttagttttatggtggatgcccgaggtggtgctatgcgaggatgcagacacaatgggctccgaatcattattccacctcggaaatgtactgctccaacgcgagtcacctgccgactggtcaagcgccacagactggcaacaatgcctccaatggtggaaggagaaggcctggccagtcgcctgatcgaagttggaccttctggtgctcagttccttgggcctgtgatcgtggagatccctcactttgcggcccttcgaggaaaggaaagggaactggtggtcctgcgcagtgagaatggggacagctggaaagagcatttctgtgactacactgaagatgaattgaatgaaattcttaacggcatggatgaagtactggatagcccagaagacctagaaaagaaacgaatctgccgcatcatcacccgagacttcccacagtactttgcagtggtgtctcgtatcaaacaggacagcaatctgattggcccagaaggaggtgtactgagcagcacagtggtgccccaggtgcaggccgtcttcccagagggggcactcaccaagcggatccgcgtaggcctgcaggctcaacctatgcacagtgagctggttaagaagatcctaggcaacaaagctaccttcagccctatagtcactttggaacctagaagaagaaaattccacaaaccaattaccatgaccattcctgtccccaaagcttcaagtgatgtcatgttgaatggttttgggggagatgcaccaaccttaagattactatgcagcataacaggtggaaccacccctgcccagtgggaagatattacaggaactacgccattaacatttgtcaatgaatgtgtttcctttacaacaaacgtgtctgccaggttctggctgatagattgtcgacagatccaggaatccgttacttttgcatcacaagtatacagagaaattatctgcgtaccttatatggccaaatttgtagtgtttgccaaatcacatgaccccattgaagccaggttgaggtgtttctgcatgactgatgataaagtggataagacccttgaacaacaagaaaattttgctgaggtggccagaagcagggatgtggaggtgttagaaggaaaacccatctacgttgattgtttcggcaacttggtaccattaactaaaagtggccagcatcatatattcagtttttttgccttcaaagaaaatagacttcctctatttgtcaaggtacgcgatacgactcaggaaccttgcggacgactatcatttatgaaggagccaaaatccacgagaggcctggtgcatcaagctatttgcaacttaaacatcactttgccgatttatacaaaggaatcagagtcagatcaagaacaggaggaagagatcgatatgacatcagaaaaaaatgatgagacagaatctacagaaacatctgtcctgaaaagtcacctggttaatgaagttcctgtcctagcaagtccggacttgctctctgaagtttctgagatgaaacaagatttgatcaaaatgaccgccatcttgaccacagatgtgtctgataaggcaggttctattaaagtgaaggagctggtgaaggctgctgaggaagagccaggagagccttttgaaatcgttgaaagagttaaagaggacttagagaaagtgaatgaaatcctgagaagtggaacctgcacaagagatgaaagcagtgtgcagagctctcggtctgagagaggattagttgaagaggaatgggttattgtcagtgatgaggaaatagaagaggctaggcaaaaagcacctttagaaatcactgaatatccatgtgtagaagttagaatagataaagagatcaaaggaaaagtagagaaagactcaactgggctagtgaactaccttactgatgatctgaatacctgtgtgcctcttcccaaagagcagctgcagacagttcaagataaggcagggaagaaatgtgaggctctggctgttggcaggagctctgaaaaggaagggaaagacatacccccagatgagacacagagtacacagaaacagcacaaaccaagcttgggaataaagaagccagtaagaaggaaattaaaagaaaagcagaaacaaaaagaggaaggtttacaagctagtgcagagaaagctgaacttaaaaaaggtagttcagaagagtcattaggtgaagacccaggtttagcccctgaaccccttcccactgtcaaggccacatctcctttgatagaagaaactcccattggttccataaaggacaaagtaaaggcccttcagaagcgagtggaagatgaacagaaaggtcgaagcaagttgcccatcagagtcaaaggcaaggaggacgtgccaaaaaagaccacccacaggccacatccagctgcgtcaccctctctgaagtcagagagacatgcgccagggtctccctcccctaaaacagaaagacactctactctttcctcttccgcaaaaactgaaaggcaccctccagtatcaccatcaagtaaaactgagaaacactcacctgtgtcaccctctgcaaaaacggaaagacattcacctgcgtcatcatcgagtaaaactgagaaacactcacctgtatcaccctcgacaaaaactgaaaggcactctcctgtgtcatctacaaaaacagaaagacacccacctgtttcgccttcaggcaaaacagacaaacgtccacctgtatcgccctccgggaggacagaaaaacacccgccagtatcgcctgggagaacagaaaaacgcttgcctgtttcaccctccggaagaacggacaagcaccaacctgtatcaacagctgggaaaactgagaagcacctgcctgtgtcaccttctggcaaaacagaaaagcaaccacctgtatcccccacttcaaaaacagagaggattgaggaaaccatgtctgttcgggagctgatgaaggctttccagtcaggtcaggacccttctaaacataaaactggactctttgagcacaaatcagcaaaacaaaagcagccacaagagaaaggtaaagttcgggtagaaaaagaaaaggggccgatactaacccagagagaagctcagaaaacagagaatcagacaatcaaacgaggccagagactcccggtaacgggcacagcagaatccaaaagaggagttcgtgtttcctccataggagttaagaaagaagatgcagctggaggaaaggagaaagttctcagccacaaaatacctgaacctgttcagtcagtgcctgaagaagaaagccacagagagagcgaagtgcccaaagaaaagatggctgatgagcagggagacatggatctacagatcagcccagataggaaaacctccactgacttctctgaggtcattaagcaagagttggaagacaatgacaaataccaacaattccgcctgagtgaggagacagaaaaggcacagcttcacttagaccaagtactcactagtcctttcaacacaacatttccactcgactacatgaaagatgagttccttccagctctgtctttacaaagcggtgctttagatggcagttctgaaagcctaaagaatgagggggtagccggctctccgtgtggcagcctgatggaggggacccctcagattagttcagaagaaagctataagcatgaaggcctagcagagacccctgagacgagcccagaaagcctttctttctcaccaaagaaaagtgaggagcaaactggggaaacaaaggaaagcaccaagacagaaaccaccacagaaattcgttcagaaaaagagcatcccacgaccaaagacattactggtggctctgaagagcgaggtgccacagtcactgaggactcagagacctctactgagagttttcagaaagaggccactctaggctctcccaaagacacaagccctaaaagacaagatgattgcacaggcagctgtagtgtagcattagctaaagagacacctacaggactgactgaggaggcagcctgtgatgaaggtcaacgtacctttggtagttcagcccacaagacacaaactgatagtgaggttcaagaatccacagccacctcagacgagacaaaggccttgccgctgcctgaggcttctgtaaagacagatacaggaactgaatcaaaacctcagggagtcattagaagtccccaagggttagaacttgcactccctagccgagatagcgaagtcctcagcgctgtggctgatgactcattagcagtgagccacaaagactctctggaagccagccctgtgctagaagataactcttcacacaaaacccctgattctctggagccaagtcctctgaaagaatccccttgccgtgactctctggaaagcagccctgttgaaccaaagatgaaggctggaatttttccaagtcactttcctcttcctgcagctgttgccaaaacagaactcttgacggaagtggcctctgtgcggtcccggctactccgagaccctgatggcagtgctgaggatgacagtcttgagcagacatcgctcatggagagctcagggaagagccccctttctcctgacacccccagctctgaagaagtcagctatgaggttacacccaaaaccacagatgtaagtacaccaaaaccagctgtgattcatgaatgtgcagaggaggatgattcagaaaacggggagaaaaagaggttcacacctgaagaggagatgtttaaaatggtaaccaaaatcaaaatgtttgatgaacttgaacaagaagcaaagcagaaaagggactacaaaaaagaacccaaacaagaagaatcttcttcatcttctgacccagatgctgactgttcagtagatgtggatgaaccaaaacatacaggcagtggggaggatgaaagtggtgtccctgtgttagtaacttcggagagcaggaaggtgtcttcctcctcagaaagtgaacctgagttggcacagcttaaaaaaggtgctgactcaggccttttaccagaaccagtgattcgagtacaacctccttctccacttccatcaagcatggactccaattccagtccagaagaagtacaattccagcctgtcgtttccaaacaatatactttcaagatgaatgaagatactcaggaagagccaggcaaatcagaagaagaaaaagattctgaatcccatttagctgaagaccgtcatgctgtttccactgaggctgaagacaggtcttatgataagctaaacagagacactgatcagccaaaaatctgtgatggccatggatgtgaggccatgagtcctagcagctcagctgctcctgtctcttcaggtctacagagtccgactggtgatgatgttgatgaacagccagtcatctataaagaatcattagctctccaaggcactcatgaaaaagacacagagggagaagagcttgatgtttctagagcagaatctccacaagcagattgccccagtgaaagcttttcatcttcatcctctttgcctcattgtttggtatctgaaggaaaagaattagatgaagacatatctgccacatcttctattcaaaaaacagaggtcacaaaaactgatgaaacatttgagaacttaccaaaggactgcccctctcaagactcatccattactactcaaacagatagattttccatggatgttcccgtgtctgacctagctgagaatgatgaaatctatgatccacaaatcactagcccttatgaaaatgtcccttcccaatcttttttctctagtgaagaaagcaaaacccaaacagatgcaaatcacaccacaagttttcactcttctgaagtgtattctgttaccatcacatcccctgttgaagacgttgtagtggcaagctcctctagtggaactgttttaagcaaagaatctaattttgagggccaggacataaaaatggaatcccaacaggaaagtaccttgtgggaaatgcaatcagacagtgtctcttcatctttcgagcctactatgtccgctacaacaacagttgttggtgaacaaataagcaaagtcatcatcacaaaaactgatgtggattctgattcttggagtgaaattcgggaagacgatgaagcctttgaggctcgtgtgaaagaggaagaacaaaagatatttggtttgatggtagacagacaatcacagggtaccacccctgacaccactcctgctaggaccccaactgaagaggggaccccaacaagtgagcaaaacccatttctgtttcaggaaggaaaattgtttgaaatgacccgaagtggtgccattgatatgaccaaaaggtcctatgcagatgaaagttttcactttttccaaattggtcaagaatccagggaagagactctctctgaagatgtgaaagaaggggctactggggctgatcccctaccgctggagacatcagctgaatcactagcactttcagaatcaaaagaaacagtggatgatgaggcagacttacttccagatgacgtgagtgaggaagtagaggaaatacctgcttcggatgctcaacttaactcccaaatggggatttcagcctccactgaaacacctacaaaagaagctgttagtgtagggaccaaggacctccccaccgtgcaaacgggtgatatacctcctctctctggtgtaaagcagatatcctgccccgactcttctgaaccagctgtacaagtccagttagatttttccacactcaccaggtctgtttattcagataggggtgatgattctcccgattcttccccagaagaacagaaatcagtaatcgagattcctactgcacccatggagaatgtgccttttactgaaagcaaatccaaaattcctgtaaggactatgcccacttccaccccagcacctccatctgcagagtatgagagttcagtttctgaagattttctatccagtgtagatgaggaaaataaggcggatgaagcaaaaccaaagtccaaactccctgtcaaagtacccctccaaagagttgaacagcagctctcagatctagacacctctgtccagaagacagtggctcctcagggacaggacatggcaagcatcgcaccagataatagaagcaaatctgaatctgatgctagttctttggattcaaagaccaaatgcccagtaaaaacccgaagttacactgagacagaaacagagagcagagagagggccgaggaacttgagttagaatcagaagaaggggccacaagaccaaagatacttacatcccgattgccagttaagagcagaagcactacatcttcctgcagggggggcacgagccccacaaaagaaagtaaggagcatttctttgacctttacagaaattccatagaattctttgaggagattagtgatgaggcttccaaattagtggataggctgacacagtcagagagggagcaggaaatagtttcagacgatgaaagtagtagtgccctggaagtatcagtaattgaaaatctgccacctgttgagaccgagcactcagttcctgaggacatctttgacacaaggcccatttgggatgagtctattgagactctgattgaacgcatccctgatgaaaatggccatgaccatgctgaagatccacaggatgagcaggaacggatcgaggaaaggctggcttatattgctgatcaccttggcttcagctggacagaattagcaagagaactggatttcactgaggagcaaattcatcaaattcgaattgaaaatcccaactctcttcaagaccagagtcatgcactgttgaagtactggctagagagggatgggaaacatgctacagataccaacctcgttgaatgtctcaccaagatcaaccgaatggatattgttcatctcatggagaccaacacagaacctctccaggagcgcatcagtcatagttatgcagaaattgaacagaccattacactggatcatagtgaagggttctcggtacttcaagaggagttatgcactgcacagcacaagcagaaagaggagcaagctgtttctaaagaaagtgagacctgcgatcaccctcctatcgtctcagaggaagacatttctgttggttattccacttttcaggatggcgtccccaaaactgagggggacagctcagcaacagcactctttccccaaactcacaaggagcaagttcaacaggatttctcagggaaaatgcaagacctgcctgaagagtcatctctggaatatcagcaggaatattttgtgacaactccaggaacagaaacatcagagactcagaaggctatgatagtacccagctctcccagcaagacacctgaggaagttagcacccctgcagaggaggagaagctgtacctccagaccccaacatccagcgagcggggaggctctcccatcatacaagaacccgaagagccctcagagcacagagaggagagctctccgcggaaaaccagcctcgtaatagtggagtctgccgataaccagcctgagacctgtgaaagactcgatgaagatgcagcttttgaaaagggagacgatatgcctgaaatacccccagaaacagtcacagaagaagaatacattgatgagcatggacacaccgtggtaaagaaggttactaggaaaatcattaggcggtatgtatcctctgaaggcacagagaaagaagagattatggtgcagggaatgccacaggaacctgtcaacatcgaggaaggggatggctattccaaagttataaagcgtgttgtattgaagagtgacaccgagcagtcagaggacaacaatgagtaa

SEQ ID NO: 1966 - DNA, 5589 bp, Homo sapiens
  source 1..5589: mol_type = unassigned DNA
atgagtcaccacatccagcggtctgacagcaatgcaagcttcctccgtgctgccagagcaggcaacctggacaaagttgtggaatatctgaaggggggcatagacatcaatacctgcaatcagaatggactcaacgctctccatctggctgccaaggaaggccacgtggggctggtgcaggagctgctgggaagagggtcctctgtggattctgccactaagaagggaaataccgctcttcacattgcatctttggctggacaagcagaagttgtcaaagttcttgttaaggaaggagccaatattaatgcacagtctcagaatggctttactcctttatacatggctgcccaagagaatcacattgatgttgtaaaatatttgctggaaaatggagctaatcagagcactgctacagaggatggctttactcctctagctgtggcactccagcaaggacacaaccaggcggtggccatcctcttggagaatgacaccaaagggaaagtgaggctgccagctctgcatattgccgctaggaaagacgacaccaaatctgccgcacttctgcttcagaatgaccacaatgctgacgtacaatccaagatgatggtgaataggacaactgagagtggttttacccctttgcacatagctgcacattacggaaatgtcaacgtggcaactcttcttctaaaccggggagctgctgtggacttcacagccaggaatggaatcactcctctgcatgtggcttccaaaagaggaaatacaaacatggtgaagctcttactggatcgaggcggtcagatcgatgccaaaactagggatgggttgacaccacttcactgtgctgcacgaagtgggcatgaccaagtggtggaacttctgttggaacggggtgcccccttgctggcaaggactaagaatgggctgtctccactacacatggctgcccagggagaccacgtggaatgtgtgaagcacctgttacagcacaaggcacctgttgatgatgtcaccctagactacctgacagccctccacgttgctgcgcactgtggccactaccgtgtaaccaaactccttttagacaagagagccaatccgaacgccagagccctgaatggttttactccactgcacattgcctgcaagaaaaaccgcatcaaagtcatggaactgctggtgaaatatggggcttcaatccaagctataacagagtctggcctcacaccaatacatgtggctgccttcatgggccacttgaacattgtcctccttctgctgcagaacggagcctctccagatgtcactaacattcgtggtgagacggcactacacatggcagcccgagccgggcaggtggaagtggtccgatgcctcctgagaaatggtgcccttgttgatgccagagccagggaggaacagacacctttacatattgcctcccgcctgggtaagacagaaattgtccagctgcttctacaacatatggctcatccagatgcggccactacaaatgggtacacaccactgcacatctctgcccgggagggccaggtggatgtggcatcagtcctattggaagcaggagcagcccactccttagctaccaagaagggttttactcccctgcatgtagcagccaagtatggaagcctggatgtggcaaaacttctcttgcaacgccgtgctgccgcagattctgcagggaagaacggccttaccccgctccatgttgctgctcattatgacaaccagaaggtggcgctgctgttactggagaagggtgcttcccctcatgccactgccaagaatggctatactccgttacatattgctgccaagaagaatcaaatgcagatagcttccacactcctgaactatggagcagagacaaacattgtgacaaagcaaggagtaactccactccatctggcctcgcaggaggggcacacagatatggttaccttgcttctggataagggagccaatatccacatgtcaactaagagtggactcacatccttacaccttgcagcccaggaagataaagtgaatgttgctgatattctcaccaagcatggagctgatcaggatgctcatacaaagcttggttacacacctttaattgtggcctgtcactatggaaatgtgaaaatggtcaactttcttctgaagcagggagcaaatgttaacgcaaaaaccaagaacggctacacgcctttgcaccaggccgctcagcagggtcacacgcacatcatcaacgtcctgctccagcatggggccaagcccaacgccaccactgcgaatggcaacactgccttggcgattgctaagcgtctgggctacatctccgtggtcgacaccctgaaggttgtgactgaggaggtcaccaccaccaccacaactattacagaaaaacacaaactaaatgtacctgagacgatgactgaggttcttgatgtttctgatgaagagggtgatgacacaatgactggtgatgggggagaataccttaggcctgaggacctaaaagaactgggtgatgactcactacccagcagtcagttcctggatggtatgaattacctgcgatacagcttggagggaggacgatctgacagccttcgatccttcagttccgacaggtctcacactctgagccatgcctcctacctgagggacagtgccgtgatggatgactcagttgtgattcccagtcaccaggtgtcaactctagccaaggaggcagaaaggaattcttatcgcctaagctggggcactgagaacttagacaacgtggctctttcttctagtcctattcattcaggccgcgcctctccatgtcttgaacgtgacaacagcagtttcctggttagttttatggtggatgcccgaggtggtgctatgcgaggatgcagacacaatgggctccgaatcattattccacctcggaaatgtactgctccaacgcgagtcacctgccgactggtcaagcgccacagactggcaacaatgcctccaatggtggaaggagaaggcctggccagtcgcctgatcgaagttggaccttctggtgctcagttccttggtaaacttcacctgccaacggctcctcccccacttaatgagggagaaagtttggtcagccgcattcttcagctggggcctcctggaaccaaattccttgggcctgtgatcgtggagatccctcactttgcggcccttcgaggaaaggaaagggaactggtggtcctgcgcagtgagaatggggacagctggaaagagcatttctgtgactacactgaagatgaattgaatgaaattcttaacggcatggatgaagtactggatagcccagaagacctagaaaagaaacgaatctgccgcatcatcacccgagacttcccacagtactttgcagtggtgtctcgtatcaaacaggacagcaatctgattggcccagaaggaggtgtactgagcagcacagtggtgccccaggtgcaggccgtcttcccagagggggcactcaccaagcggatccgcgtaggcctgcaggctcaacctatgcacagtgagctggttaagaagatcctaggcaacaaagctaccttcagccctatagtcactttggaacctagaagaagaaaattccacaaaccaattaccatgaccattcctgtccccaaagcttcaagtgatgtcatgttgaatggttttgggggagatgcaccaaccttaagattactatgcagcataacaggtggaaccacccctgcccagtgggaagatattacaggaactacgccattaacatttgtcaatgaatgtgtttcctttacaacaaacgtgtctgccaggttctggctgatagattgtcgacagatccaggaatccgttacttttgcatcacaagtatacagagaaattatctgcgtaccttatatggccaaatttgtagtgtttgccaaatcacatgaccccattgaagccaggttgaggtgtttctgcatgactgatgataaagtggataagacccttgaacaacaagaaaattttgctgaggtggccagaagcagggatgtggaggtgttagaaggaaaacccatctacgttgattgtttcggcaacttggtaccattaactaaaagtggccagcatcatatattcagtttttttgccttcaaagaaaatagacttcctctatttgtcaaggtacgcgatacgactcaggaaccttgcggacgactatcatttatgaaggagccaaaatccacgagaggcctggtgcatcaagctatttgcaacttaaacatcactttgccgatttatacaaaggaatcagagtcagatcaagaacaggaggaagagattggtcaagaatccagacgatatccacaggatgagcaggaacggatcgaggaaaggctggcttatattgctgatcaccttggcttcagctggacagaattagcaagagaactggatttcactgaggagcaaattcatcaaattcgaattgaaaatcccaactctcttcaagaccagagtcatgcactgttgaagtactggctagagagggatgggaaacatgctacagataccaacctcgttgaatgtctcaccaagatcaaccgaatggatattgttcatctcatggagaccaacacagaacctctccaggagcgcatcagtcatagttatgcagaaattgaacagaccattacactggatcatagtgaagggttctcggtacttcaagaggagttatgcactgcacagcacaagcagaaagaggagcaagctgtttctaaagaaagtgagacctgcgatcaccctcctatcgtctcagaggaagacatttctgttggttattccacttttcaggatggcgtccccaaaactgagggggacagctcagcaacagcactctttccccaaactcacaaggagcaagttcaacaggatttctcagggaaaatgcaagacctgcctgaagagtcatctctggaatatcagcaggaatattttgtgacaactccaggaacagaaacatcagagactcagaaggctatgatagtacccagctctcccagcaagacacctgaggaagttagcacccctgcagaggaggagaagctgtacctccagaccccaacatccagcgagcggggaggctctcccatcatacaagaacccgaagagccctcagagcacagagaggagagctctccgcggaaaaccagcctcgtaatagtggagtctgccgataaccagcctgagacctgtgaaagactcgatgaagatgcagcttttgaaaagggagacgatatgcctgaaatacccccagaaacagtcacagaagaagaatacattgatgagcatggacacaccgtggtaaagaaggttactaggaaaatcattaggcggtatgtatcctctgaaggcacagagaaagaagagattatggtgcagggaatgccacaggaacctgtcaacatcgaggaaggggatggctattccaaagttataaagcgtgttgtattgaagagtgacaccgagcagtcagaggattctatggaa

SEQ ID NO: 1967 - DNA, 14196 bp, Homo sapiens
  source 1..14196: mol_type = unassigned DNA
gtacaggcggcacggtttgatggcagagatattttctttccaaactgttcaaaatgatgaacgaagatgcagctcagaaaagcgacagtggagagaagttcaacggcagtagtcagaggagaaaaagacccaagaagtctgacagcaatgcaagcttcctccgtgctgccagagcaggcaacctggacaaagttgtggaatatctgaaggggggcatagacatcaatacctgcaatcagaatggactcaacgctctccatctggctgccaaggaaggccacgtggggctggtgcaggagctgctgggaagagggtcctctgtggattctgccactaagaagggaaataccgctcttcacattgcatctttggctggacaagcagaagttgtcaaagttcttgttaaggaaggagccaatattaatgcacagtctcagaatggctttactcctttatacatggctgcccaagagaatcacattgatgttgtaaaatatttgctggaaaatggagctaatcagagcactgctacagaggatggctttactcctctagctgtggcactccagcaaggacacaaccaggcggtggccatcctcttggagaatgacaccaaagggaaagtgaggctgccagctctgcatattgccgctaggaaagacgacaccaaatctgccgcacttctgcttcagaatgaccacaatgctgacgtacaatccaagatgatggtgaataggacaactgagagtggttttacccctttgcacatagctgcacattacggaaatgtcaacgtggcaactcttcttctaaaccggggagctgctgtggacttcacagccaggaatggaatcactcctctgcatgtggcttccaaaagaggaaatacaaacatggtgaagctcttactggatcgaggcggtcagatcgatgccaaaactagggatgggttgacaccacttcactgtgctgcacgaagtgggcatgaccaagtggtggaacttctgttggaacggggtgcccccttgctggcaaggactaagaatgggctgtctccactacacatggctgcccagggagaccacgtggaatgtgtgaagcacctgttacagcacaaggcacctgttgatgatgtcaccctagactacctgacagccctccacgttgctgcgcactgtggccactaccgtgtaaccaaactccttttagacaagagagccaatccgaacgccagagccctgaatggttttactccactgcacattgcctgcaagaaaaaccgcatcaaagtcatggaactgctggtgaaatatggggcttcaatccaagctataacagagtctggcctcacaccaatacatgtggctgccttcatgggccacttgaacattgtcctccttctgctgcagaacggagcctctccagatgtcactaacattcgtggtgagacggcactacacatggcagcccgagccgggcaggtggaagtggtccgatgcctcctgagaaatggtgcccttgttgatgccagagccagggaggaacagacacctttacatattgcctcccgcctgggtaagacagaaattgtccagctgcttctacaacatatggctcatccagatgcggccactacaaatgggtacacaccactgcacatctctgcccgggagggccaggtggatgtggcatcagtcctattggaagcaggagcagcccactccttagctaccaagaagggttttactcccctgcatgtagcagccaagtatggaagcctggatgtggcaaaacttctcttgcaacgccgtgctgccgcagattctgcagggaagaacggccttaccccgctccatgttgctgctcattatgacaaccagaaggtggcgctgctgttactggagaagggtgcttcccctcatgccactgccaagaatggctatactccgttacatattgctgccaagaagaatcaaatgcagatagcttccacactcctgaactatggagcagagacaaacattgtgacaaagcaaggagtaactccactccatctggcctcgcaggaggggcacacagatatggttaccttgcttctggataagggagccaatatccacatgtcaactaagagtggactcacatccttacaccttgcagcccaggaagataaagtgaatgttgctgatattctcaccaagcatggagctgatcaggatgctcatacaaagcttggttacacacctttaattgtggcctgtcactatggaaatgtgaaaatggtcaactttcttctgaagcagggagcaaatgttaacgcaaaaaccaagaacggctacacgcctttgcaccaggccgctcagcagggtcacacgcacatcatcaacgtcctgctccagcatggggccaagcccaacgccaccactgcgaatggcaacactgccttggcgattgctaagcgtctgggctacatctccgtggtcgacaccctgaaggttgtgactgaggaggtcaccaccaccaccacaactattacagaaaaacacaaactaaatgtacctgagacgatgactgaggttcttgatgtttctgatgaagagggtgatgacacaatgactggtgatgggggagaataccttaggcctgaggacctaaaagaactgggtgatgactcactacccagcagtcagttcctggatggtatgaattacctgcgatacagcttggagggaggacgatctgacagccttcgatccttcagttccgacaggtctcacactctgagccatgcctcctacctgagggacagtgccgtgatggatgactcagttgtgattcccagtcaccaggtgtcaactctagccaaggaggcagaaaggaattcttatcgcctaagctggggcactgagaacttagacaacgtggctctttcttctagtcctattcattcaggtttcctggttagttttatggtggatgcccgaggtggtgctatgcgaggatgcagacacaatgggctccgaatcattattccacctcggaaatgtactgctccaacgcgagtcacctgccgactggtcaagcgccacagactggcaacaatgcctccaatggtggaaggagaaggcctggccagtcgcctgatcgaagttggaccttctggtgctcagttccttggtaaacttcacctgccaacggctcctcccccacttaatgagggagaaagtttggtcagccgcattcttcagctggggcctcctggaaccaaattccttgggcctgtgatcgtggagatccctcactttgcggcccttcgaggaaaggaaagggaactggtggtcctgcgcagtgagaatggggacagctggaaagagcatttctgtgactacactgaagatgaattgaatgaaattcttaacggcatggatgaagtactggatagcccagaagacctagaaaagaaacgaatctgccgcatcatcacccgagacttcccacagtactttgcagtggtgtctcgtatcaaacaggacagcaatctgattggcccagaaggaggtgtactgagcagcacagtggtgccccaggtgcaggccgtcttcccagagggggcactcaccaagcggatccgcgtaggcctgcaggctcaacctatgcacagtgagctggttaagaagatcctaggcaacaaagctaccttcagccctatagtcactttggaacctagaagaagaaaattccacaaaccaattaccatgaccattcctgtccccaaagcttcaagtgatgtcatgttgaatggttttgggggagatgcaccaaccttaagattactatgcagcataacaggtggaaccacccctgcccagtgggaagatattacaggaactacgccattaacatttgtcaatgaatgtgtttcctttacaacaaacgtgtctgccaggttctggctgatagattgtcgacagatccaggaatccgttacttttgcatcacaagtatacagagaaattatctgcgtaccttatatggccaaatttgtagtgtttgccaaatcacatgaccccattgaagccaggttgaggtgtttctgcatgactgatgataaagtggataagacccttgaacaacaagaaaattttgctgaggtggccagaagcagggatgtggaggtgttagaaggaaaacccatctacgttgattgtttcggcaacttggtaccattaactaaaagtggccagcatcatatattcagtttttttgccttcaaagaaaatagacttcctctatttgtcaaggtacgcgatacgactcaggaaccttgcggacgactatcatttatgaaggagccaaaatccacgagaggcctggtgcatcaagctatttgcaacttaaacatcactttgccgatttatacaaaggaatcagagtcagatcaagaacaggaggaagagatcgatatgacatcagaaaaaaatgatgagacagaatctacagaaacatctgtcctgaaaagtcacctggttaatgaagttcctgtcctagcaagtccggacttgctctctgaagtttctgagatgaaacaagatttgatcaaaatgaccgccatcttgaccacagatgtgtctgataaggcaggttctattaaagtgaaggagctggtgaaggctgctgaggaagagccaggagagccttttgaaatcgttgaaagagttaaagaggacttagagaaagtgaatgaaatcctgagaagtggaacctgcacaagagatgaaagcagtgtgcagagctctcggtctgagagaggattagttgaagaggaatgggttattgtcagtgatgaggaaatagaagaggctaggcaaaaagcacctttagaaatcactgaatatccatgtgtagaagttagaatagataaagagatcaaaggaaaagtagagaaagactcaactgggctagtgaactaccttactgatgatctgaatacctgtgtgcctcttcccaaagagcagctgcagacagttcaagataaggcagggaagaaatgtgaggctctggctgttggcaggagctctgaaaaggaagggaaagacatacccccagatgagacacagagtacacagaaacagcacaaaccaagcttgggaataaagaagccagtaagaaggaaattaaaagaaaagcagaaacaaaaagaggaaggtttacaagctagtgcagagaaagctgaacttaaaaaaggtagttcagaagagtcattaggtgaagacccaggtttagcccctgaaccccttcccactgtcaaggccacatctcctttgatagaagaaactcccattggttccataaaggacaaagtaaaggcccttcagaagcgagtggaagatgaacagaaaggtcgaagcaagttgcccatcagagtcaaaggcaaggaggacgtgccaaaaaagaccacccacaggccacatccagctgcgtcaccctctctgaagtcagagagacatgcgccagggtctccctcccctaaaacagaaagacactctactctttcctcttccgcaaaaactgaaaggcaccctccagtatcaccatcaagtaaaactgagaaacactcacctgtgtcaccctctgcaaaaacggaaagacattcacctgcgtcatcatcgagtaaaactgagaaacactcacctgtatcaccctcgacaaaaactgaaaggcactctcctgtgtcatctacaaaaacagaaagacacccacctgtttcgccttcaggcaaaacagacaaacgtccacctgtatcgccctccgggaggacagaaaaacacccgccagtatcgcctgggagaacagaaaaacgcttgcctgtttcaccctccggaagaacggacaagcaccaacctgtatcaacagctgggaaaactgagaagcacctgcctgtgtcaccttctggcaaaacagaaaagcaaccacctgtatcccccacttcaaaaacagagaggattgaggaaaccatgtctgttcgggagctgatgaaggctttccagtcaggtcaggacccttctaaacataaaactggactctttgagcacaaatcagcaaaacaaaagcagccacaagagaaaggtaaagttcgggtagaaaaagaaaaggggccgatactaacccagagagaagctcagaaaacagagaatcagacaatcaaacgaggccagagactcccggtaacgggcacagcagaatccaaaagaggagttcgtgtttcctccataggagttaagaaagaagatgcagctggaggaaaggagaaagttctcagccacaaaatacctgaacctgttcagtcagtgcctgaagaagaaagccacagagagagcgaagtgcccaaagaaaagatggctgatgagcagggagacatggatctacagatcagcccagataggaaaacctccactgacttctctgaggtcattaagcaagagttggaagacaatgacaaataccaacaattccgcctgagtgaggagacagaaaaggcacagcttcacttagaccaagtactcactagtcctttcaacacaacatttccactcgactacatgaaagatgagttccttccagctctgtctttacaaagcggtgctttagatggcagttctgaaagcctaaagaatgagggggtagccggctctccgtgtggcagcctgatggaggggacccctcagattagttcagaagaaagctataagcatgaaggcctagcagagacccctgagacgagcccagaaagcctttctttctcaccaaagaaaagtgaggagcaaactggggaaacaaaggaaagcaccaagacagaaaccaccacagaaattcgttcagaaaaagagcatcccacgaccaaagacattactggtggctctgaagagcgaggtgccacagtcactgaggactcagagacctctactgagagttttcagaaagaggccactctaggctctcccaaagacacaagccctaaaagacaagatgattgcacaggcagctgtagtgtagcattagctaaagagacacctacaggactgactgaggaggcagcctgtgatgaaggtcaacgtacctttggtagttcagcccacaagacacaaactgatagtgaggttcaagaatccacagccacctcagacgagacaaaggccttgccgctgcctgaggcttctgtaaagacagatacaggaactgaatcaaaacctcagggagtcattagaagtccccaagggttagaacttgcactccctagccgagatagcgaagtcctcagcgctgtggctgatgactcattagcagtgagccacaaagactctctggaagccagccctgtgctagaagataactcttcacacaaaacccctgattctctggagccaagtcctctgaaagaatccccttgccgtgactctctggaaagcagccctgttgaaccaaagatgaaggctggaatttttccaagtcactttcctcttcctgcagctgttgccaaaacagaactcttgacggaagtggcctctgtgcggtcccggctactccgagaccctgatggcagtgctgaggatgacagtcttgagcagacatcgctcatggagagctcagggaagagccccctttctcctgacacccccagctctgaagaagtcagctatgaggttacacccaaaaccacagatgtaagtacaccaaaaccagctgtgattcatgaatgtgcagaggaggatgattcagaaaacggggagaaaaagaggttcacacctgaagaggagatgtttaaaatggtaaccaaaatcaaaatgtttgatgaacttgaacaagaagcaaagcagaaaagggactacaaaaaagaacccaaacaagaagaatcttcttcatcttctgacccagatgctgactgttcagtagatgtggatgaaccaaaacatacaggcagtggggaggatgaaagtggtgtccctgtgttagtaacttcggagagcaggaaggtgtcttcctcctcagaaagtgaacctgagttggcacagcttaaaaaaggtgctgactcaggccttttaccagaaccagtgattcgagtacaacctccttctccacttccatcaagcatggactccaattccagtccagaagaagtacaattccagcctgtcgtttccaaacaatatactttcaagatgaatgaagatactcaggaagagccaggcaaatcagaagaagaaaaagattctgaatcccatttagctgaagaccgtcatgctgtttccactgaggctgaagacaggtcttatgataagctaaacagagacactgatcagccaaaaatctgtgatggccatggatgtgaggccatgagtcctagcagctcagctgctcctgtctcttcaggtctacagagtccgactggtgatgatgttgatgaacagccagtcatctataaagaatcattagctctccaaggcactcatgaaaaagacacagagggagaagagcttgatgtttctagagcagaatctccacaagcagattgccccagtgaaagcttttcatcttcatcctctttgcctcattgtttggtatctgaaggaaaagaattagatgaagacatatctgccacatcttctattcaaaaaacagaggtcacaaaaactgatgaaacatttgagaacttaccaaaggactgcccctctcaagactcatccattactactcaaacagatagattttccatggatgttcccgtgtctgacctagctgagaatgatgaaatctatgatccacaaatcactagcccttatgaaaatgtcccttcccaatcttttttctctagtgaagaaagcaaaacccaaacagatgcaaatcacaccacaagttttcactcttctgaagtgtattctgttaccatcacatcccctgttgaagacgttgtagtggcaagctcctctagtggaactgttttaagcaaagaatctaattttgagggccaggacataaaaatggaatcccaacaggaaagtaccttgtgggaaatgcaatcagacagtgtctcttcatctttcgagcctactatgtccgctacaacaacagttgttggtgaacaaataagcaaagtcatcatcacaaaaactgatgtggattctgattcttggagtgaaattcgggaagacgatgaagcctttgaggctcgtgtgaaagaggaagaacaaaagatatttggtttgatggtagacagacaatcacagggtaccacccctgacaccactcctgctaggaccccaactgaagaggggaccccaacaagtgagcaaaacccatttctgtttcaggaaggaaaattgtttgaaatgacccgaagtggtgccattgatatgaccaaaaggtcctatgcagatgaaagttttcactttttccaaattggtcaagaatccagggaagagactctctctgaagatgtgaaagaaggggctactggggctgatcccctaccgctggagacatcagctgaatcactagcactttcagaatcaaaagaaacagtggatgatgaggcagacttacttccagatgacgtgagtgaggaagtagaggaaatacctgcttcggatgctcaacttaactcccaaatggggatttcagcctccactgaaacacctacaaaagaagctgttagtgtagggaccaaggacctccccaccgtgcaaacgggtgatatacctcctctctctggtgtaaagcagatatcctgccccgactcttctgaaccagctgtacaagtccagttagatttttccacactcaccaggtctgtttattcagataggggtgatgattctcccgattcttccccagaagaacagaaatcagtaatcgagattcctactgcacccatggagaatgtgccttttactgaaagcaaatccaaaattcctgtaaggactatgcccacttccaccccagcacctccatctgcagagtatgagagttcagtttctgaagattttctatccagtgtagatgaggaaaataaggcggatgaagcaaaaccaaagtccaaactccctgtcaaagtacccctccaaagagttgaacagcagctctcagatctagacacctctgtccagaagacagtggctcctcagggacaggacatggcaagcatcgcaccagataatagaagcaaatctgaatctgatgctagttctttggattcaaagaccaaatgcccagtaaaaacccgaagttacactgagacagaaacagagagcagagagagggccgaggaacttgagttagaatcagaagaaggggccacaagaccaaagatacttacatcccgattgccagttaagagcagaagcactacatcttcctgcagggggggcacgagccccacaaaagaaagtaaggagcatttctttgacctttacagaaattccatagaattctttgaggagattagtgatgaggcttccaaattagtggataggctgacacagtcagagagggagcaggaaatagtttcagacgatgaaagtagtagtgccctggaagtatcagtaattgaaaatctgccacctgttgagaccgagcactcagttcctgaggacatctttgacacaaggcccatttgggatgagtctattgagactctgattgaacgcatccctgatgaaaatggccatgaccatgctgaagatccacaggatgagcaggaacggatcgaggaaaggctggcttatattgctgatcaccttggcttcagctggacagaattagcaagagaactggatttcactgaggagcaaattcatcaaattcgaattgaaaatcccaactctcttcaagaccagagtcatgcactgttgaagtactggctagagagggatgggaaacatgctacagataccaacctcgttgaatgtctcaccaagatcaaccgaatggatattgttcatctcatggagaccaacacagaacctctccaggagcgcatcagtcatagttatgcagaaattgaacagaccattacactggatcatagtgaagggttctcggtacttcaagaggagttatgcactgcacagcacaagcagaaagaggagcaagctgtttctaaagaaagtgagacctgcgatcaccctcctatcgtctcagaggaagacatttctgttggttattccacttttcaggatggcgtccccaaaactgagggggacagctcagcaacagcactctttccccaaactcacaaggagcaagttcaacaggatttctcagggaaaatgcaagacctgcctgaagagtcatctctggaatatcagcaggaatattttgtgacaactccaggaacagaaacatcagagactcagaaggctatgatagtacccagctctcccagcaagacacctgaggaagttagcacccctgcagaggaggagaagctgtacctccagaccccaacatccagcgagcggggaggctctcccatcatacaagaacccgaagagccctcagagcacagagaggagagctctccgcggaaaaccagcctcgtaatagtggagtctgccgataaccagcctgagacctgtgaaagactcgatgaagatgcagcttttgaaaagggagacgatatgcctgaaatacccccagaaacagtcacagaagaagaatacattgatgagcatggacacaccgtggtaaagaaggttactaggaaaatcattaggcggtatgtatcctctgaaggcacagagaaagaagagattatggtgcagggaatgccacaggaacctgtcaacatcgaggaaggggatggctattccaaagttataaagcgtgttgtattgaagagtgacaccgagcagtcagaggacaacaatgagtaaagccatcacacagaagagggctgtggtgaaggaccagcatggaaaacgcattgacttggagcacctggaggatgtaccagaagcactagaccaggacgacctccagcgcgatctccagcagctccttcggcatttctgcaaggaggacttgaagcaagaggccaagtgaggggctgcccagttctcacaccagaaaccacacattcactcaatatgcagcttcctgtttcagtaggggagtgacctaactggcctaattaatgggataccccgacatttccactgttagcaaatatacggcattttgctttagttttcccccatcctctttaactataaagctaatttgtgaccaaagatggcatccttcatactggatgctgtatccaatactttgttgtgtctgtgctaacctgggaactggccacctccattgttctttgcttctgcacaagatccatgaaaatccattgatcagaagaacttcacctgcagacctcttcaagtgacactatgtaggaatccttccaaggaatatctatgtacaatgtatatagctgaaatgctcagatgaacaacatattaaaattaaaaccactgcctattgtaactacactgggcatcagaataaaaggcctctagaaattgctgaacaatggttaattaagatattgctaacacaatcgagtgataatacagttttactgcaaaagaagcacttcaaacctattatgtccttagaacttccagagtagccactgctcccagttaaaggtgggtcagtagccttgcagaactgtcctgagaagttattgctggtgctggccagccatggcttaggactccaacagccactctgagggaggggagaagggagcagaggccacgcagaatgaaccgatggggtattcagttgctggcagctacattgtgtggcattctagcatcttcaggtctttagatcttggacaagttggcagggtattttaaaagctataactactgtagttttccagttttcattgctgctttagcaaaccacgctgtcttacagtggtactttcttctggccactgcactgtagataattcattggaaacaagatttacccactacataaaaggttaaactccttcagtatgttggagtggtttctttttttttttctttctttcttttttttcttcaggtttatatcttctctaatacctgcatgtggcgtttaaaaatcaagaccacggtcaaacccctcttctaatcacattaattgtttccattctttttaccctgagtgagcacttttcactttccagctaggtctgtttttcagcttgcagacaagattgagaaatccttgaaaatttggttttggttaaaatttttggtttatttatttgaaatccacactcccttggaaactcttaagtgcatttgtgcacttctgtttgtttgtctcaaagaagggactgtaacaatctgagtaatttccatgtcctcttccttattcctctagtggttgaagctgtgtagcattttaacatatatatattcacaaatatattcatataaacagtatacattttgaatcagtcatttgttaaagaaaagtatattcaatgaagatgaaatttaaataaaaaaggacagagtctatcctccagggattgaacattttccaattatctggtcttttcctgttgtgcaaaaatgactcattgctccgaatgtcaaaaacaaatgcgacaaacaatggcacttcatcatttaaagtaatgttgccaagagaaaaaatttcctgggagggaggtttcccacaagccaaatctcctaagcctcaaatgctagcactttttggcagttggataggaaatgagacattctttggcagccaaaataagagaggccgatggtgaaactttttgagacaccctatggccttcttgtcaaaaccttcactggagctcaagaaaagcatttctgttgtgttatttgcagtgcagatgatgtctgtgtaacaacataatggttattcacctttttttgattttgatttttgctgtgttatcaaaaacttgaatactgtgagaagaagtgaattttcagttgacgaatcagcatcttgttcccatggtgataacactaattgaatatatctatgagggcatgtattagttaatggaaaaaaaaatacaacactaacaatacatagctgcaatgtgtacaatggctgatttaattaaataaaatgtacaagtgttaaatgtggcaa

SEQ ID NO: 1968 - DNA, 6313 bp, Homo sapiens
  source 1..6313: mol_type = unassigned DNA
gtacaggcggcacggtttgatggcagagatattttctttccaaactgttcaaaatgatgaacgaagatgcagctcagaaaagcgacagtggagagaagttcaacggcagtagtcagaggagaaaaagacccaagaagtctgacagcaatgcaagcttcctccgtgctgccagagcaggcaacctggacaaagttgtggaatatctgaaggggggcatagacatcaatacctgcaatcagaatggactcaacgctctccatctggctgccaaggaaggccacgtggggctggtgcaggagctgctgggaagagggtcctctgtggattctgccactaagaagggaaataccgctcttcacattgcatctttggctggacaagcagaagttgtcaaagttcttgttaaggaaggagccaatattaatgcacagtctcagaatggctttactcctttatacatggctgcccaagagaatcacattgatgttgtaaaatatttgctggaaaatggagctaatcagagcactgctacagaggatggctttactcctctagctgtggcactccagcaaggacacaaccaggcggtggccatcctcttggagaatgacaccaaagggaaagtgaggctgccagctctgcatattgccgctaggaaagacgacaccaaatctgccgcacttctgcttcagaatgaccacaatgctgacgtacaatccaagatgatggtgaataggacaactgagagtggttttacccctttgcacatagctgcacattacggaaatgtcaacgtggcaactcttcttctaaaccggggagctgctgtggacttcacagccaggaatggaatcactcctctgcatgtggcttccaaaagaggaaatacaaacatggtgaagctcttactggatcgaggcggtcagatcgatgccaaaactagggatgggttgacaccacttcactgtgctgcacgaagtgggcatgaccaagtggtggaacttctgttggaacggggtgcccccttgctggcaaggactaagaatgggctgtctccactacacatggctgcccagggagaccacgtggaatgtgtgaagcacctgttacagcacaaggcacctgttgatgatgtcaccctagactacctgacagccctccacgttgctgcgcactgtggccactaccgtgtaaccaaactccttttagacaagagagccaatccgaacgccagagccctgaatggttttactccactgcacattgcctgcaagaaaaaccgcatcaaagtcatggaactgctggtgaaatatggggcttcaatccaagctataacagagtctggcctcacaccaatacatgtggctgccttcatgggccacttgaacattgtcctccttctgctgcagaacggagcctctccagatgtcactaacattcgtggtgagacggcactacacatggcagcccgagccgggcaggtggaagtggtccgatgcctcctgagaaatggtgcccttgttgatgccagagccagggaggaacagacacctttacatattgcctcccgcctgggtaagacagaaattgtccagctgcttctacaacatatggctcatccagatgcggccactacaaatgggtacacaccactgcacatctctgcccgggagggccaggtggatgtggcatcagtcctattggaagcaggagcagcccactccttagctaccaagaagggttttactcccctgcatgtagcagccaagtatggaagcctggatgtggcaaaacttctcttgcaacgccgtgctgccgcagattctgcagggaagaacggccttaccccgctccatgttgctgctcattatgacaaccagaaggtggcgctgctgttactggagaagggtgcttcccctcatgccactgccaagaatggctatactccgttacatattgctgccaagaagaatcaaatgcagatagcttccacactcctgaactatggagcagagacaaacattgtgacaaagcaaggagtaactccactccatctggcctcgcaggaggggcacacagatatggttaccttgcttctggataagggagccaatatccacatgtcaactaagagtggactcacatccttacaccttgcagcccaggaagataaagtgaatgttgctgatattctcaccaagcatggagctgatcaggatgctcatacaaagcttggttacacacctttaattgtggcctgtcactatggaaatgtgaaaatggtcaactttcttctgaagcagggagcaaatgttaacgcaaaaaccaagaacggctacacgcctttgcaccaggccgctcagcagggtcacacgcacatcatcaacgtcctgctccagcatggggccaagcccaacgccaccactgcgaatggcaacactgccttggcgattgctaagcgtctgggctacatctccgtggtcgacaccctgaaggttgtgactgaggaggtcaccaccaccaccacaactattacagaaaaacacaaactaaatgtacctgagacgatgactgaggttcttgatgtttctgatgaagagggtgatgacacaatgactggtgatgggggagaataccttaggcctgaggacctaaaagaactgggtgatgactcactacccagcagtcagttcctggatggtatgaattacctgcgatacagcttggagggaggacgatctgacagccttcgatccttcagttccgacaggtctcacactctgagccatgcctcctacctgagggacagtgccgtgatggatgactcagttgtgattcccagtcaccaggtgtcaactctagccaaggaggcagaaaggaattcttatcgcctaagctggggcactgagaacttagacaacgtggctctttcttctagtcctattcattcaggtttcctggttagttttatggtggatgcccgaggtggtgctatgcgaggatgcagacacaatgggctccgaatcattattccacctcggaaatgtactgctccaacgcgagtcacctgccgactggtcaagcgccacagactggcaacaatgcctccaatggtggaaggagaaggcctggccagtcgcctgatcgaagttggaccttctggtgctcagttccttggtaaacttcacctgccaacggctcctcccccacttaatgagggagaaagtttggtcagccgcattcttcagctggggcctcctggaaccaaattccttgggcctgtgatcgtggagatccctcactttgcggcccttcgaggaaaggaaagggaactggtggtcctgcgcagtgagaatggggacagctggaaagagcatttctgtgactacactgaagatgaattgaatgaaattcttaacggcatggatgaagtactggatagcccagaagacctagaaaagaaacgaatctgccgcatcatcacccgagacttcccacagtactttgcagtggtgtctcgtatcaaacaggacagcaatctgattggcccagaaggaggtgtactgagcagcacagtggtgccccaggtgcaggccgtcttcccagagggggcactcaccaagcggatccgcgtaggcctgcaggctcaacctatgcacagtgagctggttaagaagatcctaggcaacaaagctaccttcagccctatagtcactttggaacctagaagaagaaaattccacaaaccaattaccatgaccattcctgtccccaaagcttcaagtgatgtcatgttgaatggttttgggggagatgcaccaaccttaagattactatgcagcataacaggtggaaccacccctgcccagtgggaagatattacaggaactacgccattaacatttgtcaatgaatgtgtttcctttacaacaaacgtgtctgccaggttctggctgatagattgtcgacagatccaggaatccgttacttttgcatcacaagtatacagagaaattatctgcgtaccttatatggccaaatttgtagtgtttgccaaatcacatgaccccattgaagccaggttgaggtgtttctgcatgactgatgataaagtggataagacccttgaacaacaagaaaattttgctgaggtggccagaagcagggatgtggaggtgttagaaggaaaacccatctacgttgattgtttcggcaacttggtaccattaactaaaagtggccagcatcatatattcagtttttttgccttcaaagaaaatagacttcctctatttgtcaaggtacgcgatacgactcaggaaccttgcggacgactatcatttatgaaggagccaaaatccacgagaggcctggtgcatcaagctatttgcaacttaaacatcactttgccgatttatacaaaggaatcagagtcagatcaagaacaggaggaagagatcgatatgacatcagaaaaaaatccacaggatgagcaggaacggatcgaggaaaggctggcttatattgctgatcaccttggcttcagctggacagaattagcaagagaactggatttcactgaggagcaaattcatcaaattcgaattgaaaatcccaactctcttcaagaccagagtcatgcactgttgaagtactggctagagagggatgggaaacatgctacagataccaacctcgttgaatgtctcaccaagatcaaccgaatggatattgttcatctcatggagaccaacacagaacctctccaggagcgcatcagtcatagttatgcagaaattgaacagaccattacactggatcatagtgaagggttctcggtacttcaagaggagttatgcactgcacagcacaagcagaaagaggagcaagctgtttctaaagaaagtgagacctgcgatcaccctcctatcgtctcagaggaagacatttctgttggttattccacttttcaggatggcgtccccaaaactgagggggacagctcagcaacagcactctttccccaaactcacaaggagcaagttcaacaggatttctcagggaaaatgcaagacctgcctgaagagtcatctctggaatatcagcaggaatattttgtgacaactccaggaacagaaacatcagagactcagaaggctatgatagtacccagctctcccagcaagacacctgaggaagttagcacccctgcagaggaggagaagctgtacctccagaccccaacatccagcgagcggggaggctctcccatcatacaagaacccgaagagccctcagagcacagagaggagagctctccgcggaaaaccagcctcgtaatagtggagtctgccgataaccagcctgagacctgtgaaagactcgatgaagatgcagcttttgaaaagggagacgatatgcctgaaatacccccagaaacagtcacagaagaagaatacattgatgagcatggacacaccgtggtaaagaaggttactaggaaaatcattaggcggtatgtatcctctgaaggcacagagaaagaagagattatggtgcagggaatgccacaggaacctgtcaacatcgaggaaggggatggctattccaaagttataaagcgtgttgtattgaagagtgacaccgagcagtcagaggacaacaatgagtaaagccatcacacagaagagggctgtggtgaaggaccagcatggaaaacgcattgacttggagcacctggaggatgtaccagaagcactagaccaggacgacctccagcgcgatctccagcagctccttcggcatttctgcaaggaggacttgaagcaagaggccaagtgaggggctgcccagttctcacaccagaaaccacacattcactcaatatgcagcttcctgtttcagtaggggagtgacctaactggcctaattaatgggataccccgacatttccactgttagcaaatatacggcattttgctttagttttcccccatcctctttaactataaagctaatttgtgaccaaagatggcatccttcatactggatgctgtatccaatactttgttgtgtctgtgctaacctgggaactggccacctccattgttctttgcttctgcacaagatccatgaaaatccattgatcagaagaacttcacctgcagacctcttcaagtgacactatgtaggaatccttccaaggaatatctatgtacaatgtatatagctgaaatgctcagatgaacaacatattaaaattaaaaccactgcctattgtaactacactgggcatcagaataaaaggcctcta

SEQ ID NO: 1969 - DNA, 5848 bp, Homo sapiens
  source 1..5848: mol_type = unassigned DNA
ctcctcctcctgctttcctccagtaagtgcatacccgctagtggtctgtacaggcggcacggtttgatggcagagatattttctttccaaactgttcaaaatgatgaacgaagatgcagctcagaaaagcgacagtggagagaagttcaacggcagtagtcagaggagaaaaagacccaagaagtctgacagcaatgcaagcttcctccgtgctgccagagcaggcaacctggacaaagttgtggaatatctgaaggggggcatagacatcaatacctgcaatcagaatggactcaacgctctccatctggctgccaaggaaggccacgtggggctggtgcaggagctgctgggaagagggtcctctgtggattctgccactaagaagggaaataccgctcttcacattgcatctttggctggacaagcagaagttgtcaaagttcttgttaaggaaggagccaatattaatgcacagtctcagaatggctttactcctttatacatggctgcccaagagaatcacattgatgttgtaaaatatttgctggaaaatggagctaatcagagcactgctacagaggatggctttactcctctagctgtggcactccagcaaggacacaaccaggcggtggccatcctcttggagaatgacaccaaagggaaagtgaggctgccagctctgcatattgccgctaggaaagacgacaccaaatctgccgcacttctgcttcagaatgaccacaatgctgacgtacaatccaagatgatggtgaataggacaactgagagtggttttacccctttgcacatagctgcacattacggaaatgtcaacgtggcaactcttcttctaaaccggggagctgctgtggacttcacagccaggaatggaatcactcctctgcatgtggcttccaaaagaggaaatacaaacatggtgaagctcttactggatcgaggcggtcagatcgatgccaaaactagggatgggttgacaccacttcactgtgctgcacgaagtgggcatgaccaagtggtggaacttctgttggaacggggtgcccccttgctggcaaggactaagaatgggctgtctccactacacatggctgcccagggagaccacgtggaatgtgtgaagcacctgttacagcacaaggcacctgttgatgatgtcaccctagactacctgacagccctccacgttgctgcgcactgtggccactaccgtgtaaccaaactccttttagacaagagagccaatccgaacgccagagccctgaatggttttactccactgcacattgcctgcaagaaaaaccgcatcaaagtcatggaactgctggtgaaatatggggcttcaatccaagctataacagagtctggcctcacaccaatacatgtggctgccttcatgggccacttgaacattgtcctccttctgctgcagaacggagcctctccagatgtcactaacattcgtggtgagacggcactacacatggcagcccgagccgggcaggtggaagtggtccgatgcctcctgagaaatggtgcccttgttgatgccagagccagggaggaacagacacctttacatattgcctcccgcctgggtaagacagaaattgtccagctgcttctacaacatatggctcatccagatgcggccactacaaatgggtacacaccactgcacatctctgcccgggagggccaggtggatgtggcatcagtcctattggaagcaggagcagcccactccttagctaccaagaagggttttactcccctgcatgtagcagccaagtatggaagcctggatgtggcaaaacttctcttgcaacgccgtgctgccgcagattctgcagggaagaacggccttaccccgctccatgttgctgctcattatgacaaccagaaggtggcgctgctgttactggagaagggtgcttcccctcatgccactgccaagaatggctatactccgttacatattgctgccaagaagaatcaaatgcagatagcttccacactcctgaactatggagcagagacaaacattgtgacaaagcaaggagtaactccactccatctggcctcgcaggaggggcacacagatatggttaccttgcttctggataagggagccaatatccacatgtcaactaagagtggactcacatccttacaccttgcagcccaggaagataaagtgaatgttgctgatattctcaccaagcatggagctgatcaggatgctcatacaaagcttggttacacacctttaattgtggcctgtcactatggaaatgtgaaaatggtcaactttcttctgaagcagggagcaaatgttaacgcaaaaaccaagaacggctacacgcctttgcaccaggccgctcagcagggtcacacgcacatcatcaacgtcctgctccagcatggggccaagcccaacgccaccactgcgaatggcaacactgccttggcgattgctaagcgtctgggctacatctccgtggtcgacaccctgaaggttgtgactgaggaggtcaccaccaccaccacaactattacagaaaaacacaaactaaatgtacctgagacgatgactgaggttcttgatgtttctgatgaagagggtgatgacacaatgactggtgatgggggagaataccttaggcctgaggacctaaaagaactgggtgatgactcactacccagcagtcagttcctggatggtatgaattacctgcgatacagcttggagggaggacgatctgacagccttcgatccttcagttccgacaggtctcacactctgagccatgcctcctacctgagggacagtgccgtgatggatgactcagttgtgattcccagtcaccaggtgtcaactctagccaaggaggcagaaaggaattcttatcgcctaagctggggcactgagaacttagacaacgtggctctttcttctagtcctattcattcaggtttcctggttagttttatggtggatgcccgaggtggtgctatgcgaggatgcagacacaatgggctccgaatcattattccacctcggaaatgtactgctccaacgcgagtcacctgccgactggtcaagcgccacagactggcaacaatgcctccaatggtggaaggagaaggcctggccagtcgcctgatcgaagttggaccttctggtgctcagttccttgggcctgtgatcgtggagatccctcactttgcggcccttcgaggaaaggaaagggaactggtggtcctgcgcagtgagaatggggacagctggaaagagcatttctgtgactacactgaagatgaattgaatgaaattcttaacggcatggatgaagtactggatagcccagaagacctagaaaagaaacgaatctgccgcatcatcacccgagacttcccacagtactttgcagtggtgtctcgtatcaaacaggacagcaatctgattggcccagaaggaggtgtactgagcagcacagtggtgccccaggtgcaggccgtcttcccagagggggcactcaccaagcggatccgcgtaggcctgcaggctcaacctatgcacagtgagctggttaagaagatcctaggcaacaaagctaccttcagccctatagtcactttggaacctagaagaagaaaattccacaaaccaattaccatgaccattcctgtccccaaagcttcaagtgatgtcatgttgaatggttttgggggagatgcaccaaccttaagattactatgcagcataacaggtggaaccacccctgcccagtgggaagatattacaggaactacgccattaacatttgtcaatgaatgtgtttcctttacaacaaacgtgtctgccaggttctggctgatagattgtcgacagatccaggaatccgttacttttgcatcacaagtatacagagaaattatctgcgtaccttatatggccaaatttgtagtgtttgccaaatcacatgaccccattgaagccaggttgaggtgtttctgcatgactgatgataaagtggataagacccttgaacaacaagaaaattttgctgaggtggccagaagcagggatgtggaggtgttagaaggaaaacccatctacgttgattgtttcggcaacttggtaccattaactaaaagtggccagcatcatatattcagtttttttgccttcaaagaaaatagacttcctctatttgtcaaggtacgcgatacgactcaggaaccttgcggacgactatcatttatgaaggagccaaaatccacgagaggcctggtgcatcaagctatttgcaacttaaacatcactttgccgatttatacaaagacagaaaccaccacagaaattcatccacaggatgagcaggaacggatcgaggaaaggctggcttatattgctgatcaccttggcttcagctggacagaattagcaagagaactggatttcactgaggagcaaattcatcaaattcgaattgaaaatcccaactctcttcaagaccagagtcatgcactgttgaagtactggctagagagggatgggaaacatgctacagataccaacctcgttgaatgtctcaccaagatcaaccgaatggatattgttcatctcatggagaccaacacagaacctctccaggagcgcatcagtcatagttatgcagaaattgaacagaccattacactggatcatagtgaagggttctcggtacttcaagaggagttatgcactgcacagcacaagcagaaagaggagcaagctgtttctaaagaaagtgagacctgcgatcaccctcctatcgtctcagaggaagacatttctgttggttattccacttttcaggatggcgtccccaaaactgagggggacagctcagcaacagcactctttccccaaactcacaaggagcaagttcaacaggatttctcagggaaaatgcaagacctgcctgaagagtcatctctggaatatcagcaggaatattttgtgacaactccaggaacagaaacatcagagactcagaaggctatgatagtacccagctctcccagcaagacacctgaggaagttagcacccctgcagaggaggagaagctgtacctccagaccccaacatccagcgagcggggaggctctcccatcatacaagaacccgaagagccctcagagcacagagaggagagctctccgcggaaaaccagcctcgtaatagtggagtctgccgataaccagcctgagacctgtgaaagactcgatgaagatgcagcttttgaaaaggagctaacagaggaattaggggagctggaggccagctcagatgaggaggcgatggtaactaccagggttgtccgccggcgagtgattattcagggagacgatatgcctgaaatacccccagaaacagtcacagaagaagaatacattgatgagcatggacacaccgtggtaaagaaggttactaggaaaatcattaggcggtatgtatcctctgaaggcacagagaaagaagagattatggtgcagggaatgccacaggaacctgtcaacatcgaggaaggggatggctattccaaagttataaagcgtgttgtattgaagagtgacaccgagcagtcagaggtcactttgtgtgagcccagcattttgtccagtacctcacaatttcaggctgagccagtggaaggccgtagagtcagcaaagttgttaaaacaactgtggtacttggagagaggatggagaaacatctgggggattctagtttagccactgatcttccttcagccaaagatgactttgaagag

SEQ ID NO: 1970 - DNA, 3537 bp, Homo sapiens
  source 1..3537: mol_type = unassigned DNA
acagtctgaggctgtaatgggaaagtcggttcctgggctgctgtctcatagacatcagcttgcagggaagctgggggctctccgaattgccctgctccggggcccctcctgctgcgtgactcacaggcacattgcagagagaagctgccgctcccagtaagtaatgaaaagagacatgaagaattggtatttcaaatgaccaccatgttgcaaaagtctgacagcaatgcaagcttcctccgtgctgccagagcaggcaacctggacaaagttgtggaatatctgaaggggggcatagacatcaatacctgcaatcagaatggactcaacgctctccatctggctgccaaggaaggccacgtggggctggtgcaggagctgctgggaagagggtcctctgtggattctgccactaagaagggaaataccgctcttcacattgcatctttggctggacaagcagaagttgtcaaagttcttgttaaggaaggagccaatattaatgcacagtctcagaatggctttactcctttatacatggctgcccaagagaatcacattgatgttgtaaaatatttgctggaaaatggagctaatcagagcactgctacagaggatggctttactcctctagctgtggcactccagcaaggacacaaccaggcggtggccatcctcttggagaatgacaccaaagggaaagtgaggctgccagctctgcatattgccgctaggaaagacgacaccaaatctgccgcacttctgcttcagaatgaccacaatgctgacgtacaatccaagatgatggtgaataggacaactgagagtggttttacccctttgcacatagctgcacattacggaaatgtcaacgtggcaactcttcttctaaaccggggagctgctgtggacttcacagccaggaatggaatcactcctctgcatgtggcttccaaaagaggaaatacaaacatggtgaagctcttactggatcgaggcggtcagatcgatgccaaaactagggatgggttgacaccacttcactgtgctgcacgaagtgggcatgaccaagtggtggaacttctgttggaacggggtgcccccttgctggcaaggactaagaatgggctgtctccactacacatggctgcccagggagaccacgtggaatgtgtgaagcacctgttacagcacaaggcacctgttgatgatgtcaccctagactacctgacagccctccacgttgctgcgcactgtggccactaccgtgtaaccaaactccttttagacaagagagccaatccgaacgccagagccctgaatggttttactccactgcacattgcctgcaagaaaaaccgcatcaaagtcatggaactgctggtgaaatatggggcttcaatccaagctataacagagtctggcctcacaccaatacatgtggctgccttcatgggccacttgaacattgtcctccttctgctgcagaacggagcctctccagatgtcactaacattcgtggtgagacggcactacacatggcagcccgagccgggcaggtggaagtggtccgatgcctcctgagaaatggtgcccttgttgatgccagagccagggaggaacagacacctttacatattgcctcccgcctgggtaagacagaaattgtccagctgcttctacaacatatggctcatccagatgcggccactacaaatgggtacacaccactgcacatctctgcccgggagggccaggtggatgtggcatcagtcctattggaagcaggagcagcccactccttagctaccaagaagggttttactcccctgcatgtagcagccaagtatggaagcctggatgtggcaaaacttctcttgcaacgccgtgctgccgcagattctgcagggaagaacggccttaccccgctccatgttgctgctcattatgacaaccagaaggtggcgctgctgttactggagaagggtgcttcccctcatgccactgccaagaatggctatactccgttacatattgctgccaagaagaatcaaatgcagatagcttccacactcctgaactatggagcagagacaaacattgtgacaaagcaaggagtaactccactccatctggcctcgcaggaggggcacacagatatggttaccttgcttctggataagggagccaatatccacatgtcaactaagagtggactcacatccttacaccttgcagcccaggaagataaagtgaatgttgctgatattctcaccaagcatggagctgatcaggatgctcatacaaagcttggttacacacctttaattgtggcctgtcactatggaaatgtgaaaatggtcaactttcttctgaagcagggagcaaatgttaacgcaaaaaccaagaacggctacacgcctttgcaccaggccgctcagcagggtcacacgcacatcatcaacgtcctgctccagcatggggccaagcccaacgccaccactgcgaatggcaacactgccttggcgattgctaagcgtctgggctacatctccgtggtcgacaccctgaaggttgtgactgaggaggtcaccaccaccaccacaactattacagaaaaacacaaactaaatgtacctgagacgatgactgaggttcttgatgtttctgatgaagagggtgatgacacaatgactggtgatgggggagaataccttaggcctgaggacctaaaagaactgggtgatgactcactacccagcagtcagttcctggatggtatgaattacctgcgatacagcttggagggaggacgatctgacagccttcgatccttcagttccgacaggtctcacactctgagccatgcctcctacctgagggacagtgccgtgatggatgactcagttgtgattcccagtcaccaggtgtcaactctagccaaggaggcagaaaggaattcttatcgcctaagctggggcactgagaacttagacaacgtggctctttcttctagtcctattcattcaggtttcctggttagttttatggtggatgcccgaggtggtgctatgcgaggatgcagacacaatgggctccgaatcattattccacctcggaaatgtactgctccaacgcgagtcacctgccgactggtcaagcgccacagactggcaacaatgcctccaatggtggaaggagaaggcctggccagtcgcctgatcgaagttggaccttctggtgctcagttccttggtaaacttcacctgccaacggctcctcccccacttaatgagggagaaagtttggtcagccgcattcttcagctggggcctcctggaaccaaattccttgggcctgtgatcgtggagatccctcactttgcggcccttcgaggaaaggaaagggaactggtggtcctgcgcagtgagaatggggacagctggaaagagcatttctgtgactacactgaagatgaattgaatgaaattcttaacggcatggatgaagtactggatagcccagaagacctagaa

SEQ ID NO: 1971 - DNA, 5270 bp, Homo sapiens
  source 1..5270: mol_type = unassigned DNA
agtaagtgcatacccgctagtggtctgtacaggcggcacggtttgatggcagagatattttctttccaaactgttcaaaatgatgaacgaagatgcagctcagaaaagcgacagtggagagaagttcaacggcagtagtcagaggagaaaaagacccaagaaggtgacatgcccccagatgaaaccagaggccgccaacattgaaaagtctgacagcaatgcaagcttcctccgtgctgccagagcaggcaacctggacaaagttgtggaatatctgaaggggggcatagacatcaatacctgcaatcagaatggactcaacgctctccatctggctgccaaggaaggccacgtggggctggtgcaggagctgctgggaagagggtcctctgtggattctgccactaagaagggaaataccgctcttcacattgcatctttggctggacaagcagaagttgtcaaagttcttgttaaggaaggagccaatattaatgcacagtctcagaatggctttactcctttatacatggctgcccaagagaatcacattgatgttgtaaaatatttgctggaaaatggagctaatcagagcactgctacagaggatggctttactcctctagctgtggcactccagcaaggacacaaccaggcggtggccatcctcttggagaatgacaccaaagggaaagtgaggctgccagctctgcatattgccgctaggaaagacgacaccaaatctgccgcacttctgcttcagaatgaccacaatgctgacgtacaatccaagatgatggtgaataggacaactgagagtggttttacccctttgcacatagctgcacattacggaaatgtcaacgtggcaactcttcttctaaaccggggagctgctgtggacttcacagccaggaatggaatcactcctctgcatgtggcttccaaaagaggaaatacaaacatggtgaagctcttactggatcgaggcggtcagatcgatgccaaaactagggatgggttgacaccacttcactgtgctgcacgaagtgggcatgaccaagtggtggaacttctgttggaacggggtgcccccttgctggcaaggactaagaatgggctgtctccactacacatggctgcccagggagaccacgtggaatgtgtgaagcacctgttacagcacaaggcacctgttgatgatgtcaccctagactacctgacagccctccacgttgctgcgcactgtggccactaccgtgtaaccaaactccttttagacaagagagccaatccgaacgccagagccctgaatggttttactccactgcacattgcctgcaagaaaaaccgcatcaaagtcatggaactgctggtgaaatatggggcttcaatccaagctataacagagtctggcctcacaccaatacatgtggctgccttcatgggccacttgaacattgtcctccttctgctgcagaacggagcctctccagatgtcactaacattcgtggtgagacggcactacacatggcagcccgagccgggcaggtggaagtggtccgatgcctcctgagaaatggtgcccttgttgatgccagagccagggaggaacagacacctttacatattgcctcccgcctgggtaagacagaaattgtccagctgcttctacaacatatggctcatccagatgcggccactacaaatgggtacacaccactgcacatctctgcccgggagggccaggtggatgtggcatcagtcctattggaagcaggagcagcccactccttagctaccaagaagggttttactcccctgcatgtagcagccaagtatggaagcctggatgtggcaaaacttctcttgcaacgccgtgctgccgcagattctgcagggaagaacggccttaccccgctccatgttgctgctcattatgacaaccagaaggtggcgctgctgttactggagaagggtgcttcccctcatgccactgccaagaatggctatactccgttacatattgctgccaagaagaatcaaatgcagatagcttccacactcctgaactatggagcagagacaaacattgtgacaaagcaaggagtaactccactccatctggcctcgcaggaggggcacacagatatggttaccttgcttctggataagggagccaatatccacatgtcaactaagagtggactcacatccttacaccttgcagcccaggaagataaagtgaatgttgctgatattctcaccaagcatggagctgatcaggatgctcatacaaagcttggttacacacctttaattgtggcctgtcactatggaaatgtgaaaatggtcaactttcttctgaagcagggagcaaatgttaacgcaaaaaccaagaacggctacacgcctttgcaccaggccgctcagcagggtcacacgcacatcatcaacgtcctgctccagcatggggccaagcccaacgccaccactgcgaatggcaacactgccttggcgattgctaagcgtctgggctacatctccgtggtcgacaccctgaaggttgtgactgaggaggtcaccaccaccaccacaactattacagaaaaacacaaactaaatgtacctgagacgatgactgaggttcttgatgtttctgatgaagagggtgatgacacaatgactggtgatgggggagaataccttaggcctgaggacctaaaagaactgggtgatgactcactacccagcagtcagttcctggatggtatgaattacctgcgatacagcttggagggaggacgatctgacagccttcgatccttcagttccgacaggtctcacactctgagccatgcctcctacctgagggacagtgccgtgatggatgactcagttgtgattcccagtcaccaggtgtcaactctagccaaggaggcagaaaggaattcttatcgcctaagctggggcactgagaacttagacaacgtggctctttcttctagtcctattcattcaggtttcctggttagttttatggtggatgcccgaggtggtgctatgcgaggatgcagacacaatgggctccgaatcattattccacctcggaaatgtactgctccaacgcgagtcacctgccgactggtcaagcgccacagactggcaacaatgcctccaatggtggaaggagaaggcctggccagtcgcctgatcgaagttggaccttctggtgctcagttccttggtaaacttcacctgccaacggctcctcccccacttaatgagggagaaagtttggtcagccgcattcttcagctggggcctcctggaaccaaattccttgggcctgtgatcgtggagatccctcactttgcggcccttcgaggaaaggaaagggaactggtggtcctgcgcagtgagaatggggacagctggaaagagcatttctgtgactacactgaagatgaattgaatgaaattcttaacggcatggatgaagtactggatagcccagaagacctagaaaagaaacgaatctgccgcatcatcacccgagacttcccacagtactttgcagtggtgtctcgtatcaaacaggacagcaatctgattggcccagaaggaggtgtactgagcagcacagtggtgccccaggtgcaggccgtcttcccagagggggcactcaccaagcggatccgcgtaggcctgcaggctcaacctatgcacagtgagctggttaagaagatcctaggcaacaaagctaccttcagccctatagtcactttggaacctagaagaagaaaattccacaaaccaattaccatgaccattcctgtccccaaagcttcaagtgatgtcatgttgaatggttttgggggagatgcaccaaccttaagattactatgcagcataacaggtggaaccacccctgcccagtgggaagatattacaggaactacgccattaacatttgtcaatgaatgtgtttcctttacaacaaacgtgtctgccaggttctggctgatagattgtcgacagatccaggaatccgttacttttgcatcacaagtatacagagaaattatctgcgtaccttatatggccaaatttgtagtgtttgccaaatcacatgaccccattgaagccaggttgaggtgtttctgcatgactgatgataaagtggataagacccttgaacaacaagaaaattttgctgaggtggccagaagcagggatgtggaggtgttagaaggaaaacccatctacgttgattgtttcggcaacttggtaccattaactaaaagtggccagcatcatatattcagtttttttgccttcaaagaaaatagacttcctctatttgtcaaggtacgcgatacgactcaggaaccttgcggacgactatcatttatgaaggagccaaaatccacgagaggcctggtgcatcaagctatttgcaacttaaacatcactttgccgatttatacaaaggaatcagagtcagatcaagaacaggaggaagagatcgatatgacatcagaaaaaaatgatgagacagaatctacagaaacatctgtcctgaaaagtcacctggttaatgaagttcctgtcctagcaagtccggacttgctctctgaagtttctgagatgaaacaagatttgatcaaaatgaccgccatcttgaccacagatgtgtctgataaggcaggttctattaaagtgaaggagctggtgaaggctgctgaggaagagccaggagagccttttgaaatcgttgaaagagttaaagaggacttagagaaagtgaatgaaatcctgagaagtggaacctgcacaagagatgaaagcagtgtgcagagctctcggtctgagagaggattagttgaagaggaatgggttattgtcagtgatgaggaaatagaagaggctaggcaaaaagcacctttagaaatcactgaatatccatgtgtagaagttagaatagataaagagatcaaaggaaaagtagagaaagactcaactgggctagtgaactaccttactgatgatctgaatacctgtgtgcctcttcccaaagagcagctgcagacagttcaagataaggcagggaagaaatgtgaggctctggctgttggcaggagctctgaaaaggaagggaaagacatacccccagatgagacacagagtacacagaaacagcacaaaccaagcttgggaataaagaagccagtaagaaggaaattaaaagaaaagcagaaacaaaaag

SEQ ID NO: 1972 - DNA, 8051 bp, Homo sapiens
  source 1..8051: mol_type = unassigned DNA
acagtctgaggctgtaatgggaaagtcggttcctgggctgctgtctcatagacatcagcttgcagggaagctgggggctctccgaattgccctgctccggggcccctcctgctgcgtgactcacaggcacattgcagagagaagctgccgctcccagtaagtaatgaaaagagacatgaagaattggtatttcaaatgaccaccatgttgcaaaagtctgacagcaatgcaagcttcctccgtgctgccagagcaggcaacctggacaaagttgtggaatatctgaaggggggcatagacatcaatacctgcaatcagaatggactcaacgctctccatctggctgccaaggaaggccacgtggggctggtgcaggagctgctgggaagagggtcctctgtggattctgccactaagaagggaaataccgctcttcacattgcatctttggctggacaagcagaagttgtcaaagttcttgttaaggaaggagccaatattaatgcacagtctcagaatggctttactcctttatacatggctgcccaagagaatcacattgatgttgtaaaatatttgctggaaaatggagctaatcagagcactgctacagaggatggctttactcctctagctgtggcactccagcaaggacacaaccaggcggtggccatcctcttggagaatgacaccaaagggaaagtgaggctgccagctctgcatattgccgctaggaaagacgacaccaaatctgccgcacttctgcttcagaatgaccacaatgctgacgtacaatccaagatgatggtgaataggacaactgagagtggttttacccctttgcacatagctgcacattacggaaatgtcaacgtggcaactcttcttctaaaccggggagctgctgtggacttcacagccaggaatggaatcactcctctgcatgtggcttccaaaagaggaaatacaaacatggtgaagctcttactggatcgaggcggtcagatcgatgccaaaactagggatgggttgacaccacttcactgtgctgcacgaagtgggcatgaccaagtggtggaacttctgttggaacggggtgcccccttgctggcaaggactaagaatgggctgtctccactacacatggctgcccagggagaccacgtggaatgtgtgaagcacctgttacagcacaaggcacctgttgatgatgtcaccctagactacctgacagccctccacgttgctgcgcactgtggccactaccgtgtaaccaaactccttttagacaagagagccaatccgaacgccagagccctgaatggttttactccactgcacattgcctgcaagaaaaaccgcatcaaagtcatggaactgctggtgaaatatggggcttcaatccaagctataacagagtctggcctcacaccaatacatgtggctgccttcatgggccacttgaacattgtcctccttctgctgcagaacggagcctctccagatgtcactaacattcgtggtgagacggcactacacatggcagcccgagccgggcaggtggaagtggtccgatgcctcctgagaaatggtgcccttgttgatgccagagccagggaggaacagacacctttacatattgcctcccgcctgggtaagacagaaattgtccagctgcttctacaacatatggctcatccagatgcggccactacaaatgggtacacaccactgcacatctctgcccgggagggccaggtggatgtggcatcagtcctattggaagcaggagcagcccactccttagctaccaagaagggttttactcccctgcatgtagcagccaagtatggaagcctggatgtggcaaaacttctcttgcaacgccgtgctgccgcagattctgcagggaagaacggccttaccccgctccatgttgctgctcattatgacaaccagaaggtggcgctgctgttactggagaagggtgcttcccctcatgccactgccaagaatggctatactccgttacatattgctgccaagaagaatcaaatgcagatagcttccacactcctgaactatggagcagagacaaacattgtgacaaagcaaggagtaactccactccatctggcctcgcaggaggggcacacagatatggttaccttgcttctggataagggagccaatatccacatgtcaactaagagtggactcacatccttacaccttgcagcccaggaagataaagtgaatgttgctgatattctcaccaagcatggagctgatcaggatgctcatacaaagcttggttacacacctttaattgtggcctgtcactatggaaatgtgaaaatggtcaactttcttctgaagcagggagcaaatgttaacgcaaaaaccaagaacggctacacgcctttgcaccaggccgctcagcagggtcacacgcacatcatcaacgtcctgctccagcatggggccaagcccaacgccaccactgcgaatggcaacactgccttggcgattgctaagcgtctgggctacatctccgtggtcgacaccctgaaggttgtgactgaggaggtcaccaccaccaccacaactattacagaaaaacacaaactaaatgtacctgagacgatgactgaggttcttgatgtttctgatgaagagggtgatgacacaatgactggtgatgggggagaataccttaggcctgaggacctaaaagaactgggtgatgactcactacccagcagtcagttcctggatggtatgaattacctgcgatacagcttggagggaggacgatctgacagccttcgatccttcagttccgacaggtctcacactctgagccatgcctcctacctgagggacagtgccgtgatggatgactcagttgtgattcccagtcaccaggtgtcaactctagccaaggaggcagaaaggaattcttatcgcctaagctggggcactgagaacttagacaacgtggctctttcttctagtcctattcattcaggccgcgcctctccatgtcttgaacgtgacaacagcagtttcctggttagttttatggtggatgcccgaggtggtgctatgcgaggatgcagacacaatgggctccgaatcattattccacctcggaaatgtactgctccaacgcgagtcacctgccgactggtcaagcgccacagactggcaacaatgcctccaatggtggaaggagaaggcctggccagtcgcctgatcgaagttggaccttctggtgctcagttccttggtaaacttcacctgccaacggctcctcccccacttaatgagggagaaagtttggtcagccgcattcttcagctggggcctcctggaaccaaattccttgggcctgtgatcgtggagatccctcactttgcggcccttcgaggaaaggaaagggaactggtggtcctgcgcagtgagaatggggacagctggaaagagcatttctgtgactacactgaagatgaattgaatgaaattcttaacggcatggatgaagtactggatagcccagaagacctagaaaagaaacgaatctgccgcatcatcacccgagacttcccacagtactttgcagtggtgtctcgtatcaaacaggacagcaatctgattggcccagaaggaggtgtactgagcagcacagtggtgccccaggtgcaggccgtcttcccagagggggcactcaccaagcggatccgcgtaggcctgcaggctcaacctatgcacagtgagctggttaagaagatcctaggcaacaaagctaccttcagccctatagtcactttggaacctagaagaagaaaattccacaaaccaattaccatgaccattcctgtccccaaagcttcaagtgatgtcatgttgaatggttttgggggagatgcaccaaccttaagattactatgcagcataacaggtggaaccacccctgcccagtgggaagatattacaggaactacgccattaacatttgtcaatgaatgtgtttcctttacaacaaacgtgtctgccaggttctggctgatagattgtcgacagatccaggaatccgttacttttgcatcacaagtatacagagaaattatctgcgtaccttatatggccaaatttgtagtgtttgccaaatcacatgaccccattgaagccaggttgaggtgtttctgcatgactgatgataaagtggataagacccttgaacaacaagaaaattttgctgaggtggccagaagcagggatgtggaggtgttagaaggaaaacccatctacgttgattgtttcggcaacttggtaccattaactaaaagtggccagcatcatatattcagtttttttgccttcaaagaaaatagacttcctctatttgtcaaggtacgcgatacgactcaggaaccttgcggacgactatcatttatgaaggagccaaaatccacgagaggcctggtgcatcaagctatttgcaacttaaacatcactttgccgatttatacaaaggaatcagagtcagatcaagaacaggaggaagagatcgatatgacatcagaaaaaaatccacaggatgagcaggaacggatcgaggaaaggctggcttatattgctgatcaccttggcttcagctggacagaattagcaagagaactggatttcactgaggagcaaattcatcaaattcgaattgaaaatcccaactctcttcaagaccagagtcatgcactgttgaagtactggctagagagggatgggaaacatgctacagataccaacctcgttgaatgtctcaccaagatcaaccgaatggatattgttcatctcatggagaccaacacagaacctctccaggagcgcatcagtcatagttatgcagaaattgaacagaccattacactggatcatagtgaagggttctcggtacttcaagaggagttatgcactgcacagcacaagcagaaagaggagcaagctgtttctaaagaaagtgagacctgcgatcaccctcctatcgtctcagaggaagacatttctgttggttattccacttttcaggatggcgtccccaaaactgagggggacagctcagcaacagcactctttccccaaactcacaaggagcaagttcaacaggatttctcagggaaaatgcaagacctgcctgaagagtcatctctggaatatcagcaggaatattttgtgacaactccaggaacagaaacatcagagactcagaaggctatgatagtacccagctctcccagcaagacacctgaggaagttagcacccctgcagaggaggagaagctgtacctccagaccccaacatccagcgagcggggaggctctcccatcatacaagaacccgaagagccctcagagcacagagaggagagctctccgcggaaaaccagcctcgtaatagtggagtctgccgataaccagcctgagacctgtgaaagactcgatgaagatgcagcttttgaaaagggagacgatatgcctgaaatacccccagaaacagtcacagaagaagaatacattgatgagcatggacacaccgtggtaaagaaggttactaggaaaatcattaggcggtatgtatcctctgaaggcacagagaaagaagagattatggtgcagggaatgccacaggaacctgtcaacatcgaggaaggggatggctattccaaagttataaagcgtgttgtattgaagagtgacaccgagcagtcagaggacaacaatgagtaaagccatcacacagaagagggctgtggtgaaggaccagcatggaaaacgcattgacttggagcacctggaggatgtaccagaagcactagaccaggacgacctccagcgcgatctccagcagctccttcggcatttctgcaaggaggacttgaagcaagaggccaagtgaggggctgcccagttctcacaccagaaaccacacattcactcaatatgcagcttcctgtttcagtaggggagtgacctaactggcctaattaatgggataccccgacatttccactgttagcaaatatacggcattttgctttagttttcccccatcctctttaactataaagctaatttgtgaccaaagatggcatccttcatactggatgctgtatccaatactttgttgtgtctgtgctaacctgggaactggccacctccattgttctttgcttctgcacaagatccatgaaaatccattgatcagaagaacttcacctgcagacctcttcaagtgacactatgtaggaatccttccaaggaatatctatgtacaatgtatatagctgaaatgctcagatgaacaacatattaaaattaaaaccactgcctattgtaactacactgggcatcagaataaaaggcctctagaaattgctgaacaatggttaattaagatattgctaacacaatcgagtgataatacagttttactgcaaaagaagcacttcaaacctattatgtccttagaacttccagagtagccactgctcccagttaaaggtgggtcagtagccttgcagaactgtcctgagaagttattgctggtgctggccagccatggcttaggactccaacagccactctgagggaggggagaagggagcagaggccacgcagaatgaaccgatggggtattcagttgctggcagctacattgtgtggcattctagcatcttcaggtctttagatcttggacaagttggcagggtattttaaaagctataactactgtagttttccagttttcattgctgctttagcaaaccacgctgtcttacagtggtactttcttctggccactgcactgtagataattcattggaaacaagatttacccactacataaaaggttaaactccttcagtatgttggagtggtttctttttttttttctttctttcttttttttcttcaggtttatatcttctctaatacctgcatgtggcgtttaaaaatcaagaccacggtcaaacccctcttctaatcacattaattgtttccattctttttaccctgagtgagcacttttcactttccagctaggtctgtttttcagcttgcagacaagattgagaaatccttgaaaatttggttttggttaaaatttttggtttatttatttgaaatccacactcccttggaaactcttaagtgcatttgtgcacttctgtttgtttgtctcaaagaagggactgtaacaatctgagtaatttccatgtcctcttccttattcctctagtggttgaagctgtgtagcattttaacatatatatattcacaaatatattcatataaacagtatacattttgaatcagtcatttgttaaagaaaagtatattcaatgaagatgaaatttaaataaaaaaggacagagtctatcctccagggattgaacattttccaattatctggtcttttcctgttgtgcaaaaatgactcattgctccgaatgtcaaaaacaaatgcgacaaacaatggcacttcatcatttaaagtaatgttgccaagagaaaaaatttcctgggagggaggtttcccacaagccaaatctcctaagcctcaaatgctagcactttttggcagttggataggaaatgagacattctttggcagccaaaataagagaggccgatggtgaaactttttgagacaccctatggccttcttgtcaaaaccttcactggagctcaagaaaagcatttctgttgtgttatttgcagtgcagatgatgtctgtgtaacaacataatggttattcacctttttttgattttgatttttgctgtgttatcaaaaacttgaatactgtgagaagaagtgaattttcagttgacgaatcagcatcttgttcccatggtgataacactaattgaatatatctatgagggcatgtattagttaatggaaaaaaaaatacaacactaacaatacatagctgcaatgtgtacaatggctgatttaattaaataaaatgtacaagtgttaaatgt

SEQ ID NO: 1973 - DNA, 7202 bp, Homo sapiens
  source 1..7202: mol_type = unassigned DNA
acagcaggaggaggataggccgcgctgggcgggcgtcgcggggccgcgcttggtgttcctgagccgcggccgaactttttcccaagaagtcccacgtttggaggcccgaggagcgggacggggaggagagactggagttcctggaaggagcagcagcagcagccccacaacatggcctcctccgcctcctcctctcccgcgggcaccgaggactccgctcctgcccagggtggctttggatcagattattcacgaagctctagaaagtctgatgccaatgcaagttacttaagagcagctcgagctggacaccttgaaaaggccctcgactacataaaaaatggagttgacatcaacatttgcaatcagaatgggttgaacgctctccaccttgcttccaaagaaggccatgtagaggttgtttctgagctgctgcagagagaagccaatgtggatgcagctacaaagaaaggaaacacagcattgcacatcgcatctttggctgggcaagcagaggtggtaaaagtcttggttacaaatggagccaatgtcaatgcacaatctcagaatggtttcacgccattgtatatggcagcccaggaaaatcacctggaagttgtcaagtttcttcttgacaatggtgcaagccagagcctagccacagaggatggcttcacaccattggcagtggctttgcaacaaggtcacgaccaagtcgtttcgctcctgctagagaatgacaccaaaggaaaagtgcgtctcccagctcttcatatcgcggcccgaaaagacgacacgaaagccgccgccctgctgctgcagaatgacaacaatgcagatgtggaatcaaagagtggcttcactccgctccacatagctgctcactatggaaatatcaatgtagccacgttgctgttaaaccgagcggctgctgtggatttcaccgcaaggaatgacatcactcctttacatgttgcatcaaaaagaggaaatgcaaatatggtaaaactattgctcgatcgaggagctaaaatcgatgccaaaaccagggatggtctgacaccactgcactgtggagcaaggagtggccacgagcaggtggtagaaatgttgcttgatcgagctgcccccattctttcaaaaaccaagaatggattatctccattgcacatggccacacaaggggatcatttaaactgcgtccagcttctcctccagcataatgtacccgtggatgatgtcaccaatgactacctgactgccctacacgtggctgcccactgtggccattacaaagttgccaaggttctcttggataagaaagctaaccccaatgccaaagccctgaatggctttacccctcttcatattgcctgcaagaagaatcgaattaaagtaatggaactccttctgaaacacggtgcatccatccaagctgtaaccgagtcgggccttaccccaatccatgttgctgccttcatggggcatgtaaatattgtatcacaactaatgcatcatggagcctcaccaaacaccaccaatgtgagaggagaaacagcactgcacatggcagctcgctccggccaagctgaagttgtgcggtatctggtacaagacggagctcaggtagaagctaaagctaaggatgaccaaacaccactccacatttcagcccgactggggaaagcagacatagtacaacagctgttgcagcaaggggcatctccaaatgcagccacaacttctgggtacaccccacttcacctttccgcccgagaggggcatgaggatgtggccgcgttccttttggatcatggagcgtctttatctataacaacaaagaaaggatttactcctcttcatgtggcagcaaaatatggaaagcttgaagtcgccaatctcctgctacagaaaagtgcatctccagatgctgctgggaagagcgggctaacaccactgcatgtagctgcacattacgataatcagaaagtggcccttctgcttttggaccaaggagcctcacctcacgcagccgcaaagaatggttatacgccactgcacatcgctgccaaaaagaaccagatggacatagcgacaactctgctggaatatggtgctgatgccaacgcagttacccggcaaggaattgcttccgtccatctcgcagctcaggaagggcacgtggacatggtgtcgctgctcctcggtagaaatgcgaatgtgaacctgagcaataagagcggcctgaccccactccatttggctgctcaagaagatcgagtgaatgtggcagaagtcctcgtaaaccaaggggctcatgtggacgcccagacaaagatgggatacacaccactgcatgtgggctgccactatggaaatatcaagattgttaatttcctgctccagcattctgcaaaagttaatgccaaaacaaagaatgggtatacgccattacatcaagcagcacagcaggggcatacgcatataataaatgtcttacttcagaacaacgcctcccccaatgaactcactgtgaatgggaatactgcccttggcattgcccggcgcctcggctacatctcagtagtggacaccctgaagatagtgaccgaagagaccatgaccacaactactgtcacagagaagcacaaaatgaatgttccagaaacgatgaatgaagttcttgatatgtctgatgatgaagttcgtaaagccaatgcccctgaaatgctcagtgatggcgaatatatctcagatgttgaagaaggtgaagatgcaatgaccggggacacagacaaatatcttgggccacaggaccttaaggaattgggtgatgattccctgcctgcagagggttacatgggctttagtctcggagcgcgttctgccagcctccgctccttcagttcggataggtcttacaccttgaacagaagctcctatgcacgggacagcatgatgattgaagaactccttgtgccatccaaagagcagcatctaacattcacaagggaatttgattcagattctcttagacattacagctgggctgcagacaccttagacaatgtcaatcttgtttcaagccccattcattctgggtttctggttagctttatggtggacgcgagagggggctccatgagaggaagccgtcatcacgggatgagaatcatcattcctccacgcaagtgtacggcccccactcgaatcacctgccgtttggtaaagagacataaactggccaacccaccccccatggtggaaggagagggattagccagtaggctggtagaaatgggtcctgcaggggcacaatttttaggccctgtcatagtggaaatccctcactttgggtccatgagaggaaaagagagagaactcattgttcttcgaagtgaaaatggtgaaacttggaaggagcatcagtttgacagcaaaaatgaagatttaaccgagttacttaatggcatggatgaagaacttgatagcccagaagagttagggaaaaagcgtatctgcaggattatcacgaaagatttcccccagtattttgcagtggtttcccggattaagcaggaaagcaaccagattggtcctgaaggtggaattctgagcagcaccacagtgccccttgttcaagcatctttcccagagggtgccctaactaaaagaattcgagtgggcctccaggcccagcctgttccagatgaaattgtgaaaaagatccttggaaacaaagcaacttttagcccaattgtcactgtggaaccaagaagacggaaattccataaaccaatcacaatgaccattccggtgcccccgccctcaggagaaggtgtatccaatggatacaaaggggacactacacccaatctgcgtcttctctgtagcattacagggggcacttcgcctgctcagtgggaagacatcacaggaacaactcctttgacgtttataaaagattgtgtctcctttacaaccaatgtttcagccagattttggcttgcagactgccatcaagttttagaaactgtggggttagccacgcaactgtacagagaattgatatgtgttccatatatggccaagtttgttgtttttgccaaaatgaatgatcccgtagaatcttccttgcgatgtttctgcatgacagatgacaaagtggacaaaactttagagcaacaagagaattttgaggaagtcgcaagaagcaaagatattgaggttctggaaggaaaacctatttatgttgattgttatggaaatttggccccacttaccaaaggaggacagcaacttgtttttaacttttattctttcaaagaaaatagactgccattttccatcaagattagagacaccagccaagagccctgtggtcgtctgtcttttctgaaagaaccaaagacaacaaaaggactgcctcaaacagcggtttgcaacttaaatatcactctgccagcacataaaaagattgagaaaacagatagacgacagagcttcgcatccttagctttacgtaagcgctacagctacttgactgagcctggaatgagtccacagagtccatgtgaacggacagatatcaggatggcaatagtagccgatcacctgggacttagttggacagaactggcaagggaactgaatttttcagtggatgaaatcaatcaaatacgtgtggaaaatccaaattctttaatttctcagagcttcatgttattaaaaaaatgggttaccagagacggaaaaaatgccacaactgatgccttaacttcggtcttgacaaaaattaatcgaatagatatagtgacactgctagaaggaccaatatttgattatggaaatatttcaggcaccagaagttttgcagatgagaacaatgttttccatgaccctgttgatggttatccttcccttcaagtggaactggaaacccccacagggttgcactacacaccacctacccctttccagcaagatgattattttagtgatatctctagcatagaatctccccttagaacccctagtagactgagtgatgggctagtgccttcccaggggaacatagagcattccgcagatggacctccagtcgtaactgcagaagacgcttccttagaagacagcaaactggaagactcagtgcctttaacagaaatgcctgaagcagtggatgtagatgagagccagttggagaatgtatgtctgagttggcagaatgagacatcaagtggaaacctagagtcctgcgctcaagctcgaagagtaactggtgggttactagatcgactggatgacagccctgaccagtgtagagattccattacctcatatctcaaaggagaagctggcaaatttgaagcaaatggaagccatacagaaatcactccagaagcaaagacaaaatcttactttccagaatcccaaaatgatgtaggaaaacagagtaccaaggaaactctgaaaccaaaaatacatggatctggtcatgttgaagaaccagcatcaccactagcagcatatcagaaatctctagaagaaaccagcaagcttataatagaagagactaaaccctgtgtgcctgtcagtatgaaaaagatgagtaggacttctccagcagatggcaagccaaggcttagcctccatgaagaagaggggtccagtgggtctgagcaaaagcagggagaaggttttaaggtgaaaacgaagaaagaaatccggcatgtggaaaagaagagccactcgtaacagcgaacggtcagtcaaggatcataagtttttactgccagtattgagaaattcgtggaagaaatgtcagcaggaagtaaaaattcaccgagaagtgtgtgtgtgttcgctgcttccacacattaatggcatgattttttttatgcaaaaagaaaagaaaagaaaaccacccacattttaatttagcatgagccaatttacagagcatggaaatcactttcatttccggattggcgcgtgtgcaattagcaatgcagtgtatatacaagaagccatgctgttaacagtttatctcaagtaatttggtgtcatttacaaaaggaagaaattcctgccatcagaagggacagaaggagatggaatgatcaaatcacagagaaacactaaaattactaaatctacaacagctcgccttatttttcttggacccaaactgtcagggtataaacactatttgtttcttttttaaaacatcgatagttttgctgtaaataataacactgtataaattctaacagaaaaatagaataaaatgttgataaggcactgcctcttagaacacaaacagaatattgcaaatgcatttaacaaataggggtctcaagtgacttcaccctagaagaggagggagggattctgggtgggggtgactcttcactgattcttgtatattagcaattataatgtttgtatatgcaaaactgctagcttgattttaaaaaaaaacaaatctttaaaatctgctgcaaatttaaataattcccaaaatgaggaattctgtagttctgtgaaaaatttttttcttcagaatactaatattttgatgcatgtgtatcaccttattttgattaaatcttttccaattttgcaaacactacagtatactgcaacacaaaagattttatctgtaaacacaaagcccttcatctaatatttgttgctattgccaatttttcaatgaaatgacctaaaaacaacaaaaaaaaataacctatacggtagttgctttagggggtggggggatgctatctgttagtgcttaaaagggggtaaatgcttgccgctttagaggtggatggtgctcataaaaggccccagtcgggggtatttaaaaaggactgaacagaaatccttagctagtagaatggcagcacgctgtaaaattattactgtattgtgtactggctataagatgtagacacctttcagtaagccaatcatttgtaaccattctagcagtgtcatattaggttaataaggctgctgtgttttaaagggcatttttatttgggttttggtgaaattctttaatttgttgattatattcacataaaatcagcattcattgacacatagctctaatgacatatgtatgaaaaaccatacactggatgacctagtcgattatttaagcataaaataaattgtgttaaactcttcaccta

SEQ ID NO: 1974 - DNA, 5792 bp, Homo sapiens
  source 1..5792: mol_type = unassigned DNA
aagcagcggctgctttgcctggggagcacccgtaaatggactttggtctcaatgctttgactctttgccgtggttttggatgttggaataccggcggtgatctgtcttttataaactcacctgatttaaaggaaagatgagtgaagaaccaaaggagaaaaatgcaaaacctgctcataggaaaaggaaaggaaaaaagtctgatgccaatgcaagttacttaagagcagctcgagctggacaccttgaaaaggccctcgactacataaaaaatggagttgacatcaacatttgcaatcagaatgggttgaacgctctccaccttgcttccaaagaaggccatgtagaggttgtttctgagctgctgcagagagaagccaatgtggatgcagctacaaagaaaggaaacacagcattgcacatcgcatctttggctgggcaagcagaggtggtaaaagtcttggttacaaatggagccaatgtcaatgcacaatctcagaatggtttcacgccattgtatatggcagcccaggaaaatcacctggaagttgtcaagtttcttcttgacaatggtgcaagccagagcctagccacagaggatggcttcacaccattggcagtggctttgcaacaaggtcacgaccaagtcgtttcgctcctgctagagaatgacaccaaaggaaaagtgcgtctcccagctcttcatatcgcggcccgaaaagacgacacgaaagccgccgccctgctgctgcagaatgacaacaatgcagatgtggaatcaaagagtggcttcactccgctccacatagctgctcactatggaaatatcaatgtagccacgttgctgttaaaccgagcggctgctgtggatttcaccgcaaggaatgacatcactcctttacatgttgcatcaaaaagaggaaatgcaaatatggtaaaactattgctcgatcgaggagctaaaatcgatgccaaaaccagggatggtctgacaccactgcactgtggagcaaggagtggccacgagcaggtggtagaaatgttgcttgatcgagctgcccccattctttcaaaaaccaagaatggattatctccattgcacatggccacacaaggggatcatttaaactgcgtccagcttctcctccagcataatgtacccgtggatgatgtcaccaatgactacctgactgccctacacgtggctgcccactgtggccattacaaagttgccaaggttctcttggataagaaagctaaccccaatgccaaagccctgaatggctttacccctcttcatattgcctgcaagaagaatcgaattaaagtaatggaactccttctgaaacacggtgcatccatccaagctgtaaccgagtcgggccttaccccaatccatgttgctgccttcatggggcatgtaaatattgtatcacaactaatgcatcatggagcctcaccaaacaccaccaatgtgagaggagaaacagcactgcacatggcagctcgctccggccaagctgaagttgtgcggtatctggtacaagacggagctcaggtagaagctaaagctaaggatgaccaaacaccactccacatttcagcccgactggggaaagcagacatagtacaacagctgttgcagcaaggggcatctccaaatgcagccacaacttctgggtacaccccacttcacctttccgcccgagaggggcatgaggatgtggccgcgttccttttggatcatggagcgtctttatctataacaacaaagaaaggatttactcctcttcatgtggcagcaaaatatggaaagcttgaagtcgccaatctcctgctacagaaaagtgcatctccagatgctgctgggaagagcgggctaacaccactgcatgtagctgcacattacgataatcagaaagtggcccttctgcttttggaccaaggagcctcacctcacgcagccgcaaagaatggttatacgccactgcacatcgctgccaaaaagaaccagatggacatagcgacaactctgctggaatatggtgctgatgccaacgcagttacccggcaaggaattgcttccgtccatctcgcagctcaggaagggcacgtggacatggtgtcgctgctcctcggtagaaatgcgaatgtgaacctgagcaataagagcggcctgaccccactccatttggctgctcaagaagatcgagtgaatgtggcagaagtcctcgtaaaccaaggggctcatgtggacgcccagacaaagatgggatacacaccactgcatgtgggctgccactatggaaatatcaagattgttaatttcctgctccagcattctgcaaaagttaatgccaaaacaaagaatgggtatacgccattacatcaagcagcacagcaggggcatacgcatataataaatgtcttacttcagaacaacgcctcccccaatgaactcactgtgaatgggaatactgcccttggcattgcccggcgcctcggctacatctcagtagtggacaccctgaagatagtgaccgaagagaccatgaccacaactactgtcacagagaagcacaaaatgaatgttccagaaacgatgaatgaagttcttgatatgtctgatgatgaagttcgtaaagccaatgcccctgaaatgctcagtgatggcgaatatatctcagatgttgaagaaggtaatagatgcacatggtacaaaattcccaaggtacaagagtttacggtgaaaagtgaagatgcaatgaccggggacacagacaaatatcttgggccacaggaccttaaggaattgggtgatgattccctgcctgcagagggttacatgggctttagtctcggagcgcgttctgccagcctccgctccttcagttcggataggtcttacaccttgaacagaagctcctatgcacgggacagcatgatgattgaagaactccttgtgccatccaaagagcagcatctaacattcacaagggaatttgattcagattctcttagacattacagctgggctgcagacaccttagacaatgtcaatcttgtttcaagccccattcattctgggtttctggttagctttatggtggacgcgagagggggctccatgagaggaagccgtcatcacgggatgagaatcatcattcctccacgcaagtgtacggcccccactcgaatcacctgccgtttggtaaagagacataaactggccaacccaccccccatggtggaaggagagggattagccagtaggctggtagaaatgggtcctgcaggggcacaatttttaggccctgtcatagtggaaatccctcactttgggtccatgagaggaaaagagagagaactcattgttcttcgaagtgaaaatggtgaaacttggaaggagcatcagtttgacagcaaaaatgaagatttaaccgagttacttaatggcatggatgaagaacttgatagcccagaagagttagggaaaaagcgtatctgcaggattatcacgaaagatttcccccagtattttgcagtggtttcccggattaagcaggaaagcaaccagattggtcctgaaggtggaattctgagcagcaccacagtgccccttgttcaagcatctttcccagagggtgccctaactaaaagaattcgagtgggcctccaggcccagcctgttccagatgaaattgtgaaaaagatccttggaaacaaagcaacttttagcccaattgtcactgtggaaccaagaagacggaaattccataaaccaatcacaatgaccattccggtgcccccgccctcaggagaaggtgtatccaatggatacaaaggggacactacacccaatctgcgtcttctctgtagcattacagggggcacttcgcctgctcagtgggaagacatcacaggaacaactcctttgacgtttataaaagattgtgtctcctttacaaccaatgtttcagccagattttggcttgcagactgccatcaagttttagaaactgtggggttagccacgcaactgtacagagaattgatatgtgttccatatatggccaagtttgttgtttttgccaaaatgaatgatcccgtagaatcttccttgcgatgtttctgcatgacagatgacaaagtggacaaaactttagagcaacaagagaattttgaggaagtcgcaagaagcaaagatattgaggttctggaaggaaaacctatttatgttgattgttatggaaatttggccccacttaccaaaggaggacagcaacttgtttttaacttttattctttcaaagaaaatagactgccattttccatcaagattagagacaccagccaagagccctgtggtcgtctgtcttttctgaaagaaccaaagacaacaaaaggactgcctcaaacagcggtttgcaacttaaatatcactctgccagcacataaaaagattgagaaaacagatagacgacagagcttcgcatccttagctttacgtaagcgctacagctacttgactgagcctggaatgagtccacagagtccatgtgaacggacagatatcaggatggcaatagtagccgatcacctgggacttagttggacagaactggcaagggaactgaatttttcagtggatgaaatcaatcaaatacgtgtggaaaatccaaattctttaatttctcagagcttcatgttattaaaaaaatgggttaccagagacggaaaaaatgccacaactgatgccttaacttcggtcttgacaaaaattaatcgaatagatatagtgacactgctagaaggaccaatatttgattatggaaatatttcaggcaccagaagttttgcagatgagaacaatgttttccatgaccctgttgatggttatccttcccttcaagtggaactggaaacccccacagggttgcactacacaccacctacccctttccagcaagatgattattttagtgatatctctagcatagaatctccccttagaacccctagtagactgagtgatgggctagtgccttcccaggggaacatagagcattccgcagatggacctccagtcgtaactgcagaagacgcttccttagaagacagcaaactggaagactcagtgcctttaacagaaatgcctgaagcagtggatgtagatgagagccagttggagaatgtatgtctgagttggcagaatgagacatcaagtggaaacctagagtcctgcgctcaagctcgaagagtaactggtgggttactagatcgactggatgacagccctgaccagtgtagagattccattacctcatatctcaaaggagaagctggcaaatttgaagcaaatggaagccatacagaaatcactccagaagcaaagacaaaatcttactttccagaatcccaaaatgatgtaggaaaacagagtaccaaggaaactctgaaaccaaaaatacatggatctggtcatgttgaagaaccagcatcaccactagcagcatatcagaaatctctagaagaaaccagcaagcttataatagaagagactaaaccctgtgtgcctgtcagtatgaaaaagatgagtaggacttctccagcagatggcaagccaaggcttagcctccatgaagaagaggggtccagtgggtctgagcaaaagcagggagaaggttttaaggtgaaaacgaagaaagaaatccggcatgtggaaaagaagagccactcgtaacagcgaacggtcagtcaaggatcataagtttttactgccagtattgaga

SEQ ID NO: 1975 - DNA, 14771 bp, Homo sapiens
  source 1..14771: mol_type = unassigned DNA
ggacaccatcatttgggtttttaaaagcttcagcttctccagcatctttgcattgtgaatatcttcctgcttctagtcaaagctttctctctagtgattggaatgctgctgtaagcctgattagaggtgcctgaggatatcaccttttacaaggaagccgtgtgtgcttgagaggatctttttaaatgcattatggctcatgcagcctcacaattaaagaaaaacagggatttagaaatcaatgctgaagaagagcctgagaaaaaaaggaaacaccgcaaacggtcccgggatcggaagaaaaagtctgatgccaatgcaagttacttaagagcagctcgagctggacaccttgaaaaggccctcgactacataaaaaatggagttgacatcaacatttgcaatcagaatgggttgaacgctctccaccttgcttccaaagaaggccatgtagaggttgtttctgagctgctgcagagagaagccaatgtggatgcagctacaaagaaaggaaacacagcattgcacatcgcatctttggctgggcaagcagaggtggtaaaagtcttggttacaaatggagccaatgtcaatgcacaatctcagaatggtttcacgccattgtatatggcagcccaggaaaatcacctggaagttgtcaagtttcttcttgacaatggtgcaagccagagcctagccacagaggatggcttcacaccattggcagtggctttgcaacaaggtcacgaccaagtcgtttcgctcctgctagagaatgacaccaaaggaaaagtgcgtctcccagctcttcatatcgcggcccgaaaagacgacacgaaagccgccgccctgctgctgcagaatgacaacaatgcagatgtggaatcaaagagtggcttcactccgctccacatagctgctcactatggaaatatcaatgtagccacgttgctgttaaaccgagcggctgctgtggatttcaccgcaaggaatgacatcactcctttacatgttgcatcaaaaagaggaaatgcaaatatggtaaaactattgctcgatcgaggagctaaaatcgatgccaaaaccagggatggtctgacaccactgcactgtggagcaaggagtggccacgagcaggtggtagaaatgttgcttgatcgagctgcccccattctttcaaaaaccaagaatggattatctccattgcacatggccacacaaggggatcatttaaactgcgtccagcttctcctccagcataatgtacccgtggatgatgtcaccaatgactacctgactgccctacacgtggctgcccactgtggccattacaaagttgccaaggttctcttggataagaaagctaaccccaatgccaaagccctgaatggctttacccctcttcatattgcctgcaagaagaatcgaattaaagtaatggaactccttctgaaacacggtgcatccatccaagctgtaaccgagtcgggccttaccccaatccatgttgctgccttcatggggcatgtaaatattgtatcacaactaatgcatcatggagcctcaccaaacaccaccaatgtgagaggagaaacagcactgcacatggcagctcgctccggccaagctgaagttgtgcggtatctggtacaagacggagctcaggtagaagctaaagctaaggatgaccaaacaccactccacatttcagcccgactggggaaagcagacatagtacaacagctgttgcagcaaggggcatctccaaatgcagccacaacttctgggtacaccccacttcacctttccgcccgagaggggcatgaggatgtggccgcgttccttttggatcatggagcgtctttatctataacaacaaagaaaggatttactcctcttcatgtggcagcaaaatatggaaagcttgaagtcgccaatctcctgctacagaaaagtgcatctccagatgctgctgggaagagcgggctaacaccactgcatgtagctgcacattacgataatcagaaagtggcccttctgcttttggaccaaggagcctcacctcacgcagccgcaaagaatggttatacgccactgcacatcgctgccaaaaagaaccagatggacatagcgacaactctgctggaatatggtgctgatgccaacgcagttacccggcaaggaattgcttccgtccatctcgcagctcaggaagggcacgtggacatggtgtcgctgctcctcggtagaaatgcgaatgtgaacctgagcaataagagcggcctgaccccactccatttggctgctcaagaagatcgagtgaatgtggcagaagtcctcgtaaaccaaggggctcatgtggacgcccagacaaagatgggatacacaccactgcatgtgggctgccactatggaaatatcaagattgttaatttcctgctccagcattctgcaaaagttaatgccaaaacaaagaatgggtatacgccattacatcaagcagcacagcaggggcatacgcatataataaatgtcttacttcagaacaacgcctcccccaatgaactcactgtgaatgggaatactgcccttggcattgcccggcgcctcggctacatctcagtagtggacaccctgaagatagtgaccgaagagaccatgaccacaactactgtcacagagaagcacaaaatgaatgttccagaaacgatgaatgaagttcttgatatgtctgatgatgaagttcgtaaagccaatgcccctgaaatgctcagtgatggcgaatatatctcagatgttgaagaaggtgaagatgcaatgaccggggacacagacaaatatcttgggccacaggaccttaaggaattgggtgatgattccctgcctgcagagggttacatgggctttagtctcggagcgcgttctgccagcctccgctccttcagttcggataggtcttacaccttgaacagaagctcctatgcacgggacagcatgatgattgaagaactccttgtgccatccaaagagcagcatctaacattcacaagggaatttgattcagattctcttagacattacagctgggctgcagacaccttagacaatgtcaatcttgtttcaagccccattcattctgggtttctggttagctttatggtggacgcgagagggggctccatgagaggaagccgtcatcacgggatgagaatcatcattcctccacgcaagtgtacggcccccactcgaatcacctgccgtttggtaaagagacataaactggccaacccaccccccatggtggaaggagagggattagccagtaggctggtagaaatgggtcctgcaggggcacaatttttaggccctgtcatagtggaaatccctcactttgggtccatgagaggaaaagagagagaactcattgttcttcgaagtgaaaatggtgaaacttggaaggagcatcagtttgacagcaaaaatgaagatttaaccgagttacttaatggcatggatgaagaacttgatagcccagaagagttagggaaaaagcgtatctgcaggattatcacgaaagatttcccccagtattttgcagtggtttcccggattaagcaggaaagcaaccagattggtcctgaaggtggaattctgagcagcaccacagtgccccttgttcaagcatctttcccagagggtgccctaactaaaagaattcgagtgggcctccaggcccagcctgttccagatgaaattgtgaaaaagatccttggaaacaaagcaacttttagcccaattgtcactgtggaaccaagaagacggaaattccataaaccaatcacaatgaccattccggtgcccccgccctcaggagaaggtgtatccaatggatacaaaggggacactacacccaatctgcgtcttctctgtagcattacagggggcacttcgcctgctcagtgggaagacatcacaggaacaactcctttgacgtttataaaagattgtgtctcctttacaaccaatgtttcagccagattttggcttgcagactgccatcaagttttagaaactgtggggttagccacgcaactgtacagagaattgatatgtgttccatatatggccaagtttgttgtttttgccaaaatgaatgatcccgtagaatcttccttgcgatgtttctgcatgacagatgacaaagtggacaaaactttagagcaacaagagaattttgaggaagtcgcaagaagcaaagatattgaggttctggaaggaaaacctatttatgttgattgttatggaaatttggccccacttaccaaaggaggacagcaacttgtttttaacttttattctttcaaagaaaatagactgccattttccatcaagattagagacaccagccaagagccctgtggtcgtctgtcttttctgaaagaaccaaagacaacaaaaggactgcctcaaacagcggtttgcaacttaaatatcactctgccagcacataaaaaggagacagagtcagatcaagatgatgagattgagaaaacagatagacgacagagcttcgcatccttagctttacgtaagcgctacagctacttgactgagcctggaatgattgaacggagtacaggagcaacaagatccctccccaccacttactcatacaagccattcttttctacaagaccataccagtcctggacaacagctccgattacagtgcctgggccagccaagtcaggcttcacttccttatcaagttcttcctctaatacgccatcagcttctccgttaaaatcaatatggtctgtttcgacaccttctccaatcaaatccacattaggcgcgtcaactacatcttcagttaaatccattagtgacgtggcatctccaattagatcctttcggacaatgtcttcgccgataaaaactgtggtgtcacaatctccatacaatatccaagtttcctctggtaccctggctagagctccagcagtcacggaagctacgcccttaaaagggctggcatccaattctacgttttcctctcgaacctctccagtgactacagcagggtctcttttggagaggtcatcaattactatgacaccccctgcctcccccaaatcaaacattaatatgtattcctcaagtttgccatttaagtcaattattacatcagcagcaccgctaatatcttcacctttaaagtcagtggtgtctccagttaaatcagcagttgatgtcatttcatcagccaaaattacaatggcatcttctctctcatcacctgtgaagcagatgcctggacatgcagaggtagcattagtcaatggatctatttcccctctaaaatatccatcatcctcaactttaattaatggatgcaaagccactgccacgttacaggaaaaaatttcttctgctacaaactctgtgagctctgtggtcagtgcagccactgacacagttgagaaagtgttttctaccacgactgcaatgccattttccccactcaggtcatatgtttctgcagcaccatcagcttttcagtctctaagaactccttccgcaagtgcactctatacatcccttgggtcgtcaatatctgcaactacctcatctgtaacttcatcaattataacagtgccagtatactctgtagtcaatgttttgccagaaccagcattaaagaaacttccagactctaattcatttacaaaatcagcagcagccttgctgtcacccattaaaacattgactacggagacacatcctcagcctcacttcagtcgaacttcatctccagttaagtcatctttgttccttgcaccctctgcccttaagttgtctacaccatcttctttatcttccagtcaggagatactaaaagatgtagctgaaatgaaagaggacctaatgcggatgaccgcaatactacagacagatgtgcctgaggagaagccattccaacctgaactcccaaaggaagggagaatagatgatgaagaacctttcaaaattgtagagaaagtaaaggaagacttagtgaaagttagtgaaatccttaaaaaggatgtatgtgtagataataaaggatcacccaaatcaccaaagagtgacaaaggacactctcctgaagatgactggatagaatttagttcggaagaaatccgggaagccagacaacaagctgctgcgagccagtctccatctctgccagagagagtgcaagtaaaagcaaaagccgcctccgaaaaggattataacttgaccaaagttattgattacctaacaaatgatattgggagtagttcactgacaaacttaaaatacaagtttgaggatgcaaagaaggatggtgaggagagacagaaaagagttttaaaaccagcaattgctttgcaggaacacaaactcaaaatgcctccagcctccatgaggacttccacctctgagaaagaattgtgtaaaatggctgattccttttttggaacagatactattttagagtctcctgatgacttttctcaacacgaccaagataaaagtcccttgtctgacagtggctttgaaacaagaagtgaaaagacaccttcagccccacaaagcgctgaaagcactggtcctaaaccactttttcatgaagttcccatccctcctgtcattacagaaacaagaactgaagtggttcatgttatcaggagctatgatccctcagctggggatgttccccagacccaaccagaggagcctgtgtcacctaaaccttcacctacttttatggaattggaaccaaagcccaccacctctagtattaaagaaaaggttaaagcatttcaaatgaaagccagtagtgaagaagatgaccacaatcgggttttaagcaaaggcatgcgtgttaaagaagagactcacataaccacaaccaccagaatggtttatcattctccaccaggcggtgaaggtgcatctgaaagaattgaagaaaccatgtcagtccatgacatcatgaaggcctttcagtccgggcgggatccttccaaagaactggcaggtctgtttgaacataagtcggcagtgtctccagatgttcacaagtctgctgctgaaacctcagcccagcatgcagagaaggacaaccaaatgaaacccaaactggagcgtataatagaagtccacatcgaaaaaggtaaccaagctgagcccactgaagtcattattagagaaaccaaaaagcatccagaaaaagaaatgtatgtatatcagaaagacttatcccggggagatattaacctaaaagattttctgccagaaaaacacgatgcttttccttgttcagaggaacagggtcagcaagaagaagaagaacttactgctgaagagtcattgccttcttatctggagtcttccagagtaaacactcctgtgtcccaagaagaagatagccgccctagttctgctcaactcatatctgatgactcttataaaacattgaagcttttgagtcaacactcaatagaataccatgacgatgagttgtcagaactaagaggggagtcttacaggtttgctgagaaaatgcttctgtcagaaaagctagatgtgtctcattctgatactgaggaatcggttacagaccatgcaggaccccctagctcagagttacaggggtctgataagcggtccagagaaaaaatagccactgcccccaaaaaagaaattctctccaaaatctataaagatgtttctgaaaatggtgtaggtaaagtgtctaaagatgagcattttgataaagtgacagtgttgcactattctggcaatgttagtagtccaaaacatgccatgtggatgcgctttactgaggacagattagacagaggtagagagaagttgatatatgaagatagggtggacaggactgtgaaggaggctgaagaaaaactgactgaagtgtcacagttttttcgtgacaaaactgaaaagctaaatgatgaactgcagtccccagagaaaaaggcacgccctaaaaatggcaaagaatattcttctcaaagccctaccagtagcagccctgagaaagtgctactgacagaactgctggcatccaatgatgagtgggttaaggcaagacagcatggccctgatggacaaggcttccccaaggccgaggagaaggcacccagtctgcccagcagcccagagaagatggttctctcccaacagactgaggacagcaagtccacagtggaagccaaaggaagtatttcacagagcaaagcaccagatgggccccagtctggattccagctcaaacaatctaaactcagttccattagattaaaatttgaacaaggcacacacgcaaaaagtaaggacatgtctcaagaagacagaaagtcagatggccagtccagaatcccagttaaaaaaatacaggagagcaagctacccgtctaccaagtttttgctagagaaaaacagcagaaggccatagacctcccagatgaaagtgtatctgtgcaaaaagattttatggtattaaaaaccaaagatgagcatgcccaaagcaacgaaattgttgtaaatgattctggctctgataatgtgaaaaaacagagaactgaaatgtcaagtaaagcaatgcctgactctttttctgagcagcaggctaaagacttggcatgtcatataacctcagatttagcaactaggggaccatgggacaaaaaggtctttagaacatgggagagttcgggagccactaacaataagtctcagaaagaaaaactttcgcatgtacttgttcatgatgtaagagagaatcacattggtcaccctgagagtaaaagtgttgatcaaaagaatgaatttatgtctgtgactgagagagaacgcaaattgttaacaaacggctctctctcagaaattaaagaaatgactgtaaaatctccctccaaaaaagtcttatatagggaatatgttgtgaaagaaggggaccatccaggcggattgcttgatcagccttccaggaggagcgagagctcagcagtgtcacacattcccgtcagagttgctgatgagaggagaatgctgtcttctaatattcccgatggtttttgtgaacagtcggcatttccaaaacatgaactatcacaaaaattgtcccagtcaagcatgagtaaagagacagttgagacacagcactttaattctatagaagatgaaaaagttacctattcagaaatcagcaaagtttccaaacaccagagttatgtaggtttatgcccacctctcgaggaaaccgaaacctcccccaccaaatctcctgattctttagagtttagcccaggaaaggaatctccctctagtgatgtattcgaccacagtcccattgatggattggaaaaactcgcaccactagcccagacagagggagggaaagagataaaaactttacccgtttatgtcagttttgtacaagtggggaagcaatatgaaaaggagatacaacaaggaggtgtaaaaaaaatcataagtcaggaatgtaagacagtacaagaaaccagggggaccttttatacaactagacagcaaaagcaacctccttctccccaaggtagtccagaagatgatactctagagcaagtatcctttctagacagctctgggaaaagccctttaaccccagaaacacccagttcagaggaagtgagttatgaatttacatctaagacacctgactcgctcatagcttatataccaggcaaacccagcccaattcccgaggtttctgaggagtcagaggaggaggaacaggccaagtcaacctcccttaagcagactacagtggaggaaacagcagttgagcgtgaaatgcctaatgacgtgagcaaagactctaaccaaagacccaaaaataacagagttgcctatattgaatttccccctcctccaccactggatgcggaccagattgagtcagataagaagcatcattatctcccagaaaaagaggttgacatgattgaagtcaatctgcaagatgagcatgacaagtaccagctggctgaacctgtcattagagtgcagccaccttcaccagttcctcccggggcagacgtcagtgattcaagcgatgacgaatctatttatcagccagtcccagttaaaaaatataccttcaaattaaaggaagtggacgatgaacaaaaagaaaaacccaaagcttctgctgaaaaggcttccaaccagaaagaactggaaagtaatggatctggaaaagataatgaatttggccttggccttgattcacctcagaatgaaattgcccagaatgggaacaacgaccagtccatcacagagtgttccattgccaccacagcagagttttctcatgacacggatgccacagagatcgactctctggatggctatgacctgcaagatgaagatgatggcttgacagagagtgattctaaactcccaattcaagccatggaaattaagaaagatatctggaacacagagggcattctgaagccagctgaccgctcttttagccaaagtaaacttgaagttatcgaggaggagggaaaggtgggaccagatgaggacaagccaccttctaaaagttcttcatctgaaaagactcctgataagactgatcagaagtcaggggcccagttcttcacactggaaggcagacatcctgacagatcagtgtttcctgatacttacttcagttacaaagtagatgaagaatttgccactccttttaaaacagtagctaccaaaggtctagattttgacccttggtctaataaccgaggggatgatgaagtttttgacagtaaatcacgggaagatgaaactaagccatttgggctggcggtagaagaccgctctccagcaacaacccctgatacaacgccagccagaacgccaactgatgaaagtaccccaactagtgagcctaaccccttcccatttcatgaaggaaaaatgtttgagatgactcgcagtggtgcaattgacatgagcaagagggattttgttgaagagaggctccaatttttccagattggtgagcatacttctgaagggaagtcaggggaccagggggaaggggataaaagtatggtcactgccacaccacagccacagtcaggggacaccactgtagaaaccaatctagagagaaatgtagagacacctacagtggaacctaaccccagcatcccgaccagcggagagtgtcaggaaggcacatccagtagtggctccctggagaaatcagcagcagccactaacacctctaaagttgaccccaagttgcgcacgcctataaaaatgggaatttctgcatccaccatgaccatgaagaaagaaggccctggagaaataacagataagatagaagcggtgatgaccagttgtcagggattagaaaatgaaactataacaatgatttcaaatacagccaatagccagatgggcgttaggccccatgaaaaacatgattttcaaaaagataactttaataacaacaacaatttggattcttccactatacagacagataacattatgagtaatatagttctgacagaacattctgcacccacttgtaccacagagaaagataacccagtgaaagtctcatcaggaaaaaagacaggggtactacaaggacactgtgtaagagataagcagaaagttcttggagaacagcaaaaaacaaaggaattgatagggattaggcaaaaatccaaacttcccataaaggccacttcaccaaaagataccttcccaccgaaccatatgtcaaacactaaagcaagtaaaatgaagcaggttagtcaatccgagaaaaccaaagcccttactacttcttcatgtgtagatgtaaagtccagaattccagtgaaaaacacacacagggataacataattgcagttagaaaagcatgtgccacacaaaagcaagggcagccagagaaaggcaaggccaaacagcttccatccaagttgccagtaaaggtaagatccacctgtgtcactaccaccaccaccactgccaccaccaccaccactaccaccactaccaccaccaccagctgcacagttaaagttaggaaaagtcagctcaaggaagtatgtaaacattccattgaatattttaagggaattagtggtgagaccttaaagcttgtggaccgcctctctgaagaagaaaaaaagatgcagtccgagttgtccgatgaggaagaaagtacctcaagaaacacgtcgttgtccgagacttcccggggtggccagccttcggttacaacgaagtctgctagagataagaaaacagaggcagcacctttaaaatcaaagagtgaaaaggccggcagtgagaaaaggagcagtagaaggactggtccacagagtccatgtgaacggacagatatcaggatggcaatagtagccgatcacctgggacttagttggacagaactggcaagggaactgaatttttcagtggatgaaatcaatcaaatacgtgtggaaaatccaaattctttaatttctcagagcttcatgttattaaaaaaatgggttaccagagacggaaaaaatgccacaactgatgccttaacttcggtcttgacaaaaattaatcgaatagatatagtgacactgctagaaggaccaatatttgattatggaaatatttcaggcaccagaagttttgcagatgagaacaatgttttccatgaccctgttgatggttggcagaatgagacatcaagtggaaacctagagtcctgcgctcaagctcgaagagtaactggtgggttactagatcgactggatgacagccctgaccagtgtagagattccattacctcatatctcaaaggagaagctggcaaatttgaagcaaatggaagccatacagaaatcactccagaagcaaagacaaaatcttactttccagaatcccaaaatgatgtaggaaaacagagtaccaaggaaactctgaaaccaaaaatacatggatctggtcatgttgaagaaccagcatcaccactagcagcatatcagaaatctctagaagaaaccagcaagcttataatagaagagactaaaccctgtgtgcctgtcagtatgaaaaagatgagtaggacttctccagcagatggcaagccaaggcttagcctccatgaagaagaggggtccagtgggtctgagcaaaagcagggagaaggttttaaggtgaaaacgaagaaagaaatccggcatgtggaaaagaagagccactcgtaacagcgaacggtcagtcaaggatcataagtttttactgccagtattgagaaattcgtggaagaaatgtcagcaggaagtaaaaattcaccgagaagtgtgtgtgtgttcgctgcttccacacattaatggcatgattttttttatgcaaaaagaaaagaaaagaaaaccacccacattttaatttagcatgagccaatttacagagcatggaaatcactttcatttccggattggcgcgtgtgcaattagcaatgcagtgtatatacaagaagccatgctgttaacagtttatctcaagtaatttggtgtcatttacaaaaggaagaaattcctgccatcagaagggacagaaggagatggaatgatcaaatcacagagaaacactaaaattactaaatctacaacagctcgccttatttttcttggacccaaactgtcagggtataaacactatttgtttcttttttaaaacatcgatagttttgctgtaaataataacactgtataaattctaacagaaaaatagaataaaatgttgataaggcactgcctcttagaacacaaacagaatattgcaaatgcatttaacaaataggggtctcaagtgacttcaccctagaagaggagggagggattctgggtgggggtgactcttcactgattcttgtatattagcaattataatgtttgtatatgcaaaactgctagcttgattttaaaaaaaaacaaatctttaaaatctgctgcaaatttaaataattcccaaaatgaggaattctgtagttctgtgaaaaatttttttcttcagaatactaatattttgatgcatgtgtatcaccttattttgattaaatcttttccaattttgcaaacactacagtatactgcaacacaaaagattttatctgtaaacacaaagcccttcatctaatatttgttgctattgccaatttttcaatgaaatgacctaaaaacaacaaaaaaaaataacctatacggtagttgctttagggggtggggggatgctatctgttagtgcttaaaagggggtaaatgcttgccgctttagaggtggatggtgctcataaaaggccccagtcgggggtatttaaaaaggactgaacagaaatccttagctagtagaatggcagcacgctgtaaaattattactgtattgtgtactggctataagatgtagacacctttcagtaagccaatcatttgtaaccattctagcagtgtcatattaggttaataaggctgctgtgttttaaagggcatttttatttgggttttggtgaaattctttaatttgttgattatattcacataaaatcagcattcattgacacatagctctaatgacatatgtatgaaaaaccatacactggatgacctagtcgattatttaagcataaaataaattgtgttaaactcttcaccta

SEQ ID NO: 1976 - DNA, 3811 bp, Homo sapiens
  source 1..3811: mol_type = unassigned DNA
agctgagaacaaagttgaaagtttgcctggagctccatgccactccccgcctgggccactgctttgttttcttctaatgtttttcctctacctgggttggctgtttcttcattcatatttgagaagaatcacctcctaattaaatgtagcacttcgctctctccctacatgaaggctgtcttggttacccgactaggcaacgcgcattggtatcaaattaccgaaagtctacaccggagcagtcctcatatttacatacaaataactcaggggcttgcatttatgtcaccattctgtcctgctagaggcttgccagaggagtttttaatccaatcagaaggagctttaaaaggatgtctgcgaagtggtcaaaaggatcttaacctcaattaagtggggttttttaaaaagatttttttgggggcctgaaattttgaaaatcttcgaactctgagtggggaaagatgtataattcctcaattgcctacgaggatatcaagatgctgagaggaattcagcggtggtgaagagagtggatacaaaccagggattggtttccttgagctgttttggaggttgattctaaatcactgcttaaggaattcctggaaacatcaggaaaacatttgatcatccaagcctagtggaaatggctttaccgcagagtgaagatgcaatgaccggggacacagacaaatatcttgggccacaggaccttaaggaattgggtgatgattccctgcctgcagagggttacatgggctttagtctcggagcgcgttctgccagcctccgctccttcagttcggataggtcttacaccttgaacagaagctcctatgcacgggacagcatgatgattgaagaactccttgtgccatccaaagagcagcatctaacattcacaagggaatttgattcagattctcttagacattacagctgggctgcagacaccttagacaatgtcaatcttgtttcaagccccattcattctgggtttctggttagctttatggtggacgcgagagggggctccatgagaggaagccgtcatcacgggatgagaatcatcattcctccacgcaagtgtacggcccccactcgaatcacctgccgtttggtaaagagacataaactggccaacccaccccccatggtggaaggagagggattagccagtaggctggtagaaatgggtcctgcaggggcacaatttttaggccctgtcatagtggaaatccctcactttgggtccatgagaggaaaagagagagaactcattgttcttcgaagtgaaaatggtgaaacttggaaggagcatcagtttgacagcaaaaatgaagatttaaccgagttacttaatggcatggatgaagaacttgatagcccagaagagttagggaaaaagcgtatctgcaggattatcacgaaagatttcccccagtattttgcagtggtttcccggattaagcaggaaagcaaccagattggtcctgaaggtggaattctgagcagcaccacagtgccccttgttcaagcatctttcccagagggtgccctaactaaaagaattcgagtgggcctccaggcccagcctgttccagatgaaattgtgaaaaagatccttggaaacaaagcaacttttagcccaattgtcactgtggaaccaagaagacggaaattccataaaccaatcacaatgaccattccggtgcccccgccctcaggagaaggtgtatccaatggatacaaaggggacactacacccaatctgcgtcttctctgtagcattacagggggcacttcgcctgctcagtgggaagacatcacaggaacaactcctttgacgtttataaaagattgtgtctcctttacaaccaatgtttcagccagattttggcttgcagactgccatcaagttttagaaactgtggggttagccacgcaactgtacagagaattgatatgtgttccatatatggccaagtttgttgtttttgccaaaatgaatgatcccgtagaatcttccttgcgatgtttctgcatgacagatgacaaagtggacaaaactttagagcaacaagagaattttgaggaagtcgcaagaagcaaagatattgaggttctggaaggaaaacctatttatgttgattgttatggaaatttggccccacttaccaaaggaggacagcaacttgtttttaacttttattctttcaaagaaaatagactgccattttccatcaagattagagacaccagccaagagccctgtggtcgtctgtcttttctgaaagaaccaaagacaacaaaaggactgcctcaaacagcggtttgcaacttaaatatcactctgccagcacataaaaagattgagaaaacagatagacgacagagcttcgcatccttagctttacgtaagcgctacagctacttgactgagcctggaatgagtccacagagtccatgtgaacggacagatatcaggatggcaatagtagccgatcacctgggacttagttggacagaactggcaagggaactgaatttttcagtggatgaaatcaatcaaatacgtgtggaaaatccaaattctttaatttctcagagcttcatgttattaaaaaaatgggttaccagagacggaaaaaatgccacaactgatgccttaacttcggtcttgacaaaaattaatcgaatagatatagtgacactgctagaaggaccaatatttgattatggaaatatttcaggcaccagaagttttgcagatgagaacaatgttttccatgaccctgttgatggttatccttcccttcaagtggaactggaaacccccacagggttgcactacacaccacctacccctttccagcaagatgattattttagtgatatctctagcatagaatctccccttagaacccctagtagactgagtgatgggctagtgccttcccaggggaacatagagcattccgcagatggacctccagtcgtaactgcagaagacgcttccttagaagacagcaaactggaagactcagtgcctttaacagaaatgcctgaagcagtggatgtagatgagagccagttggagaatgtatgtctgagttggcagaatgagacatcaagtggaaacctagagtcctgcgctcaagctcgaagagtaactggtgggttactagatcgactggatgacagccctgaccagtgtagagattccattacctcatatctcaaaggagaagctggcaaatttgaagcaaatggaagccatacagaaatcactccagaagcaaagacaaaatcttactttccagaatcccaaaatgatgtaggaaaacagagtaccaaggaaactctgaaaccaaaaatacatggatctggtcatgttgaagaaccagcatcaccactagcagcatatcagaaatctctagaagaaaccagcaagcttataatagaagagactaaaccctgtgtgcctgtcagtatgaaaaagatgagtaggacttctccagcagatggcaagccaaggcttagcctccatgaagaagaggggtccagtgggtctgagcaaaagcagggagaaggttttaaggtgaaaacgaagaaagaaatccggcatgtggaaaagaagagccactcgtaacagcgaacggtcagtcaaggatcataagtttttactgccagtattgagaaattcgtggaagaaatgtcagcaggaagtaaaaattcaccgagaagtgtgtgtgtgttcgctgcttccacacattaatggcatgattttttttatgcaaaaagaaaa

SEQ ID NO: 1977 - DNA, 3306 bp, Homo sapiens
  source 1..3306: mol_type = unassigned DNA
atgagtgaagaaccaaaggagaaaaatgcaaaacctgctcataggaaaaggaaaggaaaaaagtctgatgccaatgcaagttacttaagagcagctcgagctggacaccttgaaaaggccctcgactacatctcagtagtggacaccctgaagatagtgaccgaagagaccatgaccacaactactgtcacagagaagcacaaaatgaatgttccagaaacgatgaatgaagttcttgatatgtctgatgatgaagttcgtaaagccaatgcccctgaaatgctcagtgatggcgaatatatctcagatgttgaagaaggtgaagatgcaatgaccggggacacagacaaatatcttgggccacaggaccttaaggaattgggtgatgattccctgcctgcagagggttacatgggctttagtctcggagcgcgttctgccagcctccgctccttcagttcggataggtcttacaccttgaacagaagctcctatgcacgggacagcatgatgattgaagaactccttgtgccatccaaagagcagcatctaacattcacaagggaatttgattcagattctcttagacattacagctgggctgcagacaccttagacaatgtcaatcttgtttcaagccccattcattctgggtttctggttagctttatggtggacgcgagagggggctccatgagaggaagccgtcatcacgggatgagaatcatcattcctccacgcaagtgtacggcccccactcgaatcacctgccgtttggtaaagagacataaactggccaacccaccccccatggtggaaggagagggattagccagtaggctggtagaaatgggtcctgcaggggcacaatttttaggccctgtcatagtggaaatccctcactttgggtccatgagaggaaaagagagagaactcattgttcttcgaagtgaaaatggtgaaacttggaaggagcatcagtttgacagcaaaaatgaagatttaaccgagttacttaatggcatggatgaagaacttgatagcccagaagagttagggaaaaagcgtatctgcaggattatcacgaaagatttcccccagtattttgcagtggtttcccggattaagcaggaaagcaaccagattggtcctgaaggtggaattctgagcagcaccacagtgccccttgttcaagcatctttcccagagggtgccctaactaaaagaattcgagtgggcctccaggcccagcctgttccagatgaaattgtgaaaaagatccttggaaacaaagcaacttttagcccaattgtcactgtggaaccaagaagacggaaattccataaaccaatcacaatgaccattccggtgcccccgccctcaggagaaggtgtatccaatggatacaaaggggacactacacccaatctgcgtcttctctgtagcattacagggggcacttcgcctgctcagtgggaagacatcacaggaacaactcctttgacgtttataaaagattgtgtctcctttacaaccaatgtttcagccagattttggcttgcagactgccatcaagttttagaaactgtggggttagccacgcaactgtacagagaattgatatgtgttccatatatggccaagtttgttgtttttgccaaaatgaatgatcccgtagaatcttccttgcgatgtttctgcatgacagatgacaaagtggacaaaactttagagcaacaagagaattttgaggaagtcgcaagaagcaaagatattgaggttctggaaggaaaacctatttatgttgattgttatggaaatttggccccacttaccaaaggaggacagcaacttgtttttaacttttattctttcaaagaaaatagactgccattttccatcaagattagagacaccagccaagagccctgtggtcgtctgtcttttctgaaagaaccaaagacaacaaaaggactgcctcaaacagcggtttgcaacttaaatatcactctgccagcacataaaaagattgagaaaacagatagacgacagagcttcgcatccttagctttacgtaagcgctacagctacttgactgagcctggaatgagtccacagagtccatgtgaacggacagatatcaggatggcaatagtagccgatcacctgggacttagttggacagaactggcaagggaactgaatttttcagtggatgaaatcaatcaaatacgtgtggaaaatccaaattctttaatttctcagagcttcatgttattaaaaaaatgggttaccagagacggaaaaaatgccacaactgatgccttaacttcggtcttgacaaaaattaatcgaatagatatagtgacactgctagaaggaccaatatttgattatggaaatatttcaggcaccagaagttttgcagatgagaacaatgttttccatgaccctgttgatggttatccttcccttcaagtggaactggaaacccccacagggttgcactacacaccacctacccctttccagcaagatgattattttagtgatatctctagcatagaatctccccttagaacccctagtagactgagtgatgggctagtgccttcccaggggaacatagagcattccgcagatggacctccagtcgtaactgcagaagacgcttccttagaagacagcaaactggaagactcagtgcctttaacagaaatgcctgaagcagtggatgtagatgagagccagttggagaatgtatgtctgagttggcagaatgagacatcaagtggaaacctagagtcctgcgctcaagctcgaagagtaactggtgggttactagatcgactggatgacagccctgaccagtgtagagattccattacctcatatctcaaaggagaagctggcaaatttgaagcaaatggaagccatacagaaatcactccagaagcaaagacaaaatcttactttccagaatcccaaaatgatgtaggaaaacagagtaccaaggaaactctgaaaccaaaaatacatggatctggtcatgttgaagaaccagcatcaccactagcagcatatcagaaatctctagaagaaaccagcaagcttataatagaagagactaaaccctgtgtgcctgtcagtatgaaaaagatgagtaggacttctccagcagatggcaagccaaggcttagcctccatgaagaagaggggtccagtgggtctgagcaaaagggagaaggttttaaggtgaaaacgaagaaagaaatccggcatgtggaaaagaagagccactcgtaa

SEQ ID NO: 1978 - DNA, 4593 bp, Homo sapiens
  source 1..4593: mol_type = unassigned DNA
ggacaccatcatttgggtttttaaaagcttcagcttctccagcatctttgcattgtgaatatcttcctgcttctagtcaaagctttctctctagtgattggaatgctgctgtaagcctgattagaggtgcctgaggatatcaccttttacaaggaagccgtgtgtgcttgagaggatctttttaaatgcattatggctcatgcagcctcacaattaaagaaaaacagggatttagaaatcaatgctgaagaagagcctgagaaaaaaaggaaacaccgcaaacggtcccgggatcggaagaaaaagtctgatgccaatgcaagttacttaagagcagctcgagctggacaccttgaaaaggccctcgactacataaaaaatggagttgacatcaacatttgcaatcagaatgggttgaacgctctccaccttgcttccaaagaaggccatgtagaggttgtttctgagctgctgcagagagaagccaatgtggatgcagctacaaagaaaggaaacacagcattgcacatcgcatctttggctgggcaagcagaggtggtaaaagtcttggttacaaatggagccaatgtcaatgcacaatctcagaatggtttcacgccattgtatatggcagcccaggaaaatcacctggaagttgtcaagtttcttcttgacaatggtgcaagccagagcctagccacagaggatggcttcacaccattggcagtggctttgcaacaaggtcacgaccaagtcgtttcgctcctgctagagaatgacaccaaaggaaaagtgcgtctcccagctcttcatatcgcggcccgaaaagacgacacgaaagccgccgccctgctgctgcagaatgacaacaatgcagatgtggaatcaaagagtggcttcactccgctccacatagctgctcactatggaaatatcaatgtagccacgttgctgttaaaccgagcggctgctgtggatttcaccgcaaggaatgacatcactcctttacatgttgcatcaaaaagaggaaatgcaaatatggtaaaactattgctcgatcgaggagctaaaatcgatgccaaaaccagggatggtctgacaccactgcactgtggagcaaggagtggccacgagcaggtggtagaaatgttgcttgatcgagctgcccccattctttcaaaaaccaagaatggattatctccattgcacatggccacacaaggggatcatttaaactgcgtccagcttctcctccagcataatgtacccgtggatgatgtcaccaatgactacctgactgccctacacgtggctgcccactgtggccattacaaagttgccaaggttctcttggataagaaagctaaccccaatgccaaagccctgaatggctttacccctcttcatattgcctgcaagaagaatcgaattaaagtaatggaactccttctgaaacacggtgcatccatccaagctgtaaccgagtcgggccttaccccaatccatgttgctgccttcatggggcatgtaaatattgtatcacaactaatgcatcatggagcctcaccaaacaccaccaatgtgagaggagaaacagcactgcacatggcagctcgctccggccaagctgaagttgtgcggtatctggtacaagacggagctcaggtagaagctaaagctaaggatgaccaaacaccactccacatttcagcccgactggggaaagcagacatagtacaacagctgttgcagcaaggggcatctccaaatgcagccacaacttctgggtacaccccacttcacctttccgcccgagaggggcatgaggatgtggccgcgttccttttggatcatggagcgtctttatctataacaacaaagaaaggatttactcctcttcatgtggcagcaaaatatggaaagcttgaagtcgccaatctcctgctacagaaaagtgcatctccagatgctgctgggaagagcgggctaacaccactgcatgtagctgcacattacgataatcagaaagtggcccttctgcttttggaccaaggagcctcacctcacgcagccgcaaagaatggttatacgccactgcacatcgctgccaaaaagaaccagatggacatagcgacaactctgctggaatatggtgctgatgccaacgcagttacccggcaaggaattgcttccgtccatctcgcagctcaggaagggcacgtggacatggtgtcgctgctcctcggtagaaatgcgaatgtgaacctgagcaataagagcggcctgaccccactccatttggctgctcaagaagatcgagtgaatgtggcagaagtcctcgtaaaccaaggggctcatgtggacgcccagacaaagatgggatacacaccactgcatgtgggctgccactatggaaatatcaagattgttaatttcctgctccagcattctgcaaaagttaatgccaaaacaaagaatgggtatacgccattacatcaagcagcacagcaggggcatacgcatataataaatgtcttacttcagaacaacgcctcccccaatgaactcactgtgaatgggaatactgcccttggcattgcccggcgcctcggctacatctcagtagtggacaccctgaagatagtgaccgaagagaccatgaccacaactactgtcacagagaagcacaaaatgaatgttccagaaacgatgaatgaagttcttgatatgtctgatgatgaaggtgaagatgcaatgaccggggacacagacaaatatcttgggccacaggaccttaaggaattgggtgatgattccctgcctgcagagggttacatgggctttagtctcggagcgcgttctgccagttcggataggtcttacaccttgaacagaagctcctatgcacgggacagcatgatgattgaagaactccttgtgccatccaaagagcagcatctaacattcacaagggaatttgattcagattctcttagacattacagctgggctgcagacaccttagacaatgtcaatcttgtttcaagccccattcattctgggtttctggttagctttatggtggacgcgagagggggctccatgagaggaagccgtcatcacgggatgagaatcatcattcctccacgcaagtgtacggcccccactcgaatcacctgccgtttggtaaagagacataaactggccaacccaccccccatggtggaaggagagggattagccagtaggctggtagaaatgggtcctgcaggggcacaatttttaggccctgtcatagtggaaatccctcactttgggtccatgagaggaaaagagagagaactcattgttcttcgaagtgaaaatggtgaaacttggaaggagcatcagtttgacagcaaaaatgaagatttaaccgagttacttaatggcatggatgaagaacttgatagcccagaagagttagggaaaaagcgtatctgcaggattatcacgaaagatttcccccagtattttgcagtggtttcccggattaagcaggaaagcaaccagattggtcctgaaggtggaattctgagcagcaccacagtgccccttgttcaagcatctttcccagagggtgccctaactaaaagaattcgagtgggcctccaggcccagcctgttccagatgaaattgtgaaaaagatccttggaaacaaagcaacttttagcccaattgtcactgtggaaccaagaagacggaaattccataaaccaatcacaatgaccattccggtgcccccgccctcaggagaaggtgtatccaatggatacaaaggggacactacacccaatctgcgtcttctctgtagcattacagggggcacttcgcctgctcagtgggaagacatcacaggaacaactcctttgacgtttataaaagattgtgtctcctttacaaccaatgtttcagccagattttggcttgcagactgccatcaagttttagaaactgtggggttagccacgcaactgtacagagaattgatatgtgttccatatatggccaagtttgttgtttttgccaaaatgaatgatcccgtagaatcttccttgcgatgtttctgcatgacagatgacaaagtggacaaaactttagagcaacaagagaattttgaggaagtcgcaagaagcaaagatattgaggttctggaaggaaaacctatttatgttgattgttatggaaatttggccccacttaccaaaggaggacagcaacttgtttttaacttttattctttcaaagaaaatagactgccattttccatcaagattagagacaccagccaagagccctgtggtcgtctgtcttttctgaaagaaccaaagacaacaaaaggactgcctcaaacagcggtttgcaacttaaatatcactctgccagcacataaaaagattgagaaaacagatagacgacagagcttcgcatccttagctttacgtaagcgctacagctacttgactgagcctggaatgagtgagtttcctaacacatttactaatacgtggattttcataagaagagacattttttctatacaaaccaaattt

SEQ ID NO: 1979 - DNA, 5593 bp, Homo sapiens
  source 1..5593: mol_type = unassigned DNA
tctgatgccaatgcaagttacttaagagcagctcgagctggacaccttgaaaaggccctcgactacataaaaaatggagttgacatcaacatttgcaatcagaatgggttgaacgctctccaccttgcttccaaagaaggccatgtagaggttgtttctgagctgctgcagagagaagccaatgtggatgcagctacaaagaaaggaaacacagcattgcacatcgcatctttggctgggcaagcagaggtggtaaaagtcttggttacaaatggagccaatgtcaatgcacaatctcagaatggtttcacgccattgtatatggcagcccaggaaaatcacctggaagttgtcaagtttcttcttgacaatggtgcaagccagagcctagccacagaggatggcttcacaccattggcagtggctttgcaacaaggtcacgaccaagtcgtttcgctcctgctagagaatgacaccaaaggaaaagtgcgtctcccagctcttcatatcgcggcccgaaaagacgacacgaaagccgccgccctgctgctgcagaatgacaacaatgcagatgtggaatcaaagagtggcttcactccgctccacatagctgctcactatggaaatatcaatgtagccacgttgctgttaaaccgagcggctgctgtggatttcaccgcaaggaatgacatcactcctttacatgttgcatcaaaaagaggaaatgcaaatatggtaaaactattgctcgatcgaggagctaaaatcgatgccaaaaccagggatggtctgacaccactgcactgtggagcaaggagtggccacgagcaggtggtagaaatgttgcttgatcgagctgcccccattctttcaaaaaccaagaatggattatctccattgcacatggccacacaaggggatcatttaaactgcgtccagcttctcctccagcataatgtacccgtggatgatgtcaccaatgactacctgactgccctacacgtggctgcccactgtggccattacaaagttgccaaggttctcttggataagaaagctaaccccaatgccaaagccctgaatggctttacccctcttcatattgcctgcaagaagaatcgaattaaagtaatggaactccttctgaaacacggtgcatccatccaagctgtaaccgagtcgggccttaccccaatccatgttgctgccttcatggggcatgtaaatattgtatcacaactaatgcatcatggagcctcaccaaacaccaccaatgtgagaggagaaacagcactgcacatggcagctcgctccggccaagctgaagttgtgcggtatctggtacaagacggagctcaggtagaagctaaagctaaggatgaccaaacaccactccacatttcagcccgactggggaaagcagacatagtacaacagctgttgcagcaaggggcatctccaaatgcagccacaacttctgggtacaccccacttcacctttccgcccgagaggggcatgaggatgtggccgcgttccttttggatcatggagcgtctttatctataacaacaaagaaaggatttactcctcttcatgtggcagcaaaatatggaaagcttgaagtcgccaatctcctgctacagaaaagtgcatctccagatgctgctgggaagagcgggctaacaccactgcatgtagctgcacattacgataatcagaaagtggcccttctgcttttggaccaaggagcctcacctcacgcagccgcaaagaatggttatacgccactgcacatcgctgccaaaaagaaccagatggacatagcgacaactctgctggaatatggtgctgatgccaacgcagttacccggcaaggaattgcttccgtccatctcgcagctcaggaagggcacgtggacatggtgtcgctgctcctcggtagaaatgcgaatgtgaacctgagcaataagagcggcctgaccccactccatttggctgctcaagaagatcgagtgaatgtggcagaagtcctcgtaaaccaaggggctcatgtggacgcccagacaaagatgggatacacaccactgcatgtgggctgccactatggaaatatcaagattgttaatttcctgctccagcattctgcaaaagttaatgccaaaacaaagaatgggtatacgccattacatcaagcagcacagcaggggcatacgcatataataaatgtcttacttcagaacaacgcctcccccaatgaactcactgtgaatgggaatactgcccttggcattgcccggcgcctcggctacatctcagtagtggacaccctgaagatagtgaccgaagagaccatgaccacaactactgtcacagagaagcacaaaatgaatgttccagaaacgatgaatgaagttcttgatatgtctgatgatgaagttcgtaaagccaatgcccctgaaatgctcagtgatggcgaatatatctcagatgttgaagaaggtaatagatgcacatggtacaaaattcccaaggtacaagagtttacggtgaaaagtgaagatgcaatgaccggggacacagacaaatatcttgggccacaggaccttaaggaattgggtgatgattccctgcctgcagagggttacatgggctttagtctcggagcgcgttctgccagcctccgctccttcagttcggataggtcttacaccttgaacagaagctcctatgcacgggacagcatgatgattgaagaactccttgtgccatccaaagagcagcatctaacattcacaagggaatttgattcagattctcttagacattacagctgggctgcagacaccttagacaatgtcaatcttgtttcaagccccattcattctgggtttctggttagctttatggtggacgcgagagggggctccatgagaggaagccgtcatcacgggatgagaatcatcattcctccacgcaagtgtacggcccccactcgaatcacctgccgtttggtaaagagacataaactggccaacccaccccccatggtggaaggagagggattagccagtaggctggtagaaatgggtcctgcaggggcacaatttttaggccctgtcatagtggaaatccctcactttgggtccatgagaggaaaagagagagaactcattgttcttcgaagtgaaaatggtgaaacttggaaggagcatcagtttgacagcaaaaatgaagatttaaccgagttacttaatggcatggatgaagaacttgatagcccagaagagttagggaaaaagcgtatctgcaggattatcacgaaagatttcccccagtattttgcagtggtttcccggattaagcaggaaagcaaccagattggtcctgaaggtggaattctgagcagcaccacagtgccccttgttcaagcatctttcccagagggtgccctaactaaaagaattcgagtgggcctccaggcccagcctgttccagatgaaattgtgaaaaagatccttggaaacaaagcaacttttagcccaattgtcactgtggaaccaagaagacggaaattccataaaccaatcacaatgaccattccggtgcccccgccctcaggagaaggtgtatccaatggatacaaaggggacactacacccaatctgcgtcttctctgtagcattacagggggcacttcgcctgctcagtgggaagacatcacaggaacaactcctttgacgtttataaaagattgtgtctcctttacaaccaatgtttcagccagattttggcttgcagactgccatcaagttttagaaactgtggggttagccacgcaactgtacagagaattgatatgtgttccatatatggccaagtttgttgtttttgccaaaatgaatgatcccgtagaatcttccttgcgatgtttctgcatgacagatgacaaagtggacaaaactttagagcaacaagagaattttgaggaagtcgcaagaagcaaagatattgaggttctggaaggaaaacctatttatgttgattgttatggaaatttggccccacttaccaaaggaggacagcaacttgtttttaacttttattctttcaaagaaaatagactgccattttccatcaagattagagacaccagccaagagccctgtggtcgtctgtcttttctgaaagaaccaaagacaacaaaaggactgcctcaaacagcggtttgcaacttaaatatcactctgccagcacataaaaagattgagaaaacagatagacgacagagcttcgcatccttagctttacgtaagcgctacagctacttgactgagcctggaatgagtccacagagtccatgtgaacggacagatatcaggatggcaatagtagccgatcacctgggacttagttggacagaactggcaagggaactgaatttttcagtggatgaaatcaatcaaatacgtgtggaaaatccaaattctttaatttctcagagcttcatgttattaaaaaaatgggttaccagagacggaaaaaatgccacaactgatgccttaacttcggtcttgacaaaaattaatcgaatagatatagtgacactgctagaaggaccaatatttgattatggaaatatttcaggcaccagaagttttgcagatgagaacaatgttttccatgaccctgttgatggttatccttcccttcaagtggaactggaaacccccacagggttgcactacacaccacctacccctttccagcaagatgattattttagtgatatctctagcatagaatctccccttagaacccctagtagactgagtgatgggctagtgccttcccaggggaacatagagcattccgcagatggacctccagtcgtaactgcagaagacgcttccttagaagacagcaaactggaagactcagtgcctttaacagaaatgcctgaagcagtggatgtagatgagagccagttggagaatgtatgtctgagttggcagaatgagacatcaagtggaaacctagagtcctgcgctcaagctcgaagagtaactggtgggttactagatcgactggatgacagccctgaccagtgtagagattccattacctcatatctcaaaggagaagctggcaaatttgaagcaaatggaagccatacagaaatcactccagaagcaaagacaaaatcttactttccagaatcccaaaatgatgtaggaaaacagagtaccaaggaaactctgaaaccaaaaatacatggatctggtcatgttgaagaaccagcatcaccactagcagcatatcagaaatctctagaagaaaccagcaagcttataatagaagagactaaaccctgtgtgcctgtcagtatgaaaaagatgagtaggacttctccagcagatggcaagccaaggcttagcctccatgaagaagaggggtccagtgggtctgagcaaaagcagggagaaggttttaaggtgaaaacgaagaaagaaatccggcatgtggaaaagaagagccactcgtaacagcgaacggtcagtcaaggatcataagtttttactgccagtattgaga

SEQ ID NO: 1980 - DNA, 4563 bp, Homo sapiens
  source 1..4563: mol_type = unassigned DNA
ggacaccatcatttgggtttttaaaagcttcagcttctccagcatctttgcattgtgaatatcttcctgcttctagtcaaagctttctctctagtgattggaatgctgctgtaagcctgattagaggtgcctgaggatatcaccttttacaaggaagccgtgtgtgcttgagaggatctttttaaatgcattatggctcatgcagcctcacaattaaagaaaaacagggatttagaaatcaatgctgaagaagagcctgagaaaaaaaggaaacaccgcaaacggtcccgggatcggaagaaaaagtctgatgccaatgcaagttacttaagagcagctcgagctggacaccttgaaaaggccctcgactacataaaaaatggagttgacatcaacatttgcaatcagaatgggttgaacgctctccaccttgcttccaaagaaggccatgtagaggttgtttctgagctgctgcagagagaagccaatgtggatgcagctacaaagaaaggaaacacagcattgcacatcgcatctttggctgggcaagcagaggtggtaaaagtcttggttacaaatggagccaatgtcaatgcacaatctcagaatggtttcacgccattgtatatggcagcccaggaaaatcacctggaagttgtcaagtttcttcttgacaatggtgcaagccagagcctagccacagaggatggcttcacaccattggcagtggctttgcaacaaggtcacgaccaagtcgtttcgctcctgctagagaatgacaccaaaggaaaagtgcgtctcccagctcttcatatcgcggcccgaaaagacgacacgaaagccgccgccctgctgctgcagaatgacaacaatgcagatgtggaatcaaagagtggcttcactccgctccacatagctgctcactatggaaatatcaatgtagccacgttgctgttaaaccgagcggctgctgtggatttcaccgcaaggaatgacatcactcctttacatgttgcatcaaaaagaggaaatgcaaatatggtaaaactattgctcgatcgaggagctaaaatcgatgccaaaaccagggatggtctgacaccactgcactgtggagcaaggagtggccacgagcaggtggtagaaatgttgcttgatcgagctgcccccattctttcaaaaaccaagaatggattatctccattgcacatggccacacaaggggatcatttaaactgcgtccagcttctcctccagcataatgtacccgtggatgatgtcaccaatgactacctgactgccctacacgtggctgcccactgtggccattacaaagttgccaaggttctcttggataagaaagctaaccccaatgccaaagccctgaatggctttacccctcttcatattgcctgcaagaagaatcgaattaaagtaatggaactccttctgaaacacggtgcatccatccaagctgtaaccgagtcgggccttaccccaatccatgttgctgccttcatggggcatgtaaatattgtatcacaactaatgcatcatggagcctcaccaaacaccaccaatgtgagaggagaaacagcactgcacatggcagctcgctccggccaagctgaagttgtgcggtatctggtacaagacggagctcaggtagaagctaaagctaaggatgaccaaacaccactccacatttcagcccgactggggaaagcagacatagtacaacagctgttgcagcaaggggcatctccaaatgcagccacaacttctgggtacaccccacttcacctttccgcccgagaggggcatgaggatgtggccgcgttccttttggatcatggagcgtctttatctataacaacaaagaaaggatttactcctcttcatgtggcagcaaaatatggaaagcttgaagtcgccaatctcctgctacagaaaagtgcatctccagatgctgctgggaagagcgggctaacaccactgcatgtagctgcacattacgataatcagaaagtggcccttctgcttttggaccaaggagcctcacctcacgcagccgcaaagaatggttatacgccactgcacatcgctgccaaaaagaaccagatggacatagcgacaactctgctggaatatggtgctgatgccaacgcagttacccggcaaggaattgcttccgtccatctcgcagctcaggaagggcacgtggacatggtgtcgctgctcctcggtagaaatgcgaatgatagcggcctgaccccactccatttggctgctcaagaagatcgagtgaatgtggcagaagtcctcgtaaaccaaggggctcatgtggacgcccagacaaagatgggatacacaccactgcatgtgggctgccactatggaaatatcaagattgttaatttcctgctccagcattctgcaaaagttaatgccaaaacaaagaatgggtatacgccattacatcaagcagcacagcaggggcatacgcatataataaatgtcttacttcagaacaacgcctcccccaatgaactcactgtgaatgggaatactgcccttggcattgcccggcgcctcggctacatctcagtagtggacaccctgaagatagtgaccgaagagaccatgaccacaactactgtcacagagaagcacaaaatgaatgttccagaaacgatgaatgaagttcttgatatgtctgatgatgaaggtgaagatgcaatgaccggggacacagacaaatatcttgggccacaggaccttaaggaattgggtgatgattccctgcctgcagagggttacatgggctttagtctcggagcgcgttctgccagcctccgctccttcagttcggataggtcttacaccttgaacagaagctcctatgcacgggacagcatgatgattgaagaactccttgtgccatccaaagagcagcatctaacattcacaagggaatttgattcagattctcttagacattacagctgggctgcagacaccttagacaatgtcaatcttgtttcaagccccattcattctgggtttctggttagctttatggtggacgcgagagggggctccatgagaggaagccgtcatcacgggatgagaatcatcattcctccacgcaagtgtacggcccccactcgaatcacctgccgtttggtaaagagacataaactggccaacccaccccccatggtggaaggagagggattagccagtaggctggtagaaatgggtcctgcaggggcacaatttttaggccctgtcatagtggaaatccctcactttgggtccatgagaggaaaagagagagaactcattgttcttcgaagtgaaaatggtgaaacttggaaggagcatcagtttgacagcaaaaatgaagatttaaccgagttacttaatggcatggatgaagaacttgatagcccagaagagttagggaaaaagcgtatctgcaggattatcacgaaagatttcccccagtattttgcagtggtttcccggattaagcaggaaagcaaccagattggtcctgaaggtggaattctgagcagcaccacagtgccccttgttcaagcatctttcccagagggtgccctaactaaaagaattcgagtgggcctccaggcccagcctgttccagatgaaattgtgaaaaagatccttggaaacaaagcaacttttagcccaattgtcactgtggaaccaagaagacggaaattccataaaccaatcacaatgaccattccggtgcccccgccctcaggagaaggtgtatccaatggatacaaaggggacactacacccaatctgcgtcttctctgtagcattacagggggcacttcgcctgctcagtgggaagacatcacaggaacaactcctttgacgtttataaaagattgtgtctcctttacaaccaatgtttcagccagattttggcttgcagactgccatcaagttttagaaactgtggggttagccacgcaactgtacagagaattgatatgtgttccatatatggccaagtttgttgtttttgccaaaatgaatgatcccgtagaatcttccttgcgatgtttctgcatgacagatgacaaagtggacaaaactttagagcaacaagagaattttgaggaagtcgcaagaagcaaagatattgaggttctggaaggaaaacctatttatgttgattgttatggaaatttggccccacttaccaaaggaggacagcaacttgtttttaacttttattctttcaaagaaaatagactgccattttccatcaagattagagacaccagccaagagccctgtggtcgtctgtcttttctgaaagaaccaaagacaacaaaaggactgcctcaaacagcggtttgcaacttaaatatcactctgccagcacataaaaagattgagaaaacagatagacgacagagcttcgcatccttagctttacgtaagcgctacagctacttgactgagcctggaatgagtgagtttcctaacacatttactaatctacgtggattttcataa

SEQ ID NO: 1981 - DNA, 3459 bp, Homo sapiens
  source 1..3459: mol_type = unassigned DNA
agctttaaaaggatgtctgcgaagtggtcaaaaggatcttaacctcaattaagtggggttttttaaaaagatttttttgggggcctgaaattttgaaaatcttcgaactctgagtggggaaagatgtataattcctcaattgcctacgaggatatcaagatgctgagaggaattcagcggtggtgaagagagtggatacaaaccagggattggtttccttgagctgttttggaggttgattctaaatcactgcttaaggaattcctggaaacatcaggaaaacatttgatcatccaagcctagtggaaatggctttaccgcagagtgaagatgcaatgaccggggacacagacaaatatcttgggccacaggaccttaaggaattgggtgatgattccctgcctgcagagggttacatgggctttagtctcggagcgcgttctgccagcctccgctccttcagttcggataggtcttacaccttgaacagaagctcctatgcacgggacagcatgatgattgaagaactccttgtgccatccaaagagcagcatctaacattcacaagggaatttgattcagattctcttagacattacagctgggctgcagacaccttagacaatgtcaatcttgtttcaagccccattcattctgggtttctggttagctttatggtggacgcgagagggggctccatgagaggaagccgtcatcacgggatgagaatcatcattcctccacgcaagtgtacggcccccactcgaatcacctgccgtttggtaaagagacataaactggccaacccaccccccatggtggaaggagagggattagccagtaggctggtagaaatgggtcctgcaggggcacaatttttaggccctgtcatagtggaaatccctcactttgggtccatgagaggaaaagagagagaactcattgttcttcgaagtgaaaatggtgaaacttggaaggagcatcagtttgacagcaaaaatgaagatttaaccgagttacttaatggcatggatgaagaacttgatagcccagaagagttagggaaaaagcgtatctgcaggattatcacgaaagatttcccccagtattttgcagtggtttcccggattaagcaggaaagcaaccagattggtcctgaaggtggaattctgagcagcaccacagtgccccttgttcaagcatctttcccagagggtgccctaactaaaagaattcgagtgggcctccaggcccagcctgttccagatgaaattgtgaaaaagatccttggaaacaaagcaacttttagcccaattgtcactgtggaaccaagaagacggaaattccataaaccaatcacaatgaccattccggtgcccccgccctcaggagaaggtgtatccaatggatacaaaggggacactacacccaatctgcgtcttctctgtagcattacagggggcacttcgcctgctcagtgggaagacatcacaggaacaactcctttgacgtttataaaagattgtgtctcctttacaaccaatgtttcagccagattttggcttgcagactgccatcaagttttagaaactgtggggttagccacgcaactgtacagagaattgatatgtgttccatatatggccaagtttgttgtttttgccaaaatgaatgatcccgtagaatcttccttgcgatgtttctgcatgacagatgacaaagtggacaaaactttagagcaacaagagaattttgaggaagtcgcaagaagcaaagatattgaggttctggaaggaaaacctatttatgttgattgttatggaaatttggccccacttaccaaaggaggacagcaacttgtttttaacttttattctttcaaagaaaatagactgccattttccatcaagattagagacaccagccaagagccctgtggtcgtctgtcttttctgaaagaaccaaagacaacaaaaggactgcctcaaacagcggtttgcaacttaaatatcactctgccagcacataaaaagattgagaaaacagatagacgacagagcttcgcatccttagctttacgtaagcgctacagctacttgactgagcctggaatgagtccacagagtccatgtgaacggacagatatcaggatggcaatagtagccgatcacctgggacttagttggacagaactggcaagggaactgaatttttcagtggatgaaatcaatcaaatacgtgtggaaaatccaaattctttaatttctcagagcttcatgttattaaaaaaatgggttaccagagacggaaaaaatgccacaactgatgccttaacttcggtcttgacaaaaattaatcgaatagatatagtgacactgctagaaggaccaatatttgattatggaaatatttcaggcaccagaagttttgcagatgagaacaatgttttccatgaccctgttgatggttatccttcccttcaagtggaactggaaacccccacagggttgcactacacaccacctacccctttccagcaagatgattattttagtgatatctctagcatagaatctccccttagaacccctagtagactgagtgatgggctagtgccttcccaggggaacatagagcattccgcagatggacctccagtcgtaactgcagaagacgcttccttagaagacagcaaactggaagactcagtgcctttaacagaaatgcctgaagcagtgatgtagatgagagccagttggagaatgtatgtctgagttggcagaatgagacatcaagtggaaacctagagtcctgcgctcaagctcgaagagtaactggtgggttactagatcgactggatgacagccctgaccagtgtagagattccattacctcatatctcaaaggagaagctggcaaatttgaagcaaatggaagccatacagaaatcactccagaagcaaagacaaaatcttactttccagaatcccaaaatgatgtaggaaaacagagtaccaaggaaactctgaaaccaaaaatacatggatctggtcatgttgaagaaccagcatcaccactagcagcatatcagaaatctctagaagaaaccagcaagcttataatagaagagactaaaccctgtgtgcctgtcagtatgaaaaagatgagtaggacttctccagcagatggcaagccaaggcttagcctccatgaagaagaggggtccagtgggtctgagcaaaagcagggagaaggttttaaggtgaaaacgaagaaagaaatccggcatgtggaaaagaagagccactcgtaacagcgaacggtcagtcaaggatcataagtttttactgccagtattgagaaattcgtggaagaaatgtcagcaggaagtaaaaattcaccgagaagtgtgtgtgtgttcgctgcttccacacattaatggcatgattttttttatgc

SEQ ID NO: 1982 - DNA, 2796 bp, Homo sapiens
  source 1..2796: mol_type = unassigned DNA
tttactttggctcatgttccccagagaggagaaacagcactgcacatggcagctcgctccggccaagctgaagttgtgcggtatctggtacaagacggagctcaggtagaagctaaagctaaggatgaccaaacaccactccacatttcagcccgactggggaaagcagacatagtacaacagctgttgcagcaaggggcatctccaaatgcagccacaacttctgggtacaccccacttcacctttccgcccgagaggggcatgaggatgtggccgcgttccttttggatcatggagcgtctttatctataacaacaaagaaaggatttactcctcttcatgtggcagcaaaatatggaaagcttgaagtcgccaatctcctgctacagaaaagtgcatctccagatgctgctgggaagagcgggctaacaccactgcatgtagctgcacattacgataatcagaaagtggcccttctgcttttggaccaaggagcctcacctcacgcagccgcaaagaatggttatacgccactgcacatcgctgccaaaaagaaccagatggacatagcgacaactctgctggaatatggtgctgatgccaacgcagttacccggcaaggaattgcttccgtccatctcgcagctcaggaagggcacgtggacatggtgtcgctgctcctcggtagaaatgcgaatgtgaacctgagcaataagagcggcctgaccccactccatttggctgctcaagaagatcgagtgaatgtggcagaagtcctcgtaaaccaaggggctcatgtggacgcccagacaaagatgggatacacaccactgcatgtgggctgccactatggaaatatcaagattgttaatttcctgctccagcattctgcaaaagttaatgccaaaacaaagaatgggtatacgccattacatcaagcagcacagcaggggcatacgcatataataaatgtcttacttcagaacaacgcctcccccaatgaactcactgtgaatgggaatactgcccttggcattgcccggcgcctcggctacatctcagtagtggacaccctgaagatagtgaccgaagagaccatgaccacaactactgtcacagagaagcacaaaatgaatgttccagaaacgatgaatgaagttcttgatatgtctgatgatgaaggtgaagatgcaatgaccggggacacagacaaatatcttgggccacaggaccttaaggaattgggtgatgattccctgcctgcagagggttacatgggctttagtctcggagcgcgttctgccagccgctccttcagttcggataggtcttacaccttgaacagaagctcctatgcacgggacagcatgatgattgaagaactccttgtgccatccaaagagcagcatctaacattcacaagggaatttgattcagattctcttagacattacagctgggctgcagacaccttagacaatgtcaatcttgtttcaagccccattcattctggctattcttctccacttcctcagtatgattcaaggtttctggttagctttatggtggacgcgagagggggctccatgagaggaagccgtcatcacgggatgagaatcatcattcctccacgcaagtgtacggcccccactcgaatcacctgccgtttggtaaagagacataaactggccaacccaccccccatggtggaaggagagggattagccagtaggctggtagaaatgggtcctgcaggggcacaatttttaggccctgtcatagtggaaatccctcactttgggtccatgagaggaaaagagagagaactcattgttcttcgaagtgaaaatggtgaaacttggaaggagcatcagtttgacagcaaaaatgaagatttaaccgagttacttaatggcatggatgaagaacttgatagcccagaagagttagggaaaaagcgtatctgcaggattatcacgaaagatttcccccagtattttgcagtggtttcccggattaagcaggaaagcaaccagattggtcctgaaggtggaattctgagcagcaccacagtgccccttgttcaagcatctttcccagagggtgccctaactaaaagaattcgagtgggcctccaggcccagcctgttccagatgaaattgtgaaaaagatccttggaaacaaagcaacttttagcccaattgtcactgtggaaccaagaagacggaaattccataaaccaatcacaatgaccattccggtgcccccgccctcaggagaaggtgtatccaatggatacaaaggggacactacacccaatctgcgtcttctctgtagcattacagggggcacttcgcctgctcagtgggaagacatcacaggaacaactcctttgacgtttataaaagattgtgtctcctttacaaccaatgtttcagccagattttggcttgcagactgccatcaagttttagaaactgtggggttagccacgcaactgtacagagaattgatatgtgttccatatatggccaagtttgttgtttttgccaaaatgaatgatcccgtagaatcttccttgcgatgtttctgcatgacagatgacaaagtggacaaaactttagagcaacaagagaattttgaggaagtcgcaagaagcaaagatattgaggtaccttgttcacaaaaacaagttcatttcattacgtactccagatatgaggttttattttgtggtcttaatagcactcactataaaataccaagtgcattattgattttacttttactttaa

SEQ ID NO: 1983 - DNA, 1644 bp, Homo sapiens
  source 1..1644: mol_type = unassigned DNA
agcctccccgaaagtgaagatgcaatgaccggggacacagacaaatatcttgggccacaggaccttaaggaattgggtgatgattccctgcctgcagagggttacatgggctttagtctcggagcgcgttctgccagcctccgctccttcagttcggataggtcttacaccttgaacagaagctcctatgcacgggacagcatgatgattgaagaactccttgtgccatccaaagagcagcatctaacattcacaagggaatttgattcagattctcttagacattacagctgggctgcagacaccttagacaatgtcaatcttgtttcaagccccattcattctgggtttctggttagctttatggtggacgcgagagggggctccatgagaggaagccgtcatcacgggatgagaatcatcattcctccacgcaagtgtacggcccccactcgaatcacctgccgtttggtaaagagacataaactggccaacccaccccccatggtggaaggagagggattagccagtaggctggtagaaatgggtcctgcaggggcacaatttttaggccctgtcatagtggaaatccctcactttgggtccatgagaggaaaagagagagaactcattgttcttcgaagtgaaaatggtgaaacttggaaggagcatcagtttgacagcaaaaatgaagatttaaccgagttacttaatggcatggatgaagaacttgatagcccagaagagttagggaaaaagcgtatctgcaggattatcacgaaagatttcccccagtattttgcagtggtttcccggattaagcaggaaagcaaccagattggtcctgaaggtggaattctgagcagcaccacagtgccccttgttcaagcatctttcccagagggtgccctaactaaaagaattcgagtgggcctccaggcccagcctgttccagatgaaattgtgaaaaagatccttggaaacaaagcaacttttagcccaattgtcactgtggaaccaagaagacggaaattccataaaccaatcacaatgaccattccggtgcccccgccctcaggagaaggtgtatccaatggatacaaaggggacactacacccaatctgcgtcttctctgtagcattacagggggcacttcgcctgctcagtgggaagacatcacaggaacaactcctttgacgtttataaaagattgtgtctcctttacaaccaatgtttcagccagattttggcttgcagactgccatcaagttttagaaactgtggggttagccacgcaactgtacagagaattgatatgtgttccatatatggccaagtttgttgtttttgccaaaatgaatgatcccgtagaatcttccttgcgatgtttctgcatgacagatgacaaagtggacaaaactttagagcaacaagagaattttgaggaagtcgcaagaagcaaagatattgaggttctggaaggaaaacctatttatgttgattgttatggaaatttggccccacttaccaaaggaggacagcaacttgtttttaacttttattctttcaaagaaaatagactgccattttccatcaagattagagacaccagccagaatatagttcaattaagttgtctccta

SEQ ID NO: 1984 - DNA, 1965 bp, Homo sapiens
  source 1..1965: mol_type = unassigned DNA
cggggcggggctgagcgtgtttacatccgccgggtgcgcggcttcgccgcccgaggtcgttcggctcgggtaccatcctccgcgccatggacaccagcgacctgttcgccagctgcaggaagggggatgtgggccgagtgcggtacctgctggagcagcgagacgtggaggtgaatgtgcgggacaagtgggacagcacccccttgtactatgcctgcttgtgtgggcacgaggagctggtactctaccttctggccaatggagcccgctgcgaggccaacaccttcgatggtgagcgctgcctctatggggcactgagtgaccccatccgccgggctctacgcgattacaagcaggtcacggcttcctgcaggaggcgggattactatgacgacttcttgcagcggcttctagagcagggcatccacagtgacgtggtctttgtagtacacgggaagccattccgggtgcatcgctgcgtcctgggtgcacgtagtgcctactttgccaacatgctggacaccaaatggaagggcaagagtgtcgtggttctcaggcacccactgatcaaccccgtggcctttggggccctgctgcagtacctgtacacaggccgcctggacattggcgtagagcatgtgagtgactgtgagcgcctggccaagcaatgccagctgtgggacctgctcagcgacctggaggccaagtgcgagaaggtgtctgagtttgtggcgtctaagccaggcacgtgtgtgaaggtgctgaccatcgagcccccacctgcagacccccgcctccgggaggacatggcgctgctggccgattgtgccctgccccccgagctccgaggtgatctttgggagctgcccttcccttgtcctgacggcttcaacagctgccctgacatctgcttccgagtggctggctgcagcttcctctgccacaaggcctttttctgtggccgcagtgactacttccgagccctgctggatgaccacttccgagagagcgaggagccagcgacctcagggggccccccagccgtcaccctgcatggcatctcacccgacgtcttcactcacgtgctctactacatgtacagcgaccacactgagctgtcccccgaggcagcctatgatgtgctgagcgtcgccgacatgtacctgctgccaggcctgaagaggctgtgcggccgcagcctggctcagatgctagacgaggacactgtggtgggtgtgtggcgcgtggccaagctcttccgcctggcgcggcttgaggaccagtgcactgagtacatggccaaggtcattgagaagctggtggagcgggaggacttcgtggaggcggtgaaggaggaggcagcggctgtggcagcccggcaggagacggactctatcccgctggtggacgacatccgcttccacgtggccagcacggtgcagacctacagcgccatagaggaggcgcagcagcgtctgcgggcactcgaggacctgctcgtgtccatcggtctggactgttgagcccctggctgggcagccccaggggccaggagctctcttggagacaagcatgtgtatgcgtttgtgtgcagctcttcttcctgctccctgcacattgagggcttcatggggggtgcgaggggctcagtggggcttctcttccctccatgagcctggagaccccaggggaggatccatttgggatgagccccctccccccaatgcacaagccagcccccaagaccctgggggtggacaccactcagggaaacctggggtgggggtgggctttggtcttagcactttccttctccagatcccccctacccaccccagtcccaaatccagtcctctggcccttgcctagccctgaattgcttctctaagctggtgttcccatgcacagggccattcaggaagggctgggggagtgtgtgtggcaataaagcttgaaggcaccgtg

SEQ ID NO: 1985 - DNA, 1306 bp, Homo sapiens
  source 1..1306: mol_type = unassigned DNA
ggcggggcggggctgagcgtgtttacatccgccgggtgcgcggcttcgccgcccgaggtcgttcggctcgggtaccatcctccgcgccatggacaccagcgacctgttcgccagctgcaggaagggggatgtgggccgagtgcggtacctgctggagcaggtactctaccttctggccaatggagcccgctgcgaggccaacaccttcgatggtgagcgctgcctctatggggcactgagtgaccccatccgccgggctctacgcgattacaagcacccactgctgtgggacctgctcagcgacctggaggccaagtgcgagaaggtgtctgagtttgtggcgtctaagccaggcacgtgtgtgaaggtgctgaccatcgagcccccacctgcagacccccgcctccgggaggacatggcgctgctggccgattgtgccctgccccccgagctccgagcctttttctgtggccgcagtgactacttccgagccctgctggatgaccacttccgagagagcgaggagccagcgacctcagggggccccccagccgtcaccctgcatggcatctcacccgacgtcttcactcacgtgctctactacatgtacagcgaccacactgagctgtcccccgaggcagcctatgatgtgctgagcgtcgccgacatgtacctgctgccaggcctgaagaggctgtgcggccgcagcctggctcagatgctagacgaggacactgtggtgggtgtgtggcgcgtggccaagctcttccgcctggcgcggcttgaggaccagtgcactgagtacatggccaaggtcattgagaagctggtggagcgggaggacttcgtggaggcggtgaaggaggaggcagcggctgtggcagcccggcaggagacggactctatcccgctggtggacgacatccgcttccacgtggccagcacggtgcagacctacagcgccatagaggaggcgcagcagcgtctgcgggcactcgaggacacaagcatgtgtatgcgtttgtgtgcagctcttcttcctgctccctgcacattgagggcttcatggggggtgcgaggggctcagtggggcttctcttccctccatgagcctggagaccccaggggaggatccatttgggatgagccccctccccccaatgcacaagccagcccccaagaccctgggggtggacaccactcagggaaacctggggtgggggtgggctttggtcttagcactttccttctccagatcccccctacccaccccagtcccaaatccagtcctctggcccttgcctag

SEQ ID NO: 1986 - DNA, 1975 bp, Homo sapiens
  source 1..1975: mol_type = unassigned DNA
ggcggggcggggctgagcgtgtttacatccgccgggtgcgcggcttcgccgcccgaggtcgttcggctcgggtaccatcctccgcgccatggacaccagcgacctgttcgccagctgcaggaagggggatgtgggccgagtgcggtacctgctggagcagcgagacgtggaggtgaatgtgcgggacaagtgggacagcacccccttgtactatgcctgcttgtgtgggcacgaggagctggtactctaccttctggccaatggagcccgctgcgaggccaacaccttcgatggtgagcgctgcctctatggggcactgagtgaccccatccgccgggctctacgcgattacaagcaggtcacggcttcctgcaggaggcgggattactatgacgacttcttgcagcggcttctagagcagggcatccacagtgacgtggtctttgtagtacacgggaagccattccgggtgcatcgctgcgtcctgggtgcacgtagtgcctactttgccaacatgctggacaccaaatggaagggcaagagtgtcgtggttctcaggcacccactgatcaaccccgtggcctttggggccctgctgcagtacctgtacacaggccgcctggacattggcgtagagcatgtgagtgactgtgagcgcctggccaagcaatgccagctgtgggacctgctcagcgacctggaggccaagtgcgagaaggtgtctgagtttgtggcgtctaagccaggcacgtgtgtgaaggtgctgaccatcgagcccccacctgcagacccccgcctccgggaggacatggcgctgctggccgattgtgccctgccccccgagctccgaggtgatctttgggagctgcccttcccttgtcctgacggcttcaacagctgccctgacatctgcttccgagtggctggctgcagcttcctctgccacaaggcctttttctgtggccgcagtgactacttccgagccctgctggatgaccacttccgagagagcgaggagccagcgacctcagggggccccccagccgtcaccctgcatggcatctcacccgacgtcttcactcacgtgctctactacatgtacagcgaccacactgagctgtcccccgaggcagcctatgatgtgctgagcgtcgccgacatgtacctgctgccaggcctgaagaggctgtgcggccgcagcctggctcagatgctagacgaggacactgtggtgggtgtgtggcgcgtggccaagctcttccgcctggcgcggcttgaggaccagtgcactgagtacatggccaaggtcattgagaagctggtggagcgggaggacttcgtggaggcggtgaaggaggaggcagcggctgtggcagcccggcaggagacggactctatcccgctggtggacgacatccgcttccacgtggccagcacggtgcagacctacagcgccatagaggaggcgcagcagcgtctgcgggcactcgaggacctgctcgtgtccatcggtctggactgttgagcccctggctgggcagccccaggggccaggagctctcttggagacaagcatgtgtatgcgtttgtgtgcagctcttcttcctgctccctgcacattgagggcttcatggggggtgcgaggggctcagtggggcttctcttccctccatgagcctggagaccccaggggaggatccatttgggatgagccccctccccccaatgcacaagccagcccccaagaccctgggggtggacaccactcagggaaacctggggtgggggtgggctttggtcttagcactttccttctccagatcccccctacccaccccagtcccaaatccagtcctctggcccttgcctagccctgaattgcttctctaagctggtgttcccatgcacagggccattcaggaagggctgggggagtgtgtgtggcaataaagcttgaaggcaccgtgggagcatg

SEQ ID NO: 1987 - DNA, 1961 bp, Homo sapiens
  source 1..1961: mol_type = unassigned DNA
gtttacatccgccgggtgcgcggcttcgccgcccgaggtcgttcggctcgggtaccatcctccgcgccatggacaccagcgacctgttcgccagctgcaggaagggggatgtgggccgagtgcgaccatgaacccgtcctgacccaggctctgacctccttcctgcccaggtacctgctggagcagcgagacgtggaggtactatgcctgcttgtgtgggcacgaggagctggtactctaccttctggccaatggagcccgctgcgaggccaacaccttcgatggtgagcgctgcctctatggggcactgagtgaccccatccgccgggctctacgcgattacaagcaggtcacggcttcctgcaggaggcgggattactatgacgacttcttgcagcggcttctagagcagggcatccacagtgacgtggtctttgtagtacacgggaagccattccgggtgcatcgctgcgtcctgggtgcacgtagtgcctactttgccaacatgctggacaccaaatggaagggcaagagtgtcgtggttctcaggcacccactgatcaaccccgtggcctttggggccctgctgcagtacctgtacacaggccgcctggacattggcgtagagcatgtgagtgactgtgagcgcctggccaagcaatgccagctgtgggacctgctcagcgacctggaggccaagtgcgagaaggtgtctgagtttgtggcgtctaagccaggcacgtgtgtgaaggtgctgaccatcgagcccccacctgcagacccccgcctccgggaggacatggcgctgctggccgattgtgccctgccccccgagctccgaggtgatctttgggagctgcccttcccttgtcctgacggcttcaacagctgccctgacatctgcttccgagtggctggctgcagcttcctctgccacaaggcctttttctgtggccgcagtgactacttccgagccctgctggatgaccacttccgagagagcgaggagccagcgacctcagggggccccccagccgtcaccctgcatggcatctcacccgacgtcttcactcacgtgctctactacatgtacagcgaccacactgagctgtcccccgaggcagcctatgatgtgctgagcgtcgccgacatgtacctgctgccaggcctgaagaggctgtgcggccgcagcctggctcagatgctagacgaggacactgtggtgggtgtgtggcgcgtggccaagctcttccgcctggcgcggcttgaggaccagtgcactgagtacatggccaaggtcattgagaagctggtggagcgggaggacttcgtggaggcggtgaaggaggaggcagcggctgtggcagcccggcaggagacggactctatcccgctggtggacgacatccgcttccacgtggccagcacggtgcagacctacagcgccatagaggaggcgcagcagcgtctgcgggcactcgaggacctgctcgtgtccatcggtctggactgttgagcccctggctgggcagccccaggggccaggagctctcttggagacaagcatgtgtatgcgtttgtgtgcagctcttcttcctgctccctgcacattgagggcttcatggggggtgcgaggggctcagtggggcttctcttccctccatgagcctggagaccccaggggaggatccatttgggatgagccccctccccccaatgcacaagccagcccccaagaccctgggggtggacaccactcagggaaacctggggtgggggtgggctttggtcttagcactttccttctccagatcccccctacccaccccagtcccaaatccagtcctctggcccttgcctagccctgaattgcttctctaagctggtgttcccatgcacagggccattcaggaagggctgggggagtgtgtgtggcaataaagcttgaaggcaccgtggga

SEQ ID NO: 1988 - DNA, 2065 bp, Homo sapiens
  source 1..2065: mol_type = unassigned DNA
aaaggtccagcctcggcactggctctggcttctgtccctgtagcccatcgtcccccagcactgatagcacacagtgtctgcctgttcgaccccacctccacatccttgcctgcactttgccttgagtgcctctcctgctctggtctgcctgtcacctgccctcacctgggggaggcttccccataccaaaagggatgttttctctccgttcctttccacgggccttctttctcagaccatgaacccgtcctgacccaggctctgacctccttcctgcccaggtacctgctggagcagcgagacgtggaggtactatgcctgcttgtgtgggcacgaggagctggtactctaccttctggccaatggagcccgctgcgaggccaacaccttcgatggtgagcgctgcctctatggggcactgagtgaccccatccgccgggctctacgcgattacaagcaggtcacggcttcctgcaggaggcgggattactatgacgacttcttgcagcggcttctagagcagggcatccacagtgacgtggtctttgtagtacacgggaagccattccgggtgcatcgctgcgtcctgggtgcacgtagtgcctactttgccaacatgctggacaccaaatggaagggcaagagtgtcgtggttctcaggcacccactgatcaaccccgtggcctttggggccctgctgcagtacctgtacacaggccgcctggacattggcgtagagcatgtgagtgactgtgagcgcctggccaagcaatgccagctgtgggacctgctcagcgacctggaggccaagtgcgagaaggtgtctgagtttgtggcgtctaagccaggcacgtgtgtgaaggtgctgaccatcgagcccccacctgcagacccccgcctccgggaggacatggcgctgctggccgattgtgccctgccccccgagctccgaggtgatctttgggagctgcccttcccttgtcctgacggcttcaacagctgccctgacatctgcttccgagtggctggctgcagcttcctctgccacaaggcctttttctgtggccgcagtgactacttccgagccctgctggatgaccacttccgagagagcgaggagccagcgacctcagggggccccccagccgtcaccctgcatggcatctcacccgacgtcttcactcacgtgctctactacatgtacagcgaccacactgagctgtcccccgaggcagcctatgatgtgctgagcgtcgccgacatgtacctgctgccaggcctgaagaggctgtgcggccgcagcctggctcagatgctagacgaggacactgtggtgggtgtgtggcgcgtggccaagctcttccgcctggcgcggcttgaggaccagtgcactgagtacatggccaaggtcattgagaagctggtggagcgggaggacttcgtggaggcggtgaaggaggaggcagcggctgtggcagcccggcaggagacggactctatcccgctggtggacgacatccgcttccacgtggccagcacggtgcagacctacagcgccatagaggaggcgcagcagcgtctgcgggcactcgaggacctgctcgtgtccatcggtctggactgttgagcccctggctgggcagccccaggggccaggagctctcttggagacaagcatgtgtatgcgtttgtgtgcagctcttcttcctgctccctgcacattgagggcttcatggggggtgcgaggggctcagtggggcttctcttccctccatgagcctggagaccccaggggaggatccatttgggatgagccccctccccccaatgcacaagccagcccccaagaccctgggggtggacaccactcagggaaacctggggtgggggtgggctttggtcttagcactttccttctccagatcccccctacccaccccagtcccaaatccagtcctctggcccttgcctagccctgaattgcttctctaagctggtgttcccatgcacagggccattcaggaagggctgggggagtgtgtgtggcaataaagcttgaaggcac

SEQ ID NO: 1989 - DNA, 7569 bp, Homo sapiens
  source 1..7569: mol_type = unassigned DNA
agtggcgctgctgggacgggggaaaggagacgcttcttcctcttgctgctcttctcgttcccgagatcagcggcggcggtgaccgcgagtgggtcggcaccgtctccggctccgggtgcgaacaatgctgactgatagcggaggcggcggcacctcctttgaggaggacctggactctgtggctccgcgatccgccccagctggggcctcggagccgcctccgccgggaggggtcggtctggggatccgcaccgtgaggctctttggggaggccgggccagcgtcgggagtcggcagcagcggcggcggcggcagcggcagcggtacgggcggaggggacgcggcgctggatttcaagttggcggctgccgtgctgaggaccgggggtggaggtggtgcctctggcagtgacgaggacgaagtgtccgaggttgaatcatttattttggaccaagaagatctggataacccagtgcttaaaacaacatcagagatattcttatcaagtactgcagaaggagcagacttacgcactgtggatccagagacacaggcacgactagaagcattgctagaagcagcaggaattggcaaattgtcaactgctgatggtaaagcttttgcagatcctgaggtactccggagactgacatcctcagttagttgtgcactggatgaagctgctgctgcactgacacggatgaaagcagaaaacagccacaatgcaggacaagtggacactcgcagtctagcagaagcttgttcagatggggatgttaatgctgttcgtaaattgctagatgaaggcagaagtgtaaatgaacatacagaagaaggagaaagcctgctgtgtttggcttgttcagcagggtattatgaattagcacaagtattgcttgctatgcatgctaatgttgaagatcgagggaataaaggagacataactcccctgatggcagcttccagtggaggttacttagatattgtgaaattattacttcttcatgatgctgatgtcaactcccagtctgcaacaggaaacactgcgctaacttatgcatgtgctggaggatttgttgacattgttaaagtgctccttaatgaaggtgcaaatatagaagatcataatgaaaatggacatactcccttaatggaagcagccagtgcaggtcatgtggaagttgcaagagttcttttagatcatggtgcaggcatcaacactcattctaatgaattcaaagaaagtgctctaacacttgcttgctacaaaggccatttggatatggttcgctttctacttgaagctggtgcagatcaagagcacaaaacagatgagatgcacactgccttaatggaggcctgcatggatggacatgtagaggtggcacgtttgcttttggatagtggtgctcaagtgaacatgcctgcagattcatttgaatctccattgacgctagctgcctgtggaggacatgttgaattggcagctctacttattgaaaggggagcaaatcttgaagaagttaatgatgaaggatacactcccttgatggaagctgcccgggaaggacatgaagaaatggtggcactactcttagcacaaggagcaaatataaatgcccagacagaagaaactcaagaaactgctcttactttggcttgctgtggaggattttctgaagttgcagactttcttattaaggcaggggctgatatagaacttggctgctccacacctctgatggaggcatctcaggagggacacctggaattggttaaatatttgctggcttctggcgctaatgtgcatgctacaacagcaacaggagacacagccttaacctatgcttgtgaaaatggacatacggatgttgcagatgttttacttcaagcaggggctgatttagacaagcaggaggacatgaagactattttggagggcatagatccggccaagcatcaggaacatgaatctgaaggtggaagaacacctttgatgaaagctgcaagagctggtcatttgtgcactgtgcagtttcttattagcaaaggtgccaatgttaacagggctacagccaataatgatcatacagtagtgtcgctggcatgtgcaggaggccacctggcagttgttgagcttctcttggctcatggggctgaccctactcatcgactcaaggatggttcaacaatgctcattgaagctgcaaagggtggccatactaatgtagtttcttatctgttggattatccaaataatgttctgtcagttcccaccacagatgtgtctcagctccctccaccttctcaagatcagtctcaggaacctgacagaacttcacaggagaactctcctgcccttttaggagtgcaaaaagctgtgagtaccagagtgcccactggttccaacagttcttctcagaccacagagtgtcttacacctgaatcctgttcgcagactacaagcaatgtggcttcccaatcgatgcctcctgtgtatccttcagttgacattgatgcacatactgagagcaatcatgacacagcattaacactagcttgtgcaggtggtcatgaagaacttgtatctgtgctcattgcacgggatgccaaaattgaacacagagacaaaaaaggtttcacaccactaatcctggcagcaacagcagggcatgttggagttgttgaaatccttttggataaaggtggagatatagaagcacagtctgaacgaactaaggatactccgctttcattggcatgttctggtggacgtcaggaggtggtagacttgctgctggctcgaggtgcaaataaagaacataggaacgtatctgattatacaccactgagtctagctgcgtctggaggatatgttaatatcattaagattctgcttaatgctggggcagaaattaattcaaggactgggagtaaactaggtatttctcccctgatgttggctgcaatgaatggacatgttcctgcagtaaaattgctgctcgatatgggttcagacattaatgcccaaatagagaccaatcggaacacggctctcaccctggcctgtttccagggccgagcagaagtagtgagtttgcttctggaccgaaaagccaatgttgaacatagggcaaagacgggtcttacccccttgatggaagcagcttctggagggtatgcagaggttggaagagttcttcttgataaaggagcagatgttaatgctccccctgtgccttcctcaagagatactgctttaacaatagcagcagacaaaggtcactacaaattttgtgaactcctgattcataggggagcccacattgatgttcgtaacaaaaagggaaatacgccactttggctggcatccaatggaggtcattttgatgttgtgcagttgctagtgcaagcaggtgctgatgtggatgcagcagataaccggaaaatcacacctcttatgtcagcatttcgcaagggtcatgtaaaagttgttcaatatttggtaaaggaagtaaatcagttcccttctgatatagaatgcatgagatacatagcaacaattacagataaggaactgttgaaaaaatgtcatcaatgtgtcgaaaccattgtgaaggctaaagaccagcaagctgcagaagcaaataagaatgcgagtattcttttaaaggaacttgatctggaaaagtcaagagaagagagcagaaagcaggctcttgctgctaaaagagaaaaaagaaaagaaaagagaaaaaagaaaaaagaggaacagaaaaggaaacaggaagaagatgaagaaaacaaacctaaggagaattcggaactaccagaggatgaagatgaagaggagaatgatgaagatgtggagcaagaagttcccatagaacctcctagtgcaaccaccaccactacgattggaatctctgcaacatctgcaacattcacaaatgtgtttgggaaaaaaagggccaatgtggtgacaactcccagcaccaatcggaaaaataagaagaacaaaacaaaagaaacccctcctacagcacatttaattttaccagaacaacatatgtctttagcccaacaaaaggcagataaaaataaaataaatggagaacctagaggtggtggtgcaggtgggaatagtgattcagataacttggacagcacagactgcaacagtgagagtagcagtggtggtaaaagccaagagttaaattttgtgatggatgtgaattcctctaaatacccctcactgctccttcattcccaagaagaaaagacaagtactgctacttccaaaactcagacacgacttgaaggtgaagtgactcctaattccttgtcaaccagctacaagacagtgtcattgccattaagctctccaaacataaagctgaatctcactagccctaaaaggggtcagaaaagagaagaagggtggaaagaagttgtacgaaggtcaaagaaattgtctgttccagcctcagtggtgtcgaggataatgggaagaggaggatgcaacatcactgcaatacaggatgttactggtgcccatattgatgtggataaacaaaaagataagaatggcgagagaatgatcacaataaggggtggcacagaatcaacaagatatgcagttcaactaatcaatgcactcattcaagatcctgctaaggaactggaagacttgattcctaaaaatcatatcagaacacctgccagcaccaaatcaattcatgctaacttctcatctggagtaggtaccacagcagcttccagtaaaaatgcatttcctttgggtgctccaactcttgtaacttcacaggcaacaacgttatctacgttccagcccgctaataaacttaataagaatgttccaacaaatgtacgttcttctttcccagtttctctacccttagcttatcctcaccctcattttgccctgctggctgctcaaactatgcaacagattcggcatcctcgcttacccatggcccagtttggaggaaccttctcaccttctcctaacacatggggaccattcccagtgagacctgtgaatcctggcaacacaaatagctctccaaagcataataacacaagccgtctacctaaccagaacgggactgttttaccctcagagtctgctggactagctactgccagttgtcctatcactgtctcttctgtagttgctgccagtcagcaactgtgtgtcactaatacccggactccttcatcagtcagaaagcagttgtttgcctgtgtgcctaagacaagtcctccagcaacagtgatttcttctgtgacaagcacttgtagttccctgccttctgtctcctctgcacctatcactagcgggcaagctcccaccacatttctacctgcaagtacttctcaagcacagctttcttcacaaaagatggagtctttctctgctgtgccacccaccaaagagaaagtgtccacacaggaccagcccatggcaaacctatgtaccccatcttcaactgcaaacagttgcagtagctctgccagcaacaccccgggagctccagaaactcacccatccagtagtcccactcctacttccagtaacacacaagaggaggcacagccatccagtgtgtctgatttaagtcctatgtcaatgccttttgcatctaactcagaacctgctccattgactttgacatcacccagaatggttgctgctgataatcaggacaccagtaatttacctcagttagctgtaccagcacctcgagtttctcatcgaatgcagcccagaggttctttttactccatggtaccaaatgcaactattcaccaggatccccagtctatttttgttacgaatccagttactttaacaccacctcaaggcccaccagctgcagtgcagctttcttcagctgtgaacattatgaatggttctcagatgcacataaacccagcaaataagtctttgccacctacatttggcccagccacacttttcaatcacttcagcagtctttttgatagtagtcaggtgccagctaaccagggctggggagatggtccactgtcctcacgagttgctacagatgcctctttcactgttcagtcagcgttcctgggtaactcagtgcttggacacttggaaaacatgcaccctgataactcaaaggcacctggcttcagaccaccttcccagcgagtttctactagtccagttgggttaccatccattgacccatcaggcagctccccatcttcctcttctgctcctctggcaagtttttccggcataccaggaacaagggttttcctgcaagggccagctcctgttgggactcctagtttcaacagacaacatttttctccccatccttggacaagcgcctcaaactcatccacttctgccccaccaacgttgggccaaccaaaaggagtcagtgccagtcaagatcgaaagatacctcccccaattggaacagagagactggcccgaattcggcaaggagggtctgttgcacaagccccggcggggaccagttttgtcgctcccgttggacacagtggaatctggtcatttggtgtcaatgctgtgtcagaaggcttatcaggttggtcgcaatctgtgatggggaaccatccaatgcatcaacaattatcagacccaagcacattctcccaacatcagccaatggagagagatgattctggaatggtagccccctctaacatttttcatcagcctatggcaagtggttttgtggatttttctaaaggtctgccaatttccatgtatggaggcaccataataccctctcatcctcagcttgctgatgttccaggaggccctctgtttaatggacttcacaatccagatcctgcttggaaccctatgataaaagttatccaaaattcaactgaatgcactgatgcccagcaggccagtctgcttccttcagtccctgctctcaaaggggaaatcccatcacctcagctaaccagaccgaagaagagaattggacggccgatggtggcctctcctaaccagaggcaccaggatcatctacgaccgaaagttcctgctggagtgcaagaactcacccattgcccggacacccccctgctgcctccctcagattcccggggtcacaactcctccaacagcccctctctccaagctggaggagctgaaggagcaggagacagaggaagagatacccgatgacgcacaatttgaaatggacatctaatccagtgcagatgacctggcatgtggagttacagagggatccctcatgccactgctgccaccacctcttcctggggcatccaaaggccagctggcctcatctaatctggaagggagtgacttgttagttccaggcctcctttagttctgaggcagctagaccagggataggagtgggcaacttgccaagcccttaactctacttcctcttcagtctgtggtactcctcctaaccctaaaccctctatgctcaggggctggaactggggaatggagtaagtcaccttctgactgcttagtaaacattcaaagaaatg

SEQ ID NO: 1990 - DNA, 8370 bp, Homo sapiens
  source 1..8370: mol_type = unassigned DNA
agtggcgctgctgggacgggggaaaggagacgcttcttcctcttgctgctcttctcgttcccgagatcagcggcggcggtgaccgcgagtgggtcggcaccgtctccggctccgggtgcgaacaatgctgactgatagcggaggcggcggcacctcctttgaggaggacctggactctgtggctccgcgatccgccccagctggggcctcggagccgcctccgccgggaggggtcggtctggggatccgcaccgtgaggctctttggggaggccgggccagcgtcgggagtcggcagcagcggcggcggcggcagcggcagcggtacgggcggaggggacgcggcgctggatttcaagttggcggctgccgtgctgaggaccgggggtggaggtggtgcctctggcagtgacgaggacgaagtgtccgaggttgaatcatttattttggaccaagaagatctggataacccagtgcttaaaacaacatcagagatattcttatcaagtactgcagaaggagcagacttacgcactgtggatccagagacacaggcacgactagaagcattgctagaagcagcaggaattggcaaattgtcaactgctgatggtaaagcttttgcagatcctgaggtactccggagactgacatcctcagttagttgtgcactggatgaagctgctgctgcactgacacggatgaaagcagaaaacagccacaatgcaggacaagtggacactcgcagtctagcagaagcttgttcagatggggatgttaatgctgttcgtaaattgctagatgaaggcagaagtgtaaatgaacatacagaagaaggagaaagcctgctgtgtttggcttgttcagcagggtattatgaattagcacaagtattgcttgctatgcatgctaatgttgaagatcgagggaataaaggagacataactcccctgatggcagcttccagtggaggttacttagatattgtgaaattattacttcttcatgatgctgatgtcaactcccagtctgcaacaggaaacactgcgctaacttatgcatgtgctggaggatttgttgacattgttaaagtgctccttaatgaaggtgcaaatatagaagatcataatgaaaatggacatactcccttaatggaagcagccagtgcaggtcatgtggaagttgcaagagttcttttagatcatggtgcaggcatcaacactcattctaatgaattcaaagaaagtgctctaacacttgcttgctacaaaggccatttggatatggttcgctttctacttgaagctggtgcagatcaagagcacaaaacagatgagatgcacactgccttaatggaggcctgcatggatggacatgtagaggtggcacgtttgcttttggatagtggtgctcaagtgaacatgcctgcagattcatttgaatctccattgacgctagctgcctgtggaggacatgttgaattggcagctctacttattgaaaggggagcaaatcttgaagaagttaatgatgaaggatacactcccttgatggaagctgcccgggaaggacatgaagaaatggtggcactactcttagcacaaggagcaaatataaatgcccagacagaagaaactcaagaaactgctcttactttggcttgctgtggaggattttctgaagttgcagactttcttattaaggcaggggctgatatagaacttggctgctccacacctctgatggaggcatctcaggagggacacctggaattggttaaatatttgctggcttctggcgctaatgtgcatgctacaacagcaacaggagacacagccttaacctatgcttgtgaaaatggacatacggatgttgcagatgttttacttcaagcaggggctgatttagaacatgaatctgaaggtggaagaacacctttgatgaaagctgcaagagctggtcatttgtgcactgtgcagtttcttattagcaaaggtgccaatgttaacagggctacagccaataatgatcatacagtagtgtcgctggcatgtgcaggaggccacctggcagttgttgagcttctcttggctcatggggctgaccctactcatcgactcaaggatggttcaacaatgctcattgaagctgcaaagggtggccatactaatgtagtttcttatctgttggattatccaaataatgttctgtcagttcccaccacagatgtgtctcagctccctccaccttctcaagatcagtctcaggtgccacgtgtgccaacgcatacacttgccatggttgtacctccccaggaacctgacagaacttcacaggagaactctcctgcccttttaggagtgcaaaaaggtacatccaagcagaagtccagttccctccaggtagcagatcaggacctactgccatcttttcacccataccagcctttggagtgcatagtagaggagactgaaggcaagctgaatgaactgggacaaagaattagtgctattgaaaaagcacagcttaagtcactggagttaattcaaggtgaacctctgaacaaagataagatagaagaacttaaaaagaacagagaagagcaagtccagaagaagaagaaaatattgaaagaactgcagaaagtggaaaggcagttgcagatgaaaacacagcagcaatttaccaaagaatacttggaaaccaaaggtcagaaagacacagtgtctctacaccaacagtgctctcatagaggagtcttcccagaaggggaaggagatggtagtctcccagaggatcacttttcagagttacctcaggttgacacaatcttatttaaagataatgatgttgatgatgagcaacagtctccaccatcggcagaacagattgattttgtcccagtccagcctttatcatctccacagtgtaacttttccagtgacttaggttctaatgggacaaattctcttgaacttcagaaagtatcaggtaatcagcagattgtaggacagcctcagattgctattactggacatgatcaggggctgttagttcaagaaccagatggactaatggttgcaactccagctcagacgcttaccgacactcttgatgacctgatagcagctgtgagtaccagagtgcccactggttccaacagttcttctcagaccacagagtgtcttacacctgaatcctgttcgcagactacaagcaatgtggcttcccaatcgatgcctcctgtgtatccttcagttgacattgatgcacatactgagagcaatcatgacacagcattaacactagcttgtgcaggtggtcatgaagaacttgtatctgtgctcattgcacgggatgccaaaattgaacacagagacaaaaaaggtttcacaccactaatcctggcagcaacagcagggcatgttggagttgttgaaatccttttggataaaggtggagatatagaagcacagtctgaacgaactaaggatactccgctttcattggcatgttctggtggacgtcaggaggtggtagacttgctgctggctcgaggtgcaaataaagaacataggaacgtatctgattatacaccactgagtctagctgcgtctggaggatatgttaatatcattaagattctgcttaatgctggggcagaaattaattcaaggactgggagtaaactaggtatttctcccctgatgttggctgcaatgaatggacatgttcctgcagtaaaattgctgctcgatatgggttcagacattaatgcccaaatagagaccaatcggaacacggctctcaccctggcctgtttccagggccgagcagaagtagtgagtttgcttctggaccgaaaagccaatgttgaacatagggcaaagacgggtcttacccccttgatggaagcagcttctggagggtatgcagaggttggaagagttcttcttgataaaggagcagatgttaatgctccccctgtgccttcctcaagagatactgctttaacaatagcagcagacaaaggtcactacaaattttgtgaactcctgattcataggggagcccacattgatgttcgtaacaaaaagggaaatacgccactttggctggcatccaatggaggtcattttgatgttgtgcagttgctagtgcaagcaggtgctgatgtggatgcagcagataaccggaaaatcacacctcttatgtcagcatttcgcaagggtcatgtaaaagttgttcaatatttggtaaaggaagtaaatcagttcccttctgatatagaatgcatgagatacatagcaacaattacagataaggaactgttgaaaaaatgtcatcaatgtgtcgaaaccattgtgaaggctaaagaccagcaagctgcagaagcaaataagaatgcgagtattcttttaaaggaacttgatctggaaaagtcaagagaagagagcagaaagcaggctcttgctgctaaaagagaaaaaagaaaagaaaagagaaaaaagaaaaaagaggaacagaaaaggaaacaggaagaagatgaagaaaacaaacctaaggagaattcggaactaccagaggatgaagatgaagaggagaatgatgaagatgtggagcaagaagttcccatagaacctcctagtgcaaccaccaccactacgattggaatctctgcaacatctgcaacattcacaaatgtgtttgggaaaaaaagggccaatgtggtgacaactcccagcaccaatcggaaaaataagaagaacaaaacaaaagaaacccctcctacagcacatttaattttaccagaacaacatatgtctttagcccaacaaaaggcagataaaaataaaataaatggagaacctagaggtggtggtgcaggtgggaatagtgattcagataacttggacagcacagactgcaacagtgagagtagcagtggtggtaaaagccaagagttaaattttgtgatggatgtgaattcctctaaatacccctcactgctccttcattcccaagaagaaaagacaagtactgctacttccaaaactcagacacgacttgaaggtgaagtgactcctaattccttgtcaaccagctacaagacagtgtcattgccattaagctctccaaacataaagctgaatctcactagccctaaaaggggtcagaaaagagaagaagggtggaaagaagttgtacgaaggtcaaagaaattgtctgttccagcctcagtggtgtcgaggataatgggaagaggaggatgcaacatcactgcaatacaggatgttactggtgcccatattgatgtggataaacaaaaagataagaatggcgagagaatgatcacaataaggggtggcacagaatcaacaagatatgcagttcaactaatcaatgcactcattcaagatcctgctaaggaactggaagacttgattcctaaaaatcatatcagaacacctgccagcaccaaatcaattcatgctaacttctcatctggagtaggtaccacagcagcttccagtaaaaatgcatttcctttgggtgctccaactcttgtaacttcacaggcaacaacgttatctacgttccagcccgctaataaacttaataagaatgttccaacaaatgtacgttcttctttcccagtttctctacccttagcttatcctcaccctcattttgccctgctggctgctcaaactatgcaacagattcggcatcctcgcttacccatggcccagtttggaggaaccttctcaccttctcctaacacatggggaccattcccagtgagacctgtgaatcctggcaacacaaatagctctccaaagcataataacacaagccgtctacctaaccagaacgggactgttttaccctcagagtctgctggactagctactgccagttgtcctatcactgtctcttctgtagttgctgccagtcagcaactgtgtgtcactaatacccggactccttcatcagtcagaaagcagttgtttgcctgtgtgcctaagacaagtcctccagcaacagtgatttcttctgtgacaagcacttgtagttccctgccttctgtctcctctgcacctatcactagcgggcaagctcccaccacatttctacctgcaagtacttctcaagcacagctttcttcacaaaagatggagtctttctctgctgtgccacccaccaaagagaaagtgtccacacaggaccagcccatggcaaacctatgtaccccatcttcaactgcaaacagttgcagtagctctgccagcaacaccccgggagctccagaaactcacccatccagtagtcccactcctacttccagtaacacacaagaggaggcacagccatccagtgtgtctgatttaagtcctatgtcaatgccttttgcatctaactcagaacctgctccattgactttgacatcacccagaatggttgctgctgataatcaggacaccagtaatttacctcagttagctgtaccagcacctcgagtttctcatcgaatgcagcccagaggttctttttactccatggtaccaaatgcaactattcaccaggatccccagtctatttttgttacgaatccagttactttaacaccacctcaaggcccaccagctgcagtgcagctttcttcagctgtgaacattatgaatggttctcagatgcacataaacccagcaaataagtctttgccacctacatttggcccagccacacttttcaatcacttcagcagtctttttgatagtagtcaggtgccagctaaccagggctggggagatggtccactgtcctcacgagttgctacagatgcctctttcactgttcagtcagcgttcctgggtaactcagtgcttggacacttggaaaacatgcaccctgataactcaaaggcacctggcttcagaccaccttcccagcgagtttctactagtccagttgggttaccatccattgacccatcaggcagctccccatcttcctcttctgctcctctggcaagtttttccggcataccaggaacaagggttttcctgcaagggccagctcctgttgggactcctagtttcaacagacaacatttttctccccatccttggacaagcgcctcaaactcatgtgactctcctattccatctgtttcttcgggatcatcttcacctctttcagccacttctgccccaccaacgttgggccaaccaaaaggagtcagtgccagtcaagatcgaaagatacctcccccaattggaacagagagactggcccgaattcggcaaggagggtctgttgcacaagccccggcggggaccagttttgtcgctcccgttggacacagtggaatctggtcatttggtgtcaatgctgtgtcagaaggcttatcaggttggtcgcaatctgtgatggggaaccatccaatgcatcaacaattatcagacccaagcacattctcccaacatcagccaatggagagagatgattctggaatggtagccccctctaacatttttcatcagcctatggcaagtggttttgtggatttttctaaaggtctgccaatttccatgtatggaggcaccataataccctctcatcctcagcttgctgatgttccaggaggccctctgtttaatggacttcacaatccagatcctgcttggaaccctatgataaaagttatccaaaattcaactgaatgcactgatgcccagcaggccagtctgcttccttcagtccctgctctcaaaggggaaatcccatcacctcagctaaccagaccgaagaagagaattggacggccgatggtggcctctcctaaccagaggcaccaggatcatctacgaccgaaagttcctgctggagtgcaagaactcacccattgcccggacacccccctgctgcctccctcagattcccggggtcacaactcctccaacagcccctctctccaagctggaggagctgaaggagcaggagacagaggaagagatacccgatgacgcacaatttgaaatggacatctaatccagtgcagatgacctggcatgtggagttacagagggatccctcatgccactgctgccaccacctcttcctggggcatccaaaggccagctggcctcatctaatctggaagggagtgacttgttagttccaggcctcctttagttctgaggcagctagaccagggataggagtgggcaacttgccaagcccttaactctacttcctcttcagtctgtggtactcctcctaaccctaaaccctctatgctcaggggctggaactggggaatggagtaagtcaccttctgactgcttagtaaacattcaaagaaatg

SEQ ID NO: 1991 - DNA, 8319 bp, Homo sapiens
  source 1..8319: mol_type = unassigned DNA
agtggcgctgctgggacgggggaaaggagacgcttcttcctcttgctgctcttctcgttcccgagatcagcggcggcggtgaccgcgagtgggtcggcaccgtctccggctccgggtgcgaacaatgctgactgatagcggaggcggcggcacctcctttgaggaggacctggactctgtggctccgcgatccgccccagctggggcctcggagccgcctccgccgggaggggtcggtctggggatccgcaccgtgaggctctttggggaggccgggccagcgtcgggagtcggcagcagcggcggcggcggcagcggcagcggtacgggcggaggggacgcggcgctggatttcaagttggcggctgccgtgctgaggaccgggggtggaggtggtgcctctggcagtgacgaggacgaagtgtccgaggttgaatcatttattttggaccaagaagatctggataacccagtgcttaaaacaacatcagagatattcttatcaagtactgcagaaggagcagacttacgcactgtggatccagagacacaggcacgactagaagcattgctagaagcagcaggaattggcaaattgtcaactgctgatggtaaagcttttgcagatcctgaggtactccggagactgacatcctcagttagttgtgcactggatgaagctgctgctgcactgacacggatgaaagcagaaaacagccacaatgcaggacaagtggacactcgcagtctagcagaagcttgttcagatggggatgttaatgctgttcgtaaattgctagatgaaggcagaagtgtaaatgaacatacagaagaaggagaaagcctgctgtgtttggcttgttcagcagggtattatgaattagcacaagtattgcttgctatgcatgctaatgttgaagatcgagggaataaaggagacataactcccctgatggcagcttccagtggaggttacttagatattgtgaaattattacttcttcatgatgctgatgtcaactcccagtctgcaacaggaaacactgcgctaacttatgcatgtgctggaggatttgttgacattgttaaagtgctccttaatgaaggtgcaaatatagaagatcataatgaaaatggacatactcccttaatggaagcagccagtgcaggtcatgtggaagttgcaagagttcttttagatcatggtgcaggcatcaacactcattctaatgaattcaaagaaagtgctctaacacttgcttgctacaaaggccatttggatatggttcgctttctacttgaagctggtgcagatcaagagcacaaaacagatgagatgcacactgccttaatggaggcctgcatggatggacatgtagaggtggcacgtttgcttttggatagtggtgctcaagtgaacatgcctgcagattcatttgaatctccattgacgctagctgcctgtggaggacatgttgaattggcagctctacttattgaaaggggagcaaatcttgaagaagttaatgatgaaggatacactcccttgatggaagctgcccgggaaggacatgaagaaatggtggcactactcttagcacaaggagcaaatataaatgcccagacagaagaaactcaagaaactgctcttactttggcttgctgtggaggattttctgaagttgcagactttcttattaaggcaggggctgatatagaacttggctgctccacacctctgatggaggcatctcaggagggacacctggaattggttaaatatttgctggcttctggcgctaatgtgcatgctacaacagcaacaggagacacagccttaacctatgcttgtgaaaatggacatacggatgttgcagatgttttacttcaagcaggggctgatttagaacatgaatctgaaggtggaagaacacctttgatgaaagctgcaagagctggtcatttgtgcactgtgcagtttcttattagcaaaggtgccaatgttaacagggctacagccaataatgatcatacagtagtgtcgctggcatgtgcaggaggccacctggcagttgttgagcttctcttggctcatggggctgaccctactcatcgactcaaggatggttcaacaatgctcattgaagctgcaaagggtggccatactaatgtagtttcttatctgttggattatccaaataatgttctgtcagttcccaccacagatgtgtctcagctccctccaccttctcaagatcagtctcaggtgccacgtgtgccaacgcatacacttgccatggttgtacctccccaggaacctgacagaacttcacaggagaactctcctgcccttttaggagtgcaaaaaggtacatccaagcagaagtccagttccctccaggtagcagatcaggacctactgccatcttttcacccataccagcctttggagtgcatagtagaggagactgaaggcaagctgaatgaactgggacaaagaattagtgctattgaaaaagcacagcttaagtcactggagttaattcaaggtgaacctctgaacaaagataagatagaagaacttaaaaagaacagagaagagcaagtccagaagaagaagaaaatattgaaagaactgcagaaagtggaaaggcagttgcagatgaaaacacagcagcaatttaccaaagaatacttggaaaccaaaggtcagaaagacacagtgtctctacaccaacagtgctctcatagaggagtcttcccagaaggggaaggagatggtagtctcccagaggatcacttttcagagttacctcaggttgacacaatcttatttaaagataatgatgttgatgatgagcaacagtctccaccatcggcagaacagattgattttgtcccagtccagcctttatcatctccacagtgtaacttttccagtgacttaggttctaatgggacaaattctcttgaacttcagaaagtatcaggtaatcagcagattgtaggacagcctcagattgctattactggacatgatcaggggctgttagttcaagaaccagatggactaatggttgcaactccagctcagacgcttaccgacactcttgatgacctgatagcagctgtgagtaccagagtgcccactggttccaacagttcttctcagaccacagagtgtcttacacctgaatcctgttcgcagactacaagcaatgtggcttcccaatcgatgcctcctgtgtatccttcagttgacattgatgcacatactgagagcaatcatgacacagcattaacactagcttgtgcaggtggtcatgaagaacttgtatctgtgctcattgcacgggatgccaaaattgaacacagagacaaaaaaggtttcacaccactaatcctggcagcaacagcagggcatgttggagttgttgaaatccttttggataaaggtggagatatagaagcacagtctgaacgaactaaggatactccgctttcattggcatgttctggtggacgtcaggaggtggtagacttgctgctggctcgaggtgcaaataaagaacataggaacgtatctgattatacaccactgagtctagctgcgtctggaggatatgttaatatcattaagattctgcttaatgctggggcagaaattaattcaaggactgggagtaaactaggtatttctcccctgatgttggctgcaatgaatggacatgttcctgcagtaaaattgctgctcgatatgggttcagacattaatgcccaaatagagaccaatcggaacacggctctcaccctggcctgtttccagggccgagcagaagtagtgagtttgcttctggaccgaaaagccaatgttgaacatagggcaaagacgggtcttacccccttgatggaagcagcttctggagggtatgcagaggttggaagagttcttcttgataaaggagcagatgttaatgctccccctgtgccttcctcaagagatactgctttaacaatagcagcagacaaaggtcactacaaattttgtgaactcctgattcataggggagcccacattgatgttcgtaacaaaaagggaaatacgccactttggctggcatccaatggaggtcattttgatgttgtgcagttgctagtgcaagcaggtgctgatgtggatgcagcagataaccggaaaatcacacctcttatgtcagcatttcgcaagggtcatgtaaaagttgttcaatatttggtaaaggaagtaaatcagttcccttctgatatagaatgcatgagatacatagcaacaattacagataaggaactgttgaaaaaatgtcatcaatgtgtcgaaaccattgtgaaggctaaagaccagcaagctgcagaagcaaataagaatgcgagtattcttttaaaggaacttgatctggaaaagtcaagagaagagagcagaaagcaggctcttgctgctaaaagagaaaaaagaaaagaaaagagaaaaaagaaaaaagaggaacagaaaaggaaacaggaagaagatgaagaaaacaaacctaaggagaattcggaactaccagaggatgaagatgaagaggagaatgatgaagatgtggagcaagaagttcccatagaacctcctagtgcaaccaccaccactacgattggaatctctgcaacatctgcaacattcacaaatgtgtttgggaaaaaaagggccaatgtggtgacaactcccagcaccaatcggaaaaataagaagaacaaaacaaaagaaacccctcctacagcacatttaattttaccagaacaacatatgtctttagcccaacaaaaggcagataaaaataaaataaatggagaacctagaggtggtggtgcaggtgggaatagtgattcagataacttggacagcacagactgcaacagtgagagtagcagtggtggtaaaagccaagagttaaattttgtgatggatgtgaattcctctaaatacccctcactgctccttcattcccaagaagaaaagacaagtactgctacttccaaaactcagacacgacttgaaggtgaagtgactcctaattccttgtcaaccagctacaagacagtgtcattgccattaagctctccaaacataaagctgaatctcactagccctaaaaggggtcagaaaagagaagaagggtggaaagaagttgtacgaaggtcaaagaaattgtctgttccagcctcagtggtgtcgaggataatgggaagaggaggatgcaacatcactgcaatacaggatgttactggtgcccatattgatgtggataaacaaaaagataagaatggcgagagaatgatcacaataaggggtggcacagaatcaacaagatatgcagttcaactaatcaatgcactcattcaagatcctgctaaggaactggaagacttgattcctaaaaatcatatcagaacacctgccagcaccaaatcaattcatgctaacttctcatctggagtaggtaccacagcagcttccagtaaaaatgcatttcctttgggtgctccaactcttgtaacttcacaggcaacaacgttatctacgttccagcccgctaataaacttaataagaatgttccaacaaatgtacgttcttctttcccagtttctctacccttagcttatcctcaccctcattttgccctgctggctgctcaaactatgcaacagattcggcatcctcgcttacccatggcccagtttggaggaaccttctcaccttctcctaacacatggggaccattcccagtgagacctgtgaatcctggcaacacaaatagctctccaaagcataataacacaagccgtctacctaaccagaacgggactgttttaccctcagagtctgctggactagctactgccagttgtcctatcactgtctcttctgtagttgctgccagtcagcaactgtgtgtcactaatacccggactccttcatcagtcagaaagcagttgtttgcctgtgtgcctaagacaagtcctccagcaacagtgatttcttctgtgacaagcacttgtagttccctgccttctgtctcctctgcacctatcactagcgggcaagctcccaccacatttctacctgcaagtacttctcaagcacagctttcttcacaaaagatggagtctttctctgctgtgccacccaccaaagagaaagtgtccacacaggaccagcccatggcaaacctatgtaccccatcttcaactgcaaacagttgcagtagctctgccagcaacaccccgggagctccagaaactcacccatccagtagtcccactcctacttccagtaacacacaagaggaggcacagccatccagtgtgtctgatttaagtcctatgtcaatgccttttgcatctaactcagaacctgctccattgactttgacatcacccagaatggttgctgctgataatcaggacaccagtaatttacctcagttagctgtaccagcacctcgagtttctcatcgaatgcagcccagaggttctttttactccatggtaccaaatgcaactattcaccaggatccccagtctatttttgttacgaatccagttactttaacaccacctcaaggcccaccagctgcagtgcagctttcttcagctgtgaacattatgaatggttctcagatgcacataaacccagcaaataagtctttgccacctacatttggcccagccacacttttcaatcacttcagcagtctttttgatagtagtcaggtgccagctaaccagggctggggagatggtccactgtcctcacgagttgctacagatgcctctttcactgttcagtcagcgttcctgggtaactcagtgcttggacacttggaaaacatgcaccctgataactcaaaggcacctggcttcagaccaccttcccagcgagtttctactagtccagttgggttaccatccattgacccatcaggcagctccccatcttcctcttctgctcctctggcaagtttttccggcataccaggaacaagggttttcctgcaagggccagctcctgttgggactcctagtttcaacagacaacatttttctccccatccttggacaagcgcctcaaactcatccacttctgccccaccaacgttgggccaaccaaaaggagtcagtgccagtcaagatcgaaagatacctcccccaattggaacagagagactggcccgaattcggcaaggagggtctgttgcacaagccccggcggggaccagttttgtcgctcccgttggacacagtggaatctggtcatttggtgtcaatgctgtgtcagaaggcttatcaggttggtcgcaatctgtgatggggaaccatccaatgcatcaacaattatcagacccaagcacattctcccaacatcagccaatggagagagatgattctggaatggtagccccctctaacatttttcatcagcctatggcaagtggttttgtggatttttctaaaggtctgccaatttccatgtatggaggcaccataataccctctcatcctcagcttgctgatgttccaggaggccctctgtttaatggacttcacaatccagatcctgcttggaaccctatgataaaagttatccaaaattcaactgaatgcactgatgcccagcaggccagtctgcttccttcagtccctgctctcaaaggggaaatcccatcacctcagctaaccagaccgaagaagagaattggacggccgatggtggcctctcctaaccagaggcaccaggatcatctacgaccgaaagttcctgctggagtgcaagaactcacccattgcccggacacccccctgctgcctccctcagattcccggggtcacaactcctccaacagcccctctctccaagctggaggagctgaaggagcaggagacagaggaagagatacccgatgacgcacaatttgaaatggacatctaatccagtgcagatgacctggcatgtggagttacagagggatccctcatgccactgctgccaccacctcttcctggggcatccaaaggccagctggcctcatctaatctggaagggagtgacttgttagttccaggcctcctttagttctgaggcagctagaccagggataggagtgggcaacttgccaagcccttaactctacttcctcttcagtctgtggtactcctcctaaccctaaaccctctatgctcaggggctggaactggggaatggagtaagtcaccttctgactgcttagtaaacattcaaagaaatg

SEQ ID NO: 1992 - DNA, 8374 bp, Homo sapiens
  source 1..8374: mol_type = unassigned DNA
agtggcgctgctgggacgggggaaaggagacgcttcttcctcttgctgctcttctcgttcccgagatcagcggcggcggtgaccgcgagtgggtcggcaccgtctccggctccgggtgcgaacaatgctgactgatagcggaggcggcggcacctcctttgaggaggacctggactctgtggctccgcgatccgccccagctggggcctcggagccgcctccgccgggaggggtcggtctggggatccgcaccgtgaggctctttggggaggccgggccagcgtcgggagtcggcagcagcggcggcggcggcagcggcagcggtacgggcggaggggacgcggcgctggatttcaagttggcggctgccgtgctgaggaccgggggtggaggtggtgcctctggcagtgacgaggacgaagtgtccgaggttgaatcatttattttggaccaagaagatctggataacccagtgcttaaaacaacatcagagatattcttatcaagtactgcagaaggagcagacttacgcactgtggatccagagacacaggcacgactagaagcattgctagaagcagcaggaattggcaaattgtcaactgctgatggtaaagcttttgcagatcctgaggtactccggagactgacatcctcagttagttgtgcactggatgaagctgctgctgcactgacacggatgaaagcagaaaacagccacaatgcaggacaagtggacactcgcagtctagcagaagcttgttcagatggggatgttaatgctgttcgtaaattgctagatgaaggcagaagtgtaaatgaacatacagaagaaggagaaagcctgctgtgtttggcttgttcagcagggtattatgaattagcacaagtattgcttgctatgcatgctaatgttgaagatcgagggaataaaggagacataactcccctgatggcagcttccagtggaggttacttagatattgtgaaattattacttcttcatgatgctgatgtcaactcccagtctgcaacaggaaacactgcgctaacttatgcatgtgctggaggatttgttgacattgttaaagtgctccttaatgaaggtgcaaatatagaagatcataatgaaaatggacatactcccttaatggaagcagccagtgcaggtcatgtggaagttgcaagagttcttttagatcatggtgcaggcatcaacactcattctaatgaattcaaagaaagtgctctaacacttgcttgctacaaaggccatttggatatggttcgctttctacttgaagctggtgcagatcaagagcacaaaacagatgagatgcacactgccttaatggaggcctgcatggatggacatgtagaggtggcacgtttgcttttggatagtggtgctcaagtgaacatgcctgcagattcatttgaatctccattgacgctagctgcctgtggaggacatgttgaattggcagctctacttattgaaaggggagcaaatcttgaagaagttaatgatgaaggatacactcccttgatggaagctgcccgggaaggacatgaagaaatggtggcactactcttagcacaaggagcaaatataaatgcccagacagaagaaactcaagaaactgctcttactttggcttgctgtggaggattttctgaagttgcagactttcttattaaggcaggggctgatatagaacttggctgctccacacctctgatggaggcatctcaggagggacacctggaattggttaaatatttgctggcttctggcgctaatgtgcatgctacaacagcaacaggagacacagccttaacctatgcttgtgaaaatggacatacggatgttgcagatgttttacttcaagcaggggctgatttagacaagcaggaggacatgaagactattttggagggcatagatccggccaagcatcaggaacatgaatctgaaggtggaagaacacctttgatgaaagctgcaagagctggtcatttgtgcactgtgcagtttcttattagcaaaggtgccaatgttaacagggctacagccaataatgatcatacagtagtgtcgctggcatgtgcaggaggccacctggcagttgttgagcttctcttggctcatggggctgaccctactcatcgactcaaggatggttcaacaatgctcattgaagctgcaaagggtggccatactaatgtagtttcttatctgttggattatccaaataatgttctgtcagttcccaccacagatgtgtctcagctccctccaccttctcaagatcagtctcaggtgccacgtgtgccaacgcatacacttgccatggttgtacctccccaggaacctgacagaacttcacaggagaactctcctgcccttttaggagtgcaaaaaggtacatccaagcagaagtccagttccctccaggtagcagatcaggacctactgccatcttttcacccataccagcctttggagtgcatagtagaggagactgaaggcaagctgaatgaactgggacaaagaattagtgctattgaaaaagcacagcttaagtcactggagttaattcaaggtgaacctctgaacaaagataagatagaagaacttaaaaagaacagagaagagcaagtccagaagaagaagaaaatattgaaagaactgcagaaagtggaaaggcagttgcagatgaaaacacagcagcaatttaccaaagaatacttggaaaccaaaggtcagaaagacacagtgtctctacaccaacagtgctctcatagaggagtcttcccagaaggggaaggagatggtagtctcccagaggatcacttttcagagttacctcaggttgacacaatcttatttaaagataatgatgttgatgatgagcaacagtctccaccatcggcagaacagattgattttgtcccagtccagcctttatcatctccacagtgtaacttttccagtgacttaggttctaatgggacaaattctcttgaacttcagaaagtatcaggtaatcagcagattgtaggacagcctcagattgctattactggacatgatcaggggctgttagttcaagaaccagatggactaatggttgcaactccagctcagacgcttaccgacactcttgatgacctgatagcagctgtgagtaccagagtgcccactggttccaacagttcttctcagaccacagagtgtcttacacctgaatcctgttcgcagactacaagcaatgtggcttcccaatcgatgcctcctgtgtatccttcagttgacattgatgcacatactgagagcaatcatgacacagcattaacactagcttgtgcaggtggtcatgaagaacttgtatctgtgctcattgcacgggatgccaaaattgaacacagagacaaaaaaggtttcacaccactaatcctggcagcaacagcagggcatgttggagttgttgaaatccttttggataaaggtggagatatagaagcacagtctgaacgaactaaggatactccgctttcattggcatgttctggtggacgtcaggaggtggtagacttgctgctggctcgaggtgcaaataaagaacataggaacgtatctgattatacaccactgagtctagctgcgtctggaggatatgttaatatcattaagattctgcttaatgctggggcagaaattaattcaaggactgggagtaaactaggtatttctcccctgatgttggctgcaatgaatggacatgttcctgcagtaaaattgctgctcgatatgggttcagacattaatgcccaaatagagaccaatcggaacacggctctcaccctggcctgtttccagggccgagcagaagtagtgagtttgcttctggaccgaaaagccaatgttgaacatagggcaaagacgggtcttacccccttgatggaagcagcttctggagggtatgcagaggttggaagagttcttcttgataaaggagcagatgttaatgctccccctgtgccttcctcaagagatactgctttaacaatagcagcagacaaaggtcactacaaattttgtgaactcctgattcataggggagcccacattgatgttcgtaacaaaaagggaaatacgccactttggctggcatccaatggaggtcattttgatgttgtgcagttgctagtgcaagcaggtgctgatgtggatgcagcagataaccggaaaatcacacctcttatgtcagcatttcgcaagggtcatgtaaaagttgttcaatatttggtaaaggaagtaaatcagttcccttctgatatagaatgcatgagatacatagcaacaattacagataaggaactgttgaaaaaatgtcatcaatgtgtcgaaaccattgtgaaggctaaagaccagcaagctgcagaagcaaataagaatgcgagtattcttttaaaggaacttgatctggaaaagtcaagagaagagagcagaaagcaggctcttgctgctaaaagagaaaaaagaaaagaaaagagaaaagaaaaaagaggaacagaaaaggaaacaggaagaagatgaagaaaacaaacctaaggagaattcggaactaccagaggatgaagatgaagaggagaatgatgaagatgtggagcaagaagttcccatagaacctcctagtgcaaccaccaccactacgattggaatctctgcaacatctgcaacattcacaaatgtgtttgggaaaaaaagggccaatgtggtgacaactcccagcaccaatcggaaaaataagaagaacaaaacaaaagaaacccctcctacagcacatttaattttaccagaacaacatatgtctttagcccaacaaaaggcagataaaaataaaataaatggagaacctagaggtggtggtgcaggtgggaatagtgattcagataacttggacagcacagactgcaacagtgagagtagcagtggtggtaaaagccaagagttaaattttgtgatggatgtgaattcctctaaatacccctcactgctccttcattcccaagaagaaaagacaagtactgctacttccaaaactcagacacgacttgaaggtgaagtgactcctaattccttgtcaaccagctacaagacagtgtcattgccattaagctctccaaacataaagctgaatctcactagccctaaaaggggtcagaaaagagaagaagggtggaaagaagttgtacgaaggtcaaagaaattgtctgttccagcctcagtggtgtcgaggataatgggaagaggaggatgcaacatcactgcaatacaggatgttactggtgcccatattgatgtggataaacaaaaagataagaatggcgagagaatgatcacaataaggggtggcacagaatcaacaagatatgcagttcaactaatcaatgcactcattcaagatcctgctaaggaactggaagacttgattcctaaaaatcatatcagaacacctgccagcaccaaatcaattcatgctaacttctcatctggagtaggtaccacagcagcttccagtaaaaatgcatttcctttgggtgctccaactcttgtaacttcacaggcaacaacgttatctacgttccagcccgctaataaacttaataagaatgttccaacaaatgtacgttcttctttcccagtttctctacccttagcttatcctcaccctcattttgccctgctggctgctcaaactatgcaacagattcggcatcctcgcttacccatggcccagtttggaggaaccttctcaccttctcctaacacatggggaccattcccagtgagacctgtgaatcctggcaacacaaatagctctccaaagcataataacacaagccgtctacctaaccagaacgggactgttttaccctcagagtctgctggactagctactgccagttgtcctatcactgtctcttctgtagttgctgccagtcagcaactgtgtgtcactaatacccggactccttcatcagtcagaaagcagttgtttgcctgtgtgcctaagacaagtcctccagcaacagtgatttcttctgtgacaagcacttgtagttccctgccttctgtctcctctgcacctatcactagcgggcaagctcccaccacatttctacctgcaagtacttctcaagcacagctttcttcacaaaagatggagtctttctctgctgtgccacccaccaaagagaaagtgtccacacaggaccagcccatggcaaacctatgtaccccatcttcaactgcaaacagttgcagtagctctgccagcaacaccccgggagctccagaaactcacccatccagtagtcccactcctacttccagtaacacacaagaggaggcacagccatccagtgtgtctgatttaagtcctatgtcaatgccttttgcatctaactcagaacctgctccattgactttgacatcacccagaatggttgctgctgataatcaggacaccagtaatttacctcagttagctgtaccagcacctcgagtttctcatcgaatgcagcccagaggttctttttactccatggtaccaaatgcaactattcaccaggatccccagtctatttttgttacgaatccagttactttaacaccacctcaaggcccaccagctgcagtgcagctttcttcagctgtgaacattatgaatggttctcagatgcacataaacccagcaaataagtctttgccacctacatttggcccagccacacttttcaatcacttcagcagtctttttgatagtagtcaggtgccagctaaccagggctggggagatggtccactgtcctcacgagttgctacagatgcctctttcactgttcagtcagcgttcctgggtaactcagtgcttggacacttggaaaacatgcaccctgataactcaaaggcacctggcttcagaccaccttcccagcgagtttctactagtccagttgggttaccatccattgacccatcaggcagctccccatcttcctcttctgctcctctggcaagtttttccggcataccaggaacaagggttttcctgcaagggccagctcctgttgggactcctagtttcaacagacaacatttttctccccatccttggacaagcgcctcaaactcatccacttctgccccaccaacgttgggccaaccaaaaggagtcagtgccagtcaagatcgaaagatacctcccccaattggaacagagagactggcccgaattcggcaaggagggtctgttgcacaagccccggcggggaccagttttgtcgctcccgttggacacagtggaatctggtcatttggtgtcaatgctgtgtcagaaggcttatcaggttggtcgcaatctgtgatggggaaccatccaatgcatcaacaattatcagacccaagcacattctcccaacatcagccaatggagagagatgattctggaatggtagccccctctaacatttttcatcagcctatggcaagtggttttgtggatttttctaaaggtctgccaatttccatgtatggaggcaccataataccctctcatcctcagcttgctgatgttccaggaggccctctgtttaatggacttcacaatccagatcctgcttggaaccctatgataaaagttatccaaaattcaactgaatgcactgatgcccagcaggccagtctgcttccttcagtccctgctctcaaaggggaaatcccatcacctcagctaaccagaccgaagaagagaattggacggccgatggtggcctctcctaaccagaggcaccaggatcatctacgaccgaaagttcctgctggagtgcaagaactcacccattgcccggacacccccctgctgcctccctcagattcccggggtcacaactcctccaacagcccctctctccaagctggaggagctgaaggagcaggagacagaggaagagatacccgatgacgcacaatttgaaatggacatctaatccagtgcagatgacctggcatgtggagttacagagggatccctcatgccactgctgccaccacctcttcctggggcatccaaaggccagctggcctcatctaatctggaagggagtgacttgttagttccaggcctcctttagttctgaggcagctagaccagggataggagtgggcaacttgccaagcccttaactctacttcctcttcagtctgtggtactcctcctaaccctaaaccctctatgctcaggggctggaactggggaatggagtaagtcaccttctgactgcttagtaaacattcaaagaaatg

SEQ ID NO: 1993 - DNA, 8221 bp, Homo sapiens
  source 1..8221: mol_type = unassigned DNA
gggaggcagcaggttaggcagtgagaagttagtggcgctgctgggacgggggaaaggagacgcttcttcctcttgctgctcttctcgttcccgagatcagcggcggcggtgaccgcgagtgggtcggcaccgtctccggctccgggtgcgaacaatgctgactgatagcggaggcggcggcacctcctttgaggaggacctggactctgtggctccgcgatccgccccagctggggcctcggagccgcctccgccgggaggggtcggtctggggatccgcaccgtgaggctctttggggaggccgggccagcgtcgggagtcggcagcagcggcggcggcggcagcggcagcggtacgggcggaggggacgcggcgctggatttcaagttggcggctgccgtgctgaggaccgggggtggaggtggtgcctctggcagtgacgaggacgaagtgtccgaggttgaatcatttattttggaccaagaagatctggataacccagtgcttaaaacaacatcagagatattcttatcaagtactgcagaaggagcagacttacgcactgtggatccagagacacaggcacgactagaagcattgctagaagcagcaggaattggcaaattgtcaactgctgatggtaaagcttttgcagatcctgaggtactccggagactgacatcctcagttagttgtgcactggatgaagctgctgctgcactgacacggatgaaagcagaaaacagccacaatgcaggacaagtggacactcgcagtctagcagaagcttgttcagatggggatgttaatgctgttcgtaaattgctagatgaaggcagaagtgtaaatgaacatacagaagaaggagaaagcctgctgtgtttggcttgttcagcagggtattatgaattagcacaagtattgcttgctatgcatgctaatgttgaagatcgagggaataaaggagacataactcccctgatggcagcttccagtggaggttacttagatattgtgaaattattacttcttcatgatgctgatgtcaactcccagtctgcaacaggaaacactgcgctaacttatgcatgtgctggaggatttgttgacattgttaaagtgctccttaatgaaggtgcaaatatagaagatcataatgaaaatggacatactcccttaatggaagcagccagtgcaggtcatgtggaagttgcaagagttcttttagatcatggtgcaggcatcaacactcattctaatgaattcaaagaaagtgctctaacacttgcttgctacaaaggccatttggatatggttcgctttctacttgaagctggtgcagatcaagagcacaaaacagatgagatgcacactgccttaatggaggcctgcatggatggacatgtagaggtggcacgtttgcttttggatagtggtgctcaagtgaacatgcctgcagattcatttgaatctccattgacgctagctgcctgtggaggacatgttgaattggcagctctacttattgaaaggggagcaaatcttgaagaagttaatgatgaaggatacactcccttgatggaagctgcccgggaaggacatgaagaaatggtggcactactcttagcacaaggagcaaatataaatgcccagacagaagaaactcaagaaactgctcttactttggcttgctgtggaggattttctgaagttgcagactttcttattaaggcaggggctgatatagaacttggctgctccacacctctgatggaggcatctcaggagggacacctggaattggttaaatatttgctggcttctggcgctaatgtgcatgctacaacagcaacaggagacacagccttaacctatgcttgtgaaaatggacatacggatgttgcagatgttttacttcaagcaggggctgatttagaacatgaatctgaaggtggaagaacacctttgatgaaagctgcaagagctggtcatttgtgcactgtgcagtttcttattagcaaaggtgccaatgttaacagggctacagccaataatgatcatacagtagtgtcgctggcatgtgcaggaggccacctggcagttgttgagcttctcttggctcatggggctgaccctactcatcgactcaaggatggttcaacaatgctcattgaagctgcaaagggtggccatactaatgtagtttcttatctgttggattatccaaataatgttctgtcagttcccaccacagatgtgtctcagctccctccaccttctcaagatcagtctcaggtgccacgtgtgccaacgcatacacttgccatggttgtacctccccaggaacctgacagaacttcacaggagaactctcctgcccttttaggagtgcaaaaaggtacatccaagcagaagtccagttccctccaggtagcagatcaggacctactgccatcttttcacccataccagcctttggagtgcatagtagaggagactgaaggcaagctgaatgaactgggacaaagaattagtgctattgaaaaagcacagcttaagtcactggagttaattcaaggtgaacctctgaacaaagataagatagaagaacttaaaaagaacagagaagagcaagtccagaagaagaagaaaatattgaaagaactgcagaaagtggaaaggcagttgcagatgaaaacacagcagcaatttaccaaagaatacttggaaaccaaaggtcagaaagacacagtgtctctacaccaacagtgctctcatagaggagtcttcccagaaggggaaggagatggtagtctcccagaggatcacttttcagagttacctcaggttgacacaatcttatttaaagataatgatgttgatgatgagcaacagtctccaccatcggcagaacagattgattttgtcccagtccagcctttatcatctccacagtgtaacttttccagtgacttaggttctaatgggacaaattctcttgaacttcagaaagtatcaggtaatcagcagattgtaggacagcctcagattgctattactggacatgatcaggggctgttagttcaagaaccagatggactaatggttgcaactccagctcagacgcttaccgacactcttgatgacctgatagcagctgtgagtaccagagtgcccactggttccaacagttcttctcagaccacagagtgtcttacacctgaatcctgttcgcagactacaagcaatgtggcttcccaatcgatgcctcctgtgtatccttcagttgacattgatgcacatactgagagcaatcatgacacagcattaacactagcttgtgcaggtggtcatgaagaacttgtatctgtgctcattgcacgggatgccaaaattgaacacagagacaaaaaaggtttcacaccactaatcctggcagcaacagcagggcatgttggagttgttgaaatccttttggataaaggtggagatatagaagcacagtctgaacgaactaaggatactccgctttcattggcatgttctggtggacgtcaggaggtggtagacttgctgctggctcgaggtgcaaataaagaacataggaacgtatctgattatacaccactgagtctagctgcgtctggaggatatgttaatatcattaagattctgcttaatgctggggcagaaattaattcaaggactgggagtaaactaggtatttctcccctgatgttggctgcaatgaatggacatgttcctgcagtaaaattgctgctcgatatgggttcagacattaatgcccaaatagagaccaatcggaacacggctctcaccctggcctgtttccagggccgagcagaagtagtgagtttgcttctggaccgaaaagccaatgttgaacatagggcaaagacgggtcttacccccttgatggaagcagcttctggagggtatgcagaggttggaagagttcttcttgataaaggagcagatgttaatgctccccctgtgccttcctcaagagatactgctttaacaatagcagcagacaaaggtcactacaaattttgtgaactcctgattcataggggagcccacattgatgttcgtaacaaaaagggaaatacgccactttggctggcatccaatggaggtcattttgatgttgtgcagttgctagtgcaagcaggtgctgatgtggatgcagcagataaccggaaaatcacacctcttatgtcagcatttcgcaagggtcatgtaaaagttgttcaatatttggtaaaggaagtaaatcagttcccttctgatatagaatgcatgagatacatagcaacaattacagataaggaactgttgaaaaaatgtcatcaatgtgtcgaaaccattgtgaaggctaaagaccagcaagctgcagaagcaaataagaatgcgagtattcttttaaaggaacttgatctggaaaagtcaagagaagagagcagaaagcaggctcttgctgctaaaagagaaaaaagaaaagaaaagagaaaaaagaaaaaagaggaacagaaaaggaaacaggaagaagatgaagaaaacaaacctaaggagaattcggaactaccagaggatgaagatgaagaggagaatgatgaagatgtggagcaagaagttcccatagaacctcctagtgcaaccaccaccactacgattggaatctctgcaacatctgcaacattcacaaatgtgtttgggaaaaaaagggccaatgtggtgacaactcccagcaccaatcggaaaaataagaagaacaaaacaaaagaaacccctcctacagcacatttaattttaccagaacaacatatgtctttagcccaacaaaaggcagataaaaataaaataaatggagaacctagaggtggtggtgcaggtgggaatagtgattcagataacttggacagcacagactgcaacagtgagagtagcagtggtggtaaaagccaagagttaaattttgtgatggatgtgaattcctctaaatacccctcactgctccttcattcccaagaagaaaagacaagtactgctacttccaaaactcagacacgacttgaaggtgaagtgactcctaattccttgtcaaccagctacaagacagtgtcattgccattaagctctccaaacataaagctgaatctcactagccctaaaaggggtcagaaaagagaagaagggtggaaagaagttgtacgaaggtcaaagaaattgtctgttccagcctcagtggtgtcgaggataatgggaagaggaggatgcaacatcactgcaatacaggatgttactggtgcccatattgatgtggataaacaaaaagataagaatggcgagagaatgatcacaataaggggtggcacagaatcaacaagatatgcagttcaactaatcaatgcactcattcaagatcctgctaaggaactggaagacttgattcctaaaaatcatatcagaacacctgccagcaccaaatcaattcatgctaacttctcatctggagtaggtaccacagcagcttccagtaaaaatgcatttcctttgggtgctccaactcttgtaacttcacaggcaacaacgttatctacgttccagcccgctaataaacttaataagaatgttccaacaaatgtacgttcttctttcccagtttctctacccttagcttatcctcaccctcattttgccctgctggctgctcaaactatgcaacagattcggcatcctcgcttacccatggcccagtttggaggaaccttctcaccttctcctaacacatggggaccattcccagtgagacctgtgaatcctggcaacacaaatagctctccaaagcataataacacaagccgtctacctaaccagaacgggactgttttaccctcagagtctgctggactagctactgccagttgtcctatcactgtctcttctgtagttgctgccagtcagcaactgtgtgtcactaatacccggactccttcatcagtcagaaagcagttgtttgcctgtgtgcctaagacaagtcctccagcaacagtgatttcttctgtgacaagcacttgtagttccctgccttctgtctcctctgcacctatcactagcgggcaagctcccaccacatttctacctgcaagtacttctcaagcacagctttcttcacaaaagatggagtctttctctgctgtgccacccaccaaagagaaagtgtccacacaggaccagcccatggcaaacctatgtaccccatcttcaactgcaaacagttgcagtagctctgccagcaacaccccgggagctccagaaactcacccatccagtagtcccactcctacttccagtaacacacaagaggaggcacagccatccagtgtgtctgatttaagtcctatgtcaatgccttttgcatctaactcagaacctgctccattgactttgacatcacccagaatggttgctgctgataatcaggacaccagtaatttacctcagttagctgtaccagcacctcgagtttctcatcgaatgcagcccagaggttctttttactccatggtaccaaatgcaactattcaccaggatccccagtctatttttgttacgaatccagttactttaacaccacctcaaggcccaccagctgcagtgcagctttcttcagctgtgaacattatgaatggttctcagatgcacataaacccagcaaataagtctttgccacctacatttggcccagccacacttttcaatcacttcagcagtctttttgatagtagtcaggtgccagctaaccagggctggggagatggtccactgtcctcacgagttgctacagatgcctctttcactgttcagtcagcgttcctgggtaactcagtgcttggacacttggaaaacatgcaccctgataactcaaaggcacctggcttcagaccaccttcccagcgagtttctactagtccagttgggttaccatccattgacccatcaggcagctccccatcttcctcttctgctcctctggcaagtttttccggcataccaggaacaagggttttcctgcaagggccagctcctgttgggactcctagtttcaacagacaacatttttctccccatccttggacaagcgcctcaaactcatccacttctgccccaccaacgttgggccaaccaaaaggagtcagtgccagtcaagatcgaaagatacctcccccaattggaacagagagactggcccgaattcggcaaggagggtctgttgcacaagccccggcggggaccagttttgtcgctcccgttggacacagtggaatctggtcatttggtgtcaatgctgtgtcagaaggcttatcaggttggtcgcaatctgtgatggggaaccatccaatgcatcaacaattatcagacccaagcacattctcccaacatcagccaatggagagagatgattctggaatggtagccccctctaacatttttcatcagcctatggcaagtggttttgtggatttttctaaaggtctgccaatttccatgtatggaggcaccataataccctctcatcctcagcttgctgatgttccaggaggccctctgtttaatggacttcacaatccagatcctgcttggaaccctatgataaaagttatccaaaattcaactgaatgcactgatgcccagcagatttggcctggcacgtgggcacctcatattggaaacatgcatctcaaatatgtcaactaagttagaaggtctttactctttagccttgtttaagaaacctatgaccttggaagaaccatggggatttttttttaatgtgcctaagaaattttctctgaggctttagcaatggaaatttgattgcccattgtataagaacaaattgatttcctatccacctgattatgttctctggttagtttagccattttgaacttaagatcatatgaccttagtgcttttggctaaacatacagaatactacttgtatgcagaagagaattagttgattacatgtttcaaccttttagggtgataaatacatgtataattgtttacatacttaaaaggaaaaagttgagtaaatttcttgtcatatagtggctctacgtaatgtagcctgtattaatgtgaaatatttaccagaatattcaataaaaagatgaacagtctttagaa

SEQ ID NO: 1994 - DNA, 2035 bp, Homo sapiens
  source 1..2035: mol_type = unassigned DNA
ggtgaccgcgagtgggtcggcaccgtctccggctccgggtgcgaacaatgctgactgatagcggaggcggcggcacctcctttgaggaggacctggactctgtggctccgcgatccgccccagctggggcctcggagccgcctccgccgggaggggtcggtctggggatccgcaccgtgaggctctttggggaggccgggccagcgtcgggagtcggcagcagcggcggcggcggcagcggcagcggtacgggcggaggggacgcggcgctggatttcaagttggcggctgccgtgctgaggaccgggggtggaggtggtgcctctggcagtgacgaggacgaagtgtccgaggttgaatcatttattttggaccaagaagatctggataacccagtgcttaaaacaacatcagagatattcttatcaagtactgcagaaggagcagacttacgcactgtggatccagagacacaggcacgactagaagcattgctagaagcagcagcttttgcagatcctgaggtactccggagactgacatcctcagttagttgtgcactggatgaagctgctgctgcactgacacggatgaaagcagaaaacagccacaatgcaggacaagtggacactcgcagtctagcagaagcttgttcagatggggatgttaatgctgttcgtaaattgctagatgaaggcagaagtgtaaatgaacatacagaagaaggagaaagcctgctgtgtttggcttgttcagcagggtattatgaattagcacaagtattgcttgctatgcatgctaatgttgaagatcgagggaataaaggagacataactcccctgatggcagcttccagtggaggttacttagatattgtgaaattattacttcttcatgatgctgatgtcaactcccagtctgcaacaggaaacactgcgctaacttatgcatgtgctggaggatttgttgacattgttaaagtgctccttaatgaaggtgcaaatatagaagatcataatgaaaatggacatactcccttaatggaagcagccagtgcaggtcatgtggaagttgcaagagttcttttagatcatggtgcaggcatcaacactcattctaatgaattcaaagaaagtgctctaacacttgcttgctacaaaggccatttggatatggttcgctttctacttgaagctggtgcagatcaagagcacaaaacagatgagatgcacactgccttaatggaggcctgcatggatggacatgtagaggtggcacgtttgcttttggatagtggtgctcaagtgaacatgcctgcagattcatttgaatctccattgacgctagctgcctgtggaggacatgttgaattggcagctctacttattgaaaggggagcaaatcttgaagaagttaatgatgaaggatacactcccttgatggaagctgcccgggaaggacatgaagaaatggtggcactactcttagcacaaggagcaaatataaatgcccagacagaagaaactcaagaaactgctcttactttggcttgctgtggaggattttctgaagttgcagactttcttattaaggcaggggctgatatagaacttggctgctccacacctctgatggaggcatctcaggagggacacctggaattggttaaatatttgctggcttctggcgctaatgtgcatgctacaacagcaacaggagacacagccttaacctatgcttgtgaaaatggacatacggatgttgcagatgttttacttcaagcaggggctgatttagacaagcaggaggacatgaagactattttggagggcatagatccggccaagcatcaggtgagggtggcctttgatgcttgtaagctactacgtaaagaatagatgttgtaggtaaccagaactctggatatctgaattccagccaagaagttccaggaccctgctgggtgacaaaggaaatcctcttcaattgaaaaagattatgaagtcccaataaaaagagatttgtattgctggta

SEQ ID NO: 1995 - DNA, 2135 bp, Homo sapiens
  source 1..2135: mol_type = unassigned DNA
ctgggacgggggaaaggagacgcttcttcctcttgctgctcttctcgttcccgagatcagcggcggcggtgaccgcgagtgggtcggcaccgtctccggctccgggtgcgaacaatgctgactgatagcggaggcggcggcacctcctttgaggaggacctggactctgtggctccgcgatccgccccagctggggcctcggagccgcctccgccgggaggggtcggtctggggatccgcaccgtgaggctctttggggaggccgggccagcgtcgggagtcggcagcagcggcggcggcggcagcggcagcggtacgggcggaggggacgcggcgctggatttcaagttggcggctgccgtgctgaggaccgggggtggaggtggtgcctctggcagtgacgaggacgaagtgtccgaggttgaatcatttattttggaccaagaagatctggataacccagtgcttaaaacaacatcagagatattcttatcaagtactgcagaaggagcagacttacgcactgtggatccagagacacaggcacgactagaagcattgctagaagcagcaggaattggcaaattgtcaactgctgatggtaaagcttttgcagatcctgaggtactccggagactgacatcctcagttagttgtgcactggatgaagctgctgctgcactgacacggatgaaagcagaaaacagccacaatgcaggacaagtggacactcgcagtctagcagaagcttgttcagatggggatgttaatgctgttcgtaaattgctagatgaaggcagaagtgtaaatgaacatacagaagaaggagaaagcctgctgtgtttggcttgttcagcagggtattatgaattagcacaagtattgcttgctatgcatgctaatgttgaagatcgagggaataaaggagacataactcccctgatggcagcttccagtggaggttacttagatattgtgaaattattacttcttcatgatgctgatgtcaactcccagtctgcaacaggaaacactgcgctaacttatgcatgtgctggaggatttgttgacattgttaaagtgctccttaatgaaggtgcaaatatagaagatcataatgaaaatggacatactcccttaatggaagcagccagtgcaggtcatgtggaagttgcaagagttcttttagatcatggtgcaggcatcaacactcattctaatgaattcaaagaaagtgctctaacacttgcttgctacaaaggccatttggatatggttcgctttctacttgaagctggtgcagatcaagagcacaaaacagatgagatgcacactgccttaatggaggcctgcatggatggacatgtagaggtggcacgtttgcttttggatagtggtgctcaagtgaacatgcctgcagattcatttgaatctccattgacgctagctgcctgtggaggacatgttgaattggcagctctacttattgaaaggggagcaaatcttgaagaagttaatgatgaaggatacactcccttgatggaagctgcccgggaaggacatgaagaaatggtggcactactcttagcacaaggagcaaatataaatgcccagacagaagaaactcaagaaactgctcttactttggcttgctgtggaggattttctgaagttgcagactttcttattaaggcaggggctgatatagaacttggctgctccacacctctgatggaggcatctcaggagggacacctggaattggttaaatatttgctggcttctggcgctaatgtgcatgctacaacagcaacaggagacacagccttaacctatgcttgtgaaaatggacatacggatgttgcagatgttttacttcaagcaggggctgatttagacaagcaggaggacatgaagactattttggagggcatagatccggccaagcatcaggtgagggtggcctttgatgcttgtaagctactacgtaaagaatagatgttgtaggtaaccagaactctggatatctgaattccagccaagaagttccaggaccctgctgggtgacaaaggaaatcctcttcaattgaaaaagattatgaagtcccaataaaaagagatttgtattgctggta

SEQ ID NO: 1996 - DNA, 8376 bp, Homo sapiens
  source 1..8376: mol_type = unassigned DNA
agtggcgctgctgggacgggggaaaggagacgcttcttcctcttgctgctcttctcgttcccgagatcagcggcggcggtgaccgcgagtgggtcggcaccgtctccggctccgggtgcgaacaatgctgactgatagcggaggcggcggcacctcctttgaggaggacctggactctgtggctccgcgatccgccccagctggggcctcggagccgcctccgccgggaggggtcggtctggggatccgcaccgtgaggctctttggggaggccgggccagcgtcgggagtcggcagcagcggcggcggcggcagcggcagcggtacgggcggaggggacgcggcgctggatttcaagttggcggctgccgtgctgaggaccgggggtggaggtggtgcctctggcagtgacgaggacgaagtgtccgaggttgaatcatttattttggaccaagaagatctggataacccagtgcttaaaacaacatcagagatattcttatcaagtactgcagaaggagcagacttacgcactgtggatccagagacacaggcacgactagaagcattgctagaagcagcaggaattggcaaattgtcaactgctgatggtaaagcttttgcagatcctgaggtactccggagactgacatcctcagttagttgtgcactggatgaagctgctgctgcactgacacggatgaaagcagaaaacagccacaatgcaggacaagtggacactcgcagtctagcagaagcttgttcagatggggatgttaatgctgttcgtaaattgctagatgaaggcagaagtgtaaatgaacatacagaagaaggagaaagcctgctgtgtttggcttgttcagcagggtattatgaattagcacaagtattgcttgctatgcatgctaatgttgaagatcgagggaataaaggagacataactcccctgatggcagcttccagtggaggttacttagatattgtgaaattattacttcttcatgatgctgatgtcaactcccagtctgcaacaggaaacactgcgctaacttatgcatgtgctggaggatttgttgacattgttaaagtgctccttaatgaaggtgcaaatatagaagatcataatgaaaatggacatactcccttaatggaagcagccagtgcaggtcatgtggaagttgcaagagttcttttagatcatggtgcaggcatcaacactcattctaatgaattcaaagaaagtgctctaacacttgcttgctacaaaggccatttggatatggttcgctttctacttgaagctggtgcagatcaagagcacaaaacagatgagatgcacactgccttaatggaggcctgcatggatggacatgtagaggtggcacgtttgcttttggatagtggtgctcaagtgaacatgcctgcagattcatttgaatctccattgacgctagctgcctgtggaggacatgttgaattggcagctctacttattgaaaggggagcaaatcttgaagaagttaatgatgaaggatacactcccttgatggaagctgcccgggaaggacatgaagaaatggtggcactactcttagcacaaggagcaaatataaatgcccagacagaagaaactcaagaaactgctcttactttggcttgctgtggaggattttctgaagttgcagactttcttattaaggcaggggctgatatagaacttggctgctccacacctctgatggaggcatctcaggagggacacctggaattggttaaatatttgctggcttctggcgctaatgtgcatgctacaacagcaacaggagacacagccttaacctatgcttgtgaaaatggacatacggatgttgcagatgttttacttcaagcaggggctgatttagacaagcaggaggacatgaagactattttggagggcatagatccggccaagcatcaggaacatgaatctgaaggtggaagaacacctttgatgaaagctgcaagagctggtcatttgtgcactgtgcagtttcttattagcaaaggtgccaatgttaacagggctacagccaataatgatcatacagtagtgtcgctggcatgtgcaggaggccacctggcagttgttgagcttctcttggctcatggggctgaccctactcatcgactcaaggatggttcaacaatgctcattgaagctgcaaagggtggccatactaatgtagtttcttatctgttggattatccaaataatgttctgtcagttcccaccacagatgtgtctcagctccctccaccttctcaagatcagtctcaggtgccacgtgtgccaacgcatacacttgccatggttgtacctccccaggaacctgacagaacttcacaggagaactctcctgcccttttaggagtgcaaaaaggtacatccaagcagaagtccagttccctccaggtagcagatcaggacctactgccatcttttcacccataccagcctttggagtgcatagtagaggagactgaaggcaagctgaatgaactgggacaaagaattagtgctattgaaaaagcacagcttaagtcactggagttaattcaaggtgaacctctgaacaaagataagatagaagaacttaaaaagaacagagaagagcaagtccagaagaagaagaaaatattgaaagaactgcagaaagtggaaaggcagttgcagatgaaaacacagcagcaatttaccaaagaatacttggaaaccaaaggtcagaaagacacagtgtctctacaccaacagtgctctcatagaggagtcttcccagaaggggaaggagatggtagtctcccagaggatcacttttcagagttacctcaggttgacacaatcttatttaaagataatgatgttgatgatgagcaacagtctccaccatcggcagaacagattgattttgtcccagtccagcctttatcatctccacagtgtaacttttccagtgacttaggttctaatgggacaaattctcttgaacttcagaaagtatcaggtaatcagcagattgtaggacagcctcagattgctattactggacatgatcaggggctgttagttcaagaaccagatggactaatggttgcaactccagctcagacgcttaccgacactcttgatgacctgatagcagctgtgagtaccagagtgcccactggttccaacagttcttctcagaccacagagtgtcttacacctgaatcctgttcgcagactacaagcaatgtggcttcccaatcgatgcctcctgtgtatccttcagttgacattgatgcacatactgagagcaatcatgacacagcattaacactagcttgtgcaggtggtcatgaagaacttgtatctgtgctcattgcacgggatgccaaaattgaacacagagacaaaaaaggtttcacaccactaatcctggcagcaacagcagggcatgttggagttgttgaaatccttttggataaaggtggagatatagaagcacagtctgaacgaactaaggatactccgctttcattggcatgttctggtggacgtcaggaggtggtagacttgctgctggctcgaggtgcaaataaagaacataggaacgtatctgattatacaccactgagtctagctgcgtctggaggatatgttaatatcattaagattctgcttaatgctggggcagaaattaattcaaggactgggagtaaactaggtatttctcccctgatgttggctgcaatgaatggacatgttcctgcagtaaaattgctgctcgatatgggttcagacattaatgcccaaatagagaccaatcggaacacggctctcaccctggcctgtttccagggccgagcagaagtagtgagtttgcttctggaccgaaaagccaatgttgaacatagggcaaagacgggtcttacccccttgatggaagcagcttctggagggtatgcagaggttggaagagttcttcttgataaaggagcagatgttaatgctccccctgtgccttcctcaagagatactgctttaacaatagcagcagacaaaggtcactacaaattttgtgaactcctgattcataggggagcccacattgatgttcgtaacaaaaagggaaatacgccactttggctggcatccaatggaggtcattttgatgttgtgcagttgctagtgcaagcaggtgctgatgtggatgcagcagataaccggaaaatcacacctcttatgtcagcatttcgcaagggtcatgtaaaagttgttcaatatttggtaaaggaagtaaatcagttcccttctgatatagaatgcatgagatacatagcaacaattacagataaggaactgttgaaaaaatgtcatcaatgtgtcgaaaccattgtgaaggctaaagaccagcaagctgcagaagcaaataagaatgcgagtattcttttaaaggaacttgatctggaaaagtcaagagaagagagcagaaagcaggctcttgctgctaaaagagaaaaaagaaaagaaaagagaaaaaagaaaaaagaggaacagaaaaggaaacaggaagaagatgaagaaaacaaacctaaggagaattcggaactaccagaggatgaagatgaagaggagaatgatgaagatgtggagcaagaagttcccatagaacctcctagtgcaaccaccaccactacgattggaatctctgcaacatctgcaacattcacaaatgtgtttgggaaaaaaagggccaatgtggtgacaactcccagcaccaatcggaaaaataagaagaacaaaacaaaagaaacccctcctacagcacatttaattttaccagaacaacatatgtctttagcccaacaaaaggcagataaaaataaaataaatggagaacctagaggtggtggtgcaggtgggaatagtgattcagataacttggacagcacagactgcaacagtgagagtagcagtggtggtaaaagccaagagttaaattttgtgatggatgtgaattcctctaaatacccctcactgctccttcattcccaagaagaaaagacaagtactgctacttccaaaactcagacacgacttgaaggtgaagtgactcctaattccttgtcaaccagctacaagacagtgtcattgccattaagctctccaaacataaagctgaatctcactagccctaaaaggggtcagaaaagagaagaagggtggaaagaagttgtacgaaggtcaaagaaattgtctgttccagcctcagtggtgtcgaggataatgggaagaggaggatgcaacatcactgcaatacaggatgttactggtgcccatattgatgtggataaacaaaaagataagaatggcgagagaatgatcacaataaggggtggcacagaatcaacaagatatgcagttcaactaatcaatgcactcattcaagatcctgctaaggaactggaagacttgattcctaaaaatcatatcagaacacctgccagcaccaaatcaattcatgctaacttctcatctggagtaggtaccacagcagcttccagtaaaaatgcatttcctttgggtgctccaactcttgtaacttcacaggcaacaacgttatctacgttccagcccgctaataaacttaataagaatgttccaacaaatgtacgttcttctttcccagtttctctacccttagcttatcctcaccctcattttgccctgctggctgctcaaactatgcaacagattcggcatcctcgcttacccatggcccagtttggaggaaccttctcaccttctcctaacacatggggaccattcccagtgagacctgtgaatcctggcaacacaaatagctctccaaagcataataacacaagccgtctacctaaccagaacgggactgttttaccctcagagtctgctggactagctactgccagttgtcctatcactgtctcttctgtagttgctgccagtcagcaactgtgtgtcactaatacccggactccttcatcagtcagaaagcagttgtttgcctgtgtgcctaagacaagtcctccagcaacagtgatttcttctgtgacaagcacttgtagttccctgccttctgtctcctctgcacctatcactagcgggcaagctcccaccacatttctacctgcaagtacttctcaagcacagctttcttcacaaaagatggagtctttctctgctgtgccacccaccaaagagaaagtgtccacacaggaccagcccatggcaaacctatgtaccccatcttcaactgcaaacagttgcagtagctctgccagcaacaccccgggagctccagaaactcacccatccagtagtcccactcctacttccagtaacacacaagaggaggcacagccatccagtgtgtctgatttaagtcctatgtcaatgccttttgcatctaactcagaacctgctccattgactttgacatcacccagaatggttgctgctgataatcaggacaccagtaatttacctcagttagctgtaccagcacctcgagtttctcatcgaatgcagcccagaggttctttttactccatggtaccaaatgcaactattcaccaggatccccagtctatttttgttacgaatccagttactttaacaccacctcaaggcccaccagctgcagtgcagctttcttcagctgtgaacattatgaatggttctcagatgcacataaacccagcaaataagtctttgccacctacatttggcccagccacacttttcaatcacttcagcagtctttttgatagtagtcaggtgccagctaaccagggctggggagatggtccactgtcctcacgagttgctacagatgcctctttcactgttcagtcagcgttcctgggtaactcagtgcttggacacttggaaaacatgcaccctgataactcaaaggcacctggcttcagaccaccttcccagcgagtttctactagtccagttgggttaccatccattgacccatcaggcagctccccatcttcctcttctgctcctctggcaagtttttccggcataccaggaacaagggttttcctgcaagggccagctcctgttgggactcctagtttcaacagacaacatttttctccccatccttggacaagcgcctcaaactcatccacttctgccccaccaacgttgggccaaccaaaaggagtcagtgccagtcaagatcgaaagatacctcccccaattggaacagagagactggcccgaattcggcaaggagggtctgttgcacaagccccggcggggaccagttttgtcgctcccgttggacacagtggaatctggtcatttggtgtcaatgctgtgtcagaaggcttatcaggttggtcgcaatctgtgatggggaaccatccaatgcatcaacaattatcagacccaagcacattctcccaacatcagccaatggagagagatgattctggaatggtagccccctctaacatttttcatcagcctatggcaagtggttttgtggatttttctaaaggtctgccaatttccatgtatggaggcaccataataccctctcatcctcagcttgctgatgttccaggaggccctctgtttaatggacttcacaatccagatcctgcttggaaccctatgataaaagttatccaaaattcaactgaatgcactgatgcccagcaggccagtctgcttccttcagtccctgctctcaaaggggaaatcccatcacctcagctaaccagaccgaagaagagaattggacggccgatggtggcctctcctaaccagaggcaccaggatcatctacgaccgaaagttcctgctggagtgcaagaactcacccattgcccggacacccccctgctgcctccctcagattcccggggtcacaactcctccaacagcccctctctccaagctggaggagctgaaggagcaggagacagaggaagagatacccgatgacgcacaatttgaaatggacatctaatccagtgcagatgacctggcatgtggagttacagagggatccctcatgccactgctgccaccacctcttcctggggcatccaaaggccagctggcctcatctaatctggaagggagtgacttgttagttccaggcctcctttagttctgaggcagctagaccagggataggagtgggcaacttgccaagcccttaactctacttcctcttcagtctgtggtactcctcctaaccctaaaccctctatgctcaggggctggaactggggaatggagtaagtcaccttctgactgcttagtaaacattcaaagaaatg

SEQ ID NO: 1997 - DNA, 2387 bp, Homo sapiens
  source 1..2387: mol_type = unassigned DNA
atgtgtcgaaaccattgtgaaggctaaagaccagcaagctgcagaagcaaataagaatgcgagtattcttttaaaggaacttgatctggaaaagtcaagagaagagagcagaaagcaggctcttgctgctaaaagagaaaaaagaaaagaaaagagaaaaaagaaaaaagaggaacagaaaaggaaacaggaagaagatgaagaaaacaaacctaaggagaattcggaactaccagaggatgaagatgaagaggagaatgatgaagatgtggagcaagaagttcccatagaacctcctagtgcaaccaccaccactacgattggaatctctgcaacatctgcaacattcacaaatgtgtttgggaaaaaaagggccaatgtggtgacaactcccagcaccaatcggaaaaataagaagaacaaaacaaaagaaacccctcctacagcacatttaattttaccagaacaacatatgtctttagcccaacaaaaggcagataaaaataaaataaatggagaacctagaggtggtggtgcaggtgggaatagtgattcagataacttggacagcacagactgcaacagtgagagtagcagtggtggtaaaagccaagagttaaattttgtgatggatgtgaattcctctaaatacccctcactgctccttcattcccaagaagaaaagacaagtactgctacttccaaaactcagacacgacttgaaggtgaagtgactcctaattccttgtcaaccagctacaagacagtgtcattgccattaagctctccaaacataaagctgaatctcactagccctaaaaggggtcagaaaagagaagaagggtggaaagaagttgtacgaaggtcaaagaaattgtctgttccagcctcagtggtgtcgaggataatgggaagaggaggatgcaacatcactgcaatacaggatgttactggtgcccatattgatgtggataaacaaaaagataagaatggcgagagaatgatcacaataaggggtggcacagaatcaacaagatatgcagttcaactaatcaatgcactcattcaagatcctgctaaggaactggaagacttgattcctaaaaatcatatcagaacacctgccagcaccaaatcaattcatgctaacttctcatctggagtaggtaccacagcagcttccagtaaaaatgcatttcctttgggtgctccaactcttgtaacttcacaggcaacaacgttatctacgttccagcccgctaataaacttaataagaatgttccaacaaatgtacgttcttctttcccagtttctctacccttagcttatcctcaccctcattttgccctgctggctgctcaaactatgcaacagattcggcatcctcgcttacccatggcccagtttggaggaaccttctcaccttctcctaacacatggggaccattcccagtgagacctgtgaatcctggcaacacaaatagctctccaaagcataataacacaagccgtctacctaaccagaacgggactgttttaccctcagagtctgctggactagctactgccagttgtcctatcactgtctcttctgtagttgctgccagtcagcaactgtgtgtcactaatacccggactccttcatcagtcagaaagcagttgtttgcctgtgtgcctaagacaagtcctccagcaacagtgatttcttctgtgacaagcacttgtagttccctgccttctgtctcctctgcacctatcactagcgggcaagctcccaccacatttctacctgcaagtacttctcaagcacagctttcttcacaaaagatggagtctttctctgctgtgccacccaccaaagagaaagtgtccacacaggaccagcccatggcaaacctatgtaccccatcttcaactgcaaacagttgcagtagctctgccagcaacaccccgggagctccagaaactcacccatccagtagtcccactcctacttccagtaacacacaagaggaggcacagccatccagtgtgtctgatttaagtcctatgtcaatgccttttgcatctaactcagaacctgctccattgactttgacatcacccagaatggttgctgctgataatcaggacaccagtaatttacctcagttagctgtaccagcacctcgagtttctcatcgaatgcagcccagaggttctttttactccatggtaccaaatgcaactattcaccaggatccccagtctatttttgttacgaatccagttacactttgggaagctgaggcgagtggtttacatgaggtcaggagtttgagacaagcctggccaacatggtgaaactccatctctactaaaaatataaaaaatagccaggcatgat

SEQ ID NO: 1998 - DNA, 3234 bp, Homo sapiens
  source 1..3234: mol_type = unassigned DNA
aaaagaaacccctcctacagcacatttaattttaccagaacaacatatgtctttagcccaacaaaaggcagataaaaataaaataaatggagaacctagaggtggtggtgcaggtgggaatagtgattcagataacttggacagcacagactgcaacagtgagagtagcagtggtggtaaaagccaagagttaaattttgtgatggatgtgaattcctctaaatacccctcactgctccttcattcccaagaagaaaagacaagtactgctacttccaaaactcagacacgacttgaaggtgaagtgactcctaattccttgtcaaccagctacaagacagtgtcattgccattaagctctccaaacataaagctgaatctcactagccctaaaaggggtcagaaaagagaagaagggtggaaagaagttgtacgaaggtcaaagaaattgtctgttccagcctcagtggtgtcgaggataatgggaagaggaggatgcaacatcactgcaatacaggatgttactggtgcccatattgatgtggataaacaaaaagataagaatggcgagagaatgatcacaataaggggtggcacagaatcaacaagatatgcagttcaactaatcaatgcactcattcaagatcctgctaaggaactggaagacttgattcctaaaaatcatatcagaacacctgccagcaccaaatcaattcatgctaacttctcatctggagtaggtaccacagcagcttccagtaaaaatgcatttcctttgggtgctccaactcttgtaacttcacaggcaacaacgttatctacgttccagcccgctaataaacttaataagaatgttccaacaaatgtacgttcttctttcccagtttctctacccttagcttatcctcaccctcattttgccctgctggctgctcaaactatgcaacagattcggcatcctcgcttacccatggcccagtttggaggaaccttctcaccttctcctaacacatggggaccattcccagtgagacctgtgaatcctggcaacacaaatagctctccaaagcataataacacaagccgtctacctaaccagaacgggactgttttaccctcagagtctgctggactagctactgccagttgtcctatcactgtctcttctgtagttgctgccagtcagcaactgtgtgtcactaatacccggactccttcatcagtcagaaagcagttgtttgcctgtgtgcctaagacaagtcctccagcaacagtgatttcttctgtgacaagcacttgtagttccctgccttctgtctcctctgcacctatcactagcgggcaagctcccaccacatttctacctgcaagtacttctcaagcacagctttcttcacaaaagatggagtctttctctgctgtgccacccaccaaagagaaagtgtccacacaggaccagcccatggcaaacctatgtaccccatcttcaactgcaaacagttgcagtagctctgccagcaacaccccgggagctccagaaactcacccatccagtagtcccactcctacttccagtaacacacaagaggaggcacagccatccagtgtgtctgatttaagtcctatgtcaatgccttttgcatctaactcagaacctgctccattgactttgacatcacccagaatggttgctgctgataatcaggacaccagtaatttacctcagttagctgtaccagcacctcgagtttctcatcgaatgcagcccagaggttctttttactccatggtaccaaatgcaactattcaccaggatccccagtctatttttgttacgaatccagttactttaacaccacctcaaggcccaccagctgcagtgcagctttcttcagctgtgaacattatgaatggttctcagatgcacataaacccagcaaataagtctttgccacctacatttggcccagccacacttttcaatcacttcagcagtctttttgatagtagtcaggtgccagctaaccagggctggggagatggtccactgtcctcacgagttgctacagatgcctctttcactgttcagtcagcgttcctgggtaactcagtgcttggacacttggaaaacatgcaccctgataactcaaaggcacctggcttcagaccaccttcccagcgagtttctactagtccagttgccacttctgccccaccaacgttgggccaaccaaaaggagtcagtgccagtcaagatcgaaagatacctcccccaattggaacagagagactggcccgaattcggcaaggagggtctgttgcacaagccccggcggggaccagttttgtcgctcccgttggacacagtggaatctggtcatttggtgtcaatgctgtgtcagaaggcttatcaggttggtcgcaatctgtgatggggaaccatccaatgcatcaacaattatcagacccaagcacattctcccaacatcagccaatggagagagatgattctggaatggtagccccctctaacatttttcatcagcctatggcaagtggttttgtggatttttctaaaggtctgccaatttccatgtatggaggcaccataataccctctcatcctcagcttgctgatgttccaggaggccctctgtttaatggacttcacaatccagatcctgcttggaaccctatgataaaagttatccaaaattcaactgaatgcactgatgcccagcagatttggcctggcacgtgggcacctcatattggaaacatgcatctcaaatatgtcaactaagttagaaggtctttactctttagccttgtttaagaaacctatgaccttggaagaaccatggggatttttttttaatgtgcctaagaaattttctctgaggctttagcaatggaaatttgattgcccattgtataagaacaaattgatttcctatccacctgattatgttctctggttagtttagccattttgaacttaagatcatatgaccttagtgcttttggctaaacatacagaatactacttgtatgcagaagagaattagttgattacatgtttcaaccttttagggtgataaatacatgtataattgtttacatacttaaaaggaaaaagttgagtaaatttcttgtcatatagtggctctacgtaatgtagcctgtattaatgtgaaatatttaccagaatattcaataaaaagatgaacagtc

SEQ ID NO: 1999 - DNA, 2543 bp, Homo sapiens
  source 1..2543: mol_type = unassigned DNA
cggacccgaggagcaggaagcggcggctccttcggccacccaggcagcagccacagcggggagtgcgcggcgcggggacaggaagagaggggcaatggctgccgaccccaccgagctgcggctgggcagcctccccgtcttcacccgcgacgacttcgagggcgactggcgcctagtggccagcggcggcttcagccaggtgttccaggcgcggcacaggcgctggcggacggagtacgccatcaagtgcgccccctgccttccacccgacgccgccagctctgatgtgaattacctcattgaagaagctgccaaaatgaagaagatcaagtttcagcacatcgtgtctatctacggggtgtgcaagcagcccctgggtattgtgatggagtttatggccaacggctccctggagaaggtgctgtccacccacagcctctgctggaagctcaggttccgcatcatccatgagaccagcttggccatgaacttcctgcacagcattaagccgcctctgctccacctggacctcaagccgggcaacatactcctggacagcaacatgcatgtcaaaatttcagacttcggcctgtccaagtggatggaacagtccacccggatgcagtacatcgagaggtcggctctgcggggcatgctcagctacatcccccctgagatgttcctggagagtaacaaggccccaggacctaaatatgatgtgtacagctttgcaattgtcatctgggagctactcactcagaagaaaccatactcagggttcaacatgatgatgattattatccgagtggcggcaggcatgcggccctccctacagcctgtctctgaccaatggccaagcgaggcccagcagatggtggacctgatgaaacgctgctgggaccaggaccccaagaagaggccatgctttctagacattaccatcgagacagacatactgctgtcactgctgcagagtcgtgtggcagtcccagagagcaaggccctggccaggaaggtgtcctgcaagctgtcgctgcgccagcccggggaggttaatgaggacatcagccaggaactgatggacagtgactcaggaaactacctgaagcgggcccttcagctctccgaccgtaagaatttggtcccgagagatgaggaactgtgtatctatgagaacaaggtcacccccctccacttcctggtggcccagggcagtgtggagcaggtgaggttgctgctggcccacgaggtagacgtggactgccagacggcctctggatacacgcccctcctgatcgccgcccaggaccagcaacccgacctctgtgccctgcttttggcacatggtgctgatgccaaccgagtggatgaggatggctgggccccactgcactttgcagcccagaatggggatgacggcactgcgcgcctgctcctggaccacggggcctgtgtggatgcccaggaacgtgaagggtggacccctcttcacctggctgcacagaataactttgagaatgtggcacggcttctggtctcccgtcaggctgaccccaacctgcatgaggctgagggcaagacccccctccatgtggccgcctactttggccatgttagcctggtcaagctgctgaccagccagggggctgagttggatgctcagcagagaaacctgagaacaccactgcacctggcagtagagcggggcaaagtgagggccatccaacacctgctgaagagtggagcggtccctgatgcccttgaccagagcggctacggcccactgcacactgcagctgccaggggcaaatacctgatctgcaagatgctgctcaggtacggagccagccttgagctgcccacccaccagggctggacacccctgcatctagcagcctacaagggccacctggagatcatccatctgctggcagagagccacgcaaacatgggtgctcttggagctgtgaactggactcccctgcacctagctgcacgccacggggaggaggcggtggtgtcagcactgctgcagtgtggggctgaccccaatgctgcagagcagtcaggctggacacccctccacctggcggtccagaggagcaccttcctgagtgtcatcaacctcctagaacatcacgcaaatgtccacgcccgcaacaaggtgggctggacacccgcccacctggccgccctcaagggcaacacagccatcctcaaagtgctggtcgaggcaggcgcccagctggacgtccaggatggagtgagctgcacacccctgcaactggccctccgcagccgaaagcagggcatcatgtccttcctagagggcaaggagccgtcagtggccactctgggtggttctaagccaggagccgagatggaaatttagacaacttggccagccgtggtggctcacgtctgtaatcccagcactttgggaggctgaggcaggcagatcacctgatatcaagagtttgaggccagcctggccaacatggcaaaaccctgtctctgctaaaaatacaaaatttagctgggta

SEQ ID NO: 2000 - DNA, 6994 bp, Homo sapiens
  source 1..6994: mol_type = unassigned DNA
tcggttagccgcgaagttcccgccggacgaagggaccagccagcgccctgctagacagcgaggccggaagcggaggcgtggcccctgcgcggccccggaaaccagtgaggccggcgcgcgcccgccggaagccgcgaccccgacgcgccccccattgccctcggcgccggaagtggtcgcgggtcgttctgcttcctgcccgaggggcgtgcgcgggtcaggggcggccgcggaggcggaagcatccatggcggagggcggcagcccagacgggcgggcagggccgggctccgcaggtcgtaatctgaaggagtggctgagggagcaattttgtgatcatccgctggagcactgtgaggacacgaggctccatgatgcagcttacgtcggggacctccagaccctcaggagcctattgcaagaggagagctaccggagccgcatcaacgagaagtctgtctggtgctgtggctggctcccctgcacaccgttgcgaatcgcggccactgcaggccatgggagctgtgtggacttcctcatccggaagggggccgaggtggatctggtggacgtaaaaggacagacggccctgtatgtggctgtggtgaacgggcacctagagagtacccagatccttctcgaagctggcgcggaccccaacggaagccggcaccatcgcagcacccctgtctaccacgcctctcgcgtgggccgggcagacatcctgaaggccctcatcaggtacggggctgatgttgacgtcaaccaccacctgactcctgatgtccagcctcgattctcccggcggctcacctccttggtggtctgccccttgtacatcagcgcagcctaccacaacctccagtgcttccggctgctcctcctggctggcgcgaaccctgacttcaactgcaatggtcctgtcaacacacagggattctacaggggctcccctgggtgcgtcatggatgctgttctgcgccacggctgtgaggcagccttcgtgagcctgctggtagaatttggagccaacctgaatctagtgaagtgggaatcgctgggcccagagtcgagaggaagaagaaaagtggaccctgaggccttgcaggtctttaaagaggccagaagtgttcccagaaccttgctgtgtctgtgccgtgtggctgtgagaagagctcttggcaaacaccggcttcatctgattccttcgctgcctctgccagaccccataaagaagtttctactccatgagtagactccaagtgctgcggttgattccagtgagggagaaagtgatctgcagggaggtggacaccgagccctgagtgctgtgctgctgctggtctcctgatggctgttgctgcagaagatgtcctcgtagactgtcattgctcctcaggtgcctgggccgctgaacagtccttgggtcattgtcagctgagaggcttatactaaagttattattgtttttcccaagttctctgttctggattttcagttgcatattaatgtaacgggccatggggtatgtacatgtaggggctgaggttggaggcctactaatttccctgtagggaagactcccagcacttctggaactgtgcttctctttatttttctacttctcaatttgatggttcgattaaagccttctagtatctcaatgaaaagggagtttcgtaagcaaaatagaggacagaaatgcagttcatgaacttgctggttggtttttcctgctcctggggtaacacatgcgcttgtcatacacgccccttccttgccccttcagtattctctctttgcgatggaggtctcatagtgagtgtcttcactcaagggtggtttcctggctgcacggcacctgttccaacacctactgtgcctctcatcaggtgtcacgatttttctgccacttcaccttagggagcttccagtgattgattttaggaggcccacaccaaactccccaggaaatgactgccttccttgggaccaaggaccgttccaacagcattcactgccagttctaataggcgaggaaaatgcccgaggcgctgtcttctgtcccccacacgtaccagaaagtgaaaaatgcagcgagtcctctgggtggttatgagcctccaggcgcatgctgtccagtggacagaacatctggcggttggttgattgctctcttttgtcttggtcgctgcttctagaatctatgcaggggatagcagtgaggtcagaagtctttcccgggagagagatggcctgggttatcattgctgatagctttggctgcatgagttgggcttccccttacccagggctgcacagccaggtgtgagggtcaccggcaggtgggctggtggctgcagcctcagagccctcccaggttgctgctgtttccagtgaatcacatttcgtcatttgaagcccatgaggaccattgtgtggatccatggtgattctagacttcagatatatttaggaaggcgcagatttcaaatctgtgtttgattttctgtaataagagaaatccaatttgtaaaacttgaacaatgataccgttttatttacttagtagcatcactgtgtgtcttagcaggcaggcagtgtctggccattattgcgttctacagccagaggatagaattctatacccccaaccccttgtgtcacaaatgggctctgtgtgggtcaccccagctgacccgtgtatgtgcagatgcagttccgaagggaagaacagtcctcgggtgattcagaggggaaaatgcaatccgggaggtgtttcctcagctgaggtgacactgttagaagctgtgatggttgtgtaaatgtgggctgtgtgctgttcccgaggggagcttgggattgggtcctgctgaagccaggagggtcttcccaagataggagaggaaccgcaggtggtgagcggctggggagggccaggacagccggggctgggtgctgcaggggcttcagcccgggagagggggtgggcgtgttctttgtggtaccaaagtgggactaggacaaaaattgggctgtggctggggcaggagctatagggagttaaggaatgatgatacggaagttggagccaccaccgtggactgggccttgtcactggaggtcgtaggcagtggctcatcaccctggtagggctgataggggctttcagggaggctggttagctccctgcactctggctctttactggcttactgtttagctcctcccacctcgaggctcttcttcctgccaccctttgggctcagaggagggtggcttttttcgaggtgagccatgttgtagacacatgatacgctctgcgtctgctctactgagtactttctgcaggggcctgttaaggacgaggcctccccagccctgcccggtgcaggaggtggctcagttattgaaccttttgggaagcagcacctgggaatgctgcctcgtgggagtcccatgcgtgagtgtggtggtgtgaccttcaggctgcacagaggcaaggacccagatgtggcagcatgggcgtcatgctcctttgcacagcccagggcctgttttggagggaccaggtcactgcccctggtctctctaggaggagtggactgaatggatcgttgcagagaagactcacccagacctggccagggaatgatgtatctggggagagaatgagctggaggagggggcctctcatggcccttccctggcctgtggcccagcctggctggcctgcaggtgtctagggtctcagcttttcatttgcagaggacatgttcaacttcctctctgttcaagccagcctttgccaattttttcagaatccaaacaatttggaggtttggtatcttgtttcatagctgccaaatatgaatctgaaaacagggtgggtagctaaggtcattcctcctgggttttagtggcattgccttccttcactaaagctcccttttttttctgttggcaaggacaggttacagaataggaagagtagcactttccgcctaagcactttaggaaatcacctttctaagccctggggcgcccaagtcccatgggacagggaaacgtggtcctcagtgaggctgctgcctggctggcccggagtcctccctaggagaggggctcgatgggctgggggaaggagcctgaaggttgcccctggttgcatcccagaagcatctgactgtcaccactgccagtggctgtggaacagtcctgggccctgggccttggctgctgtcaacagatgggctgggctgggctgtggtggggtgggggacaacgttggtaactctgagaattcagctttggagtcccgggtgaggggttttagataaacccatcaatatcacccacattctgtgactctttgcatcactcgtgttatttatttatttatttatattctgccttgttccagaaaagtgtttaaggcaacaatgcttgttttttggtgttttcttttgacatttgaaaatttagtacattgttaaaatgtacttgttaaacaggtaattttaaagagaaggaacaattgtttttagtaagttttctttttcctttttcaatgaattgattcttcaaattaaaagttcttgagagaaggagaggaagatacagcagacataggactgagccaaggaagagtctgcctgagagagacgcttggcctgtgctttgctgccatccgtgcggccttggccacatccctattaacagaggcagctccacttcagacagggacaaggcttcctgctgtgcctttctggcagggttttgtggggtcacatgggaagcaatgtgttacgcaagcagtctccatgtgtgtgtaaactgctgtcctggtgacttgtccctcttcttagtggaaatgcatttgagatggtgacagggctggatgaacgtgtgaccctgggagatccgggctggactgtggaccccgatgggccagagtccttgtggcccacagcatagcactggggacagagcgctctatgcaggtgaggcgtatgagaacagcatggtaaataattgatgaagtcacatttgttcaacttaaaggattgttctttattctgaagttattttcttccttatttggatgataaaatttccttttatgtaatgaaggtaaaagtagagggcaatatttttgctttttgaaatgctcttggttgcaaaacaaaatgttggttgctgtttgtcagccccagaatttcttcttaagttcgcctgtctctgaaatcccaaagtcacggaaccgcagtctagctgtggtgcatgtttacgtattggtgagaaattcctcttgggttcttgaacagcctgtacgctggcaggcagcactgcagcatttctgctgctcatggccaagaacgagtctggagatcgctgcgtgcggttttaggaagtgccaacacccgtggtgatgggcctctggccacccctggatccatgggacacactcacaggaagctgatgtggccttctcggtgaggactgcaccttaacctgggcactgggagcctgtggcccccctgtatgttggtgatgacactagtgtgggtcttctggctctggggctacagcttctgcctcctcacctggccgtcggtactcggcaagcaggcctggcctcccggggcctggatccctaccggctgggattggcctcctggaagtacctgtttgggccatgtgacctcctttctcacttatgcctcactcccctcctcccgctccaaacccgaacctctcagtgtggaatgaacgctccaaacccgaacctctcagtgtggaatgaacgctccaaacccgaacctctcagtgtggaatgaaacagtttagatgtgtacatgatgcacgtgggtgggattcacatcccaggagaattccacggagaggaatgtgcagattttgaagtgtacagtgatgtgtggaataaatactagaaattctcagcagacagtgggatggagaagtgagtgggggcaggagggggatttctgttgccttgacatgtcgttgctcagtgcctggattgcaggcgagtctctcttttttatgttgctttgatttcaagatctcttagatatactaggtagtgtatgaatgtgcataaatccagtttgagaatggtgtttatgaagaagctgtttcgtgtgtacagttgctgctgtaatttagccagcagtgccctgccctgccctgcagtgtctgctcagctcccactgcttctctttgctgttgggcatgtgaggcatgacttggaggggggcctggtgcctggggacctgctgaagagaatgctcaccaccagctctctgtttccctttctgctttggtaatcaacacgtgtttgcctgcagtggccgggaccgtgactgtttctgcccttgtgcctagttaagagccttcaaaagcataatgaacacttttgatatgatattgtaactttagtaaatgctttacttccctctaattgcccccaaatgccttaattttgtggactgtttatttcaacaggtggaagtgttggtcgtgcgaaatcttggtattcgcatttcaagaagggagttcttttttctttcttctttctatggaacgtttcaagtgattggatagaaagaagggctctgaagcaggagttttcacctgctctgagggaacttggggctccagggacgtaccccaaatgttgcccaggttgaaactccctgacagcctgttctacgtagtggctcgtggtttccagtttgaagagagttgtgcccctaaaagtgtttgaaacctgtggctttcaagcaaggtaccgttgtccccacagtgttccgtggggtagggggtgatggagactgtgggcaagcctgttgtttttggccccctgttgttacatgggacctgttttgacggtgggagggtgagatgtgaagatgtgggatgaacctggaatgaacgaattaaataaagacatgcatccatctgtcagcga

SEQ ID NO: 2001 - DNA, 2168 bp, Homo sapiens
  source 1..2168: mol_type = unassigned DNA
agacaactcagaagacactagacaacagcagtcttatctaaagaaataagacctccaaggacgaagcatcagaatgcttcaattaactggggaaaatgagaagaattgtgaagtttcagaacgtatcagaaggtccggaccatggaaagagatttcttttggggattatatttgtcacacatttcagggagattgctgggctgatcgatccccacttcatgaagctgcagctcaggggcgcttactggcccttaaaactttaattgcacaaggtgtcaatgtgaaccttgtgacaattaaccgggtgtcttctctccacgaggcatgccttggaggtcacgtggcctgtgccaaagccttattggaaaatggtgcacacgtcaatggagtgacagttcacggagccacacccctcttcaatgcttgctgcagcggcagtgctgcatgtgtcaatgtgctgctggagttcggagccaaggcccagttggaggtgcacctggcctcgcccatccatgaggcagtgaagagaggtcacagagagtgcatggagatcctgctggcaaataatgttaacattgaccatgaggtgcctcagctcggaactcccctatatgtggcctgcacctaccagagggtagactgtgtgaagaaacttctagaattaggagccagtgtcgaccatggccagtggctggacaccccactccatgctgcagcgaggcagtccaatgtggaggtcatccacctgctaaccgactatggagctaacctgaagcgtagaaatgctcagggcaaaagtgcgcttgatctggcggctccaaaaagcagcgtggagcaggcactcttgctccgtgaaggcccacctgctctttcccagctctgccgcctgtgtgtccggaagtgtctcggtcgagcatgtcatcaagccatccacaagctacatctgccagagccactcgaacgattcctcctataccaatagtcctaagtgttcctgggaagatacttggaatgacacagattgttgtctgctgtacctagagtacctaatgtagaagctcaacagcttagactcctagtatctttaaatgagctcagtcgaagtaaatcccccatgagctagaacacttgaggagtggaaactcctggttagtttaatgttctcattaaccaaggggcaagtagaaaccatttagcttttagctcttgttgttaagaaacttaaaagaactgtgaagtagagtgaaaacaataggctgttttttgatgattcgggatcttcttgtacctaaaagtcaacattctgaatattgtatagacacatataaattcaggtggataagattataacaaatgttaggtattccaagatatgttcttgatttagttccttccttcagcccttccccactttttttctttctttccttgaataaatctggtataattttgattttttgtatatatatacgtatatatatatacatacatatacgtatatatatatacgtatatatatacacacacacacatgcactcatatatttaatgttttcaaagtccttaatatatatagttcatatatgttttcaaagtccttaatatatgtataaagcttatatatatatgttttcaaagttctttatatataaagttatatatatttatatagactttatatatatatacatatataaagttaaggacttcagaaacattgtagttaactgaggcttccagttactgcggtcctggttgataagagagactttggaagagatcagtgcacccagaggttggcatctattgcttattgcttctgatattaaatgctgttatttgaagtaagcagttctaggattgagaacactgggtgtccccaacaacctgaacccacaggcattgtctgaggcatgttgcaacccaagcactggcttattttcaaagtcaagatgctcagggtttttgaaataattacatactgatgccagccaccaaagtgggctcaatgctgggtcaatatttttttctgtggataggggcccaaaataagcacaaaggtatataaaaagaggcttctccttttctgtcttctccttcttctcatttctctctccttctgtcacccctcctcttcctctattctttctcttttttgtgaatttaga

SEQ ID NO: 2002 - DNA, 1484 bp, Homo sapiens
  source 1..1484: mol_type = unassigned DNA
aactcagtgaaattttacagtcctaggaccctatacagagcataagccaaaatggaagatggtcctgttttctatggctttaaaaacatttttattacaatgtttgctacgttttttttctttaagcttttaattaaagtttttttggctctcctaacccatttctatatcgtcaaaggaaatagaaaagaagcggctaggatagcagaagagatctatggtggaatttcagattgctgggctgatcgatccccacttcatgaagctgcagctcaggggcgcttactggcccttaaaactttaattgcacaaggtgtcaatgtgaaccttgtgacaattaaccgggtgtcttctctccacgaggcatgccttggaggtcacgtggcctgtgccaaagccttattggaaaatggtgcacacgtcaatggagtgacagttcacggagccacacccctcttcaatgcttgctgcagcggcagtgctgcatgtgtcaatgtgctgctggagttcggagccaaggcccagttggaggtgcacctggcctcgcccatccatgaggcagtgaagagaggtcacagagagtgcatggagatcctgctggcaaataatgttaacattgaccatgaggtgcctcagctcggaactcccctatatgtggcctgcacctaccagagggtagactgtgtgaagaaacttctagaattaggagccagtgtcgaccatggccagtggctggacaccccactccatgctgcagcgaggcagtccaatgtggaggtcatccacctgctaaccgactatggagctaacctgaagcgtagaaatgctcagggcaaaagtgcgcttgatctggcggctccaaaaagcagcgtggagcaggcactcttgctccgtgaaggcccacctgctctttcccagctctgccgcctgtgtgtccggaagtgtctcggtcgagcatgtcatcaagccatccacaagctacatctgccagagccactcgaacgattcctcctataccaatagtcctaagtgttcctgggaagatacttggaatgacacagattgttgtctgctgtacctagagtacctaatgtagaagctcaacagcttagactcctagtatctttaaatgagctcagtcgaagtaaatcccccatgagctagaacacttgaggagtggaaactcctggttagtttaatgttctcattaaccaaggggcaagtagaaaccatttagcttttagctcttgttgttaagaaacttaaaagaactgtgaagtagagtgaaaacaataggctgttttttgatgattcgggatcttcttgtacctaaaagtcaacattctgaatattgtatagacacatataaattcaggtggataagattataacaaatgttaggtattccaagatatgttcttgatttagttccttccttcagcccttccccactttttttctttctttccttgaataaatctggt

SEQ ID NO: 2003 - DNA, 2866 bp, Homo sapiens
  source 1..2866: mol_type = unassigned DNA
agacaactcagaagacactagacaacagcagtcttatctaaagaaataagacctccaaggacgaagcatcagaatgcttcaattaactggggaaaatgagaagaattgtgaagtttcagaacgtatcagaaggtccggaccatggaaagagatttcttttggggattatatttgtcacacatttcagggagattgctgggctgatcgatccccacttcatgaagctgcagctcaggggcgcttactggcccttaaaactttaattgcacaaggtgtcaatgtgaaccttgtgacaattaaccgggtgtcttctctccacgaggcatgccttggaggtcacgtggcctgtgccaaagccttattggaaaatggtgcacacgtcaatggagtgacagttcacggagccacacccctcttcaatgcttgctgcagcggcagtgctgcatgtgtcaatgtgctgctggagttcggagccaaggcccagttggaggtgcacctggcctcgcccatccatgaggcagtgaagagaggtcacagagagtgcatggagatcctgctggcaaataatgttaacattgaccatgaggtgcctcagctcggaactcccctatatgtggcctgcacctaccagagggtagactgtgtgaagaaacttctagaattaggagccagtgtcgaccatggccagtggctggacaccccactccatgctgcagcgaggcagtccaatgtggaggtcatccacctgctaaccgactatggagctaacctgaagcgtagaaatgctcagggcaaaagtgcgcttgatctggcggctccaaaaagcagcgtggagcaggcactcttgctccgtgaaggcccacctgctctttcccagctctgccgcctgtgtgtccggaagtgtctcggtcgagcatgtcatcaagccatccacaagctacatctgccagagccactcgaacgattcctcctataccaatagtcctaagtgttcctgggaagatacttggaatgacacagattgttgtctgctgtacctagagtacctaatgtagaagctcaacagcttagactcctagtatctttaaatgagctcagtcgaagtaaatcccccatgagctagaacacttgaggagtggaaactcctggttagtttaatgttctcattaaccaaggggcaagtagaaaccatttagcttttagctcttgttgttaagaaacttaaaagaactgtgaagtagagtgaaaacaataggctgttttttgatgattcgggatcttcttgtacctaaaagtcaacattctgaatattgtatagacacatataaattcaggtggataagattataacaaatgttaggtattccaagatatgttcttgatttagttccttccttcagcccttccccactttttttctttctttccttgaataaatctggtataattttgattttttgtatatatatacgtatatatatatacatacatatacgtatatatatatacgtatatatatacacacacacacatgcactcatatatttaatgttttcaaagtccttaatatatatagttcatatatgttttcaaagtccttaatatatgtataaagcttatatatatatgttttcaaagttctttatatataaagttatatatatttatatagactttatatatatatacatatataaagttaaggacttcagaaacattgtagttaactgaggcttccagttactgcggtcctggttgataagagagactttggaagagatcagtgcacccagaggttggcatctattgcttattgcttctgatattaaatgctgttatttgaagtaagcagttctaggattgagaacactgggtgtccccaacaacctgaacccacaggcattgtctgaggcatgttgcaacccaagcactggcttattttcaaagtcaagatgctcagggtttttgaaataattacatactgatgccagccaccaaagtgggctcaatgctgggtcaatatttttttctgtggataggggcccaaaataagcacaaaggtatataaaaagaggcttctccttttctgtcttctccttcttctcatttctctctccttctgtcacccctcctcttcctctattctttctcttttttgtgaatttagatcctttgcccattttaaaatcagattatttgttttgttgttgtcaagtatgattcagcaatcccattactggatatttatcagaaagaaaggaaatcaatgtatggaagaggtagttgcacctccatgtttattgtagctctattcagaaaagcaagatatgaaatcaacttaaatgtctgtcaacagatcaatggataaagaaaatgtggtatatatacaaaatgaaatactattcagccttaaaaaagaaggaaattctgtcatttgcagcaacatggatgagcctagaggacattatgttaagtaagtcacgcacagaaagataaacaccatatgttcttgcttacatgtggaagctaaaaaaattgagctcacagaaacagagagtagaattatgcttattagaggctgggaagggtagtgaggaggggacaatagggcaatgttggttaatggatacaaaattataattggatagaagaaataatttctagtgtttcatagcactgtagggtaaatgtggttaacaataatttattatgtattttcgaaaacctagaagagaagattttgaatgttcatagcagaaatgataaatgattgaggtgatggatatgctaatcaccctgatttgattacttctaggtattaaaatatcactctgtaccccataaatatatacagttattacatacc

SEQ ID NO: 2004 - DNA, 2748 bp, Homo sapiens
  source 1..2748: mol_type = unassigned DNA
atacagagcataagccaaaatggaagatggtcctgttttctatggctttaaaaacatttttattacaatgtttgctacgttttttttctttaagcttttaattaaagtttttttggctctcctaacccatttctatatcgtcaaaggaaatagaaaagaagcggctaggatagcagaagagatctatggtggaatttcagattgctgggctgatcgatccccacttcatgaagctgcagctcaggggcgcttactggcccttaaaactttaattgcacaagcatgccttggaggtcacgtggcctgtgccaaagccttattggaaaatggtgcacacgtcaatggagtgacagttcacggagccacacccctcttcaatgcttgctgcagcggcagtgctgcatgtgtcaatgtgctgctggagttcggagccaaggcccagttggaggtgcacctggcctcgcccatccatgaggcagtgaagagaggtcacagagagtgcatggagatcctgctggcaaataatgttaacattgaccatgaggtgcctcagctcggaactcccctatatgtggcctgcacctaccagagggtagactgtgtgaagaaacttctagaattaggagccagtgtcgaccatggccagtggctggacaccccactccatgctgcagcgaggcagtccaatgtggaggtcatccacctgctaaccgactatggagctaacctgaagcgtagaaatgctcagggcaaaagtgcgcttgatctggcggctccaaaaagcagcgtggagcaggcactcttgctccgtgaaggcccacctgctctttcccagctctgccgcctgtgtgtccggaagtgtctcggtcgagcatgtcatcaagccatccacaagctacatctgccagagccactcgaacgattcctcctataccaatagtcctaagtgttcctgggaagatacttggaatgacacagattgttgtctgctgtacctagagtacctaatgtagaagctcaacagcttagactcctagtatctttaaatgagctcagtcgaagtaaatcccccatgagctagaacacttgaggagtggaaactcctggttagtttaatgttctcattaaccaaggggcaagtagaaaccatttagcttttagctcttgttgttaagaaacttaaaagaactgtgaagtagagtgaaaacaataggctgttttttgatgattcgggatcttcttgtacctaaaagtcaacattctgaatattgtatagacacatataaattcaggtggataagattataacaaatgttaggtattccaagatatgttcttgatttagttccttccttcagcccttccccactttttttctttctttccttgaataaatctggtataattttgattttttgtatatatatacgtatatatatatacatacatatacgtatatatatatacgtatatatatacacacacacacatgcactcatatatttaatgttttcaaagtccttaatatatatagttcatatatgttttcaaagtccttaatatatgtataaagcttatatatatatgttttcaaagttctttatatataaagttatatatatttatatagactttatatatatatacatatataaagttaaggacttcagaaacattgtagttaactgaggcttccagttactgcggtcctggttgataagagagactttggaagagatcagtgcacccagaggttggcatctattgcttattgcttctgatattaaatgctgttatttgaagtaagcagttctaggattgagaacactgggtgtccccaacaacctgaacccacaggcattgtctgaggcatgttgcaacccaagcactggcttattttcaaagtcaagatgctcagggtttttgaaataattacatactgatgccagccaccaaagtgggctcaatgctgggtcaatatttttttctgtggataggggcccaaaataagcacaaaggtatataaaaagaggcttctccttttctgtcttctccttcttctcatttctctctccttctgtcacccctcctcttcctctattctttctcttttttgtgaatttagaacatgggaactggatagacttttaattattgtaagtattactgtcatggttcagtattcagttctaaaatgaaaattccctctcagatcatcctaagactcatttcacacatgtttttttttcccccaatttttctagacctttggctctcaactggagacaattttgccccactcccactgagacatttgtcaatgtctgcagacatgtttagttgcaacaactgggggagaattgctactatcatctagacggtggagatcagggatgcagctaatcaccctacagtgcacaggagccagcaacaaagaattatcagatctggccgggcatggtggctcacgcctgtaatcccagcattttgggaggccgaggcaggcagatcgcactgtcaggagttcgagaaccgcctggccactatggtgaaaccctgtctctactaaaaatacaaaagttagccaggcgtggtggcaggtgcctatagtcccagctacttgggaggctgaggcaggagaatcacttgaacccgggaggcggagattgcagtaagccaagatcacgccactgcactccagcctgggtgacagagcgagactccgtctcaaaacaaaaaaaaaaaaaa

SEQ ID NO: 2005 - DNA, 2743 bp, Homo sapiens
  source 1..2743: mol_type = unassigned DNA
aggttactatagtgtctgctcctacccctgggacaagatcccctaatgagctggcaggtgggcgtggggggcacaggtacagcttggcttctcagctttgctcccctatcctctgctttgccatgaatctctcatccagccccgcagggatctgcctggccagcagtgagcctgagcccctttcatcctgggacctgccgaccacggctcacatcctcctgggtgaagaatgtcaccttgcttcctatctgcctctttcgtggttggctggggagggggaccggggggtggggtgaggttaacctcattgttgtcttatatggtcatttaaatctcccagggcttcctccaagggccaaaaataatccggagacacagcagctgtgtccagcacacagaggacccggccatctgctttggttcagagccctgtgtctgtcagtcagtctctccctggctctccctccatcctcattcctgcctgaagccatgacccgcttctcctatgcagagtacttttccctctttcactcctgctctgcaccctccaggtccactgcacctcctgagagttcgccggcccgggccccaatgggcttgttccaaggggtcatgcagaaatacagcagcagcttgttcaagacctcccagctggcgcctgcggaccccttgataaaggccatcaaggatggcgatgaagaggccttgaagaccatgatcaaggaagggaagaatctcgcagagcccaacaaggagggctggctgccgctgcacgaggccgcatactatggccaggtgggctgcctgaaagtcctgcagcgagcgtacccagggaccatcgaccagcgcaccctgcaggaggaaacagccgtttacttggcaacgtgcaggggccacctggactgtctcctgtcactgctccaagcaggggcagagccggacatctccaacaaatcccgagagacaccgctctacaaagcctgcgagcgcaagaacgcggaggccgtgaagattctggtgcagcacaatgcagacaccaaccaccgctgcaaccgcggctggaccgctctgcacgagtctgtgtctcgcaatgacctggaggtcatgcagatcctggtgagcggaggagccaaggtggaatccaagaacgcctacggcatcacccccttgttcgtggccgcccagagtggacagttggaggccttgaggttcttagccaagtacggtgctgacatcaacacgcaggccagcgacaacgcgtctgccctctacgaggcctgcaagaatgagcatgaggaggtggtggagtttctgctgtcacagggtgccgacgccaacaagaccaacaaggacggcttgctcccgctgcacatcgcctccaagaagggcaactacaggatcgtgcagatgctgctgccggtgaccagccgcacgcgcatacgccgtagcggcgtcagtccgctgcacctggcggccgagcgcaaccacgacgaggtgctggaggcgctgctgagcgcgcgcttcgacgtgaacacgccgctggcccccgagcgcgcgcgcctctacgaagaccggcgcagctccgcgctgtacttcgcggtggtcaacaacaacgtgtacgccaccgagctgctgctgcaacacggcgccgaccccaaccgcgacgtcatcagccccttgctcgtggccatccgccacggctgcctgcgcacaatgcagctgctgctggaccacggcgcgaacatcgacgcctatatcgccacgcaccccaccgccttccccgccaccatcatgttcgccatgaagtgcctgtcgctgctcaagttcctcatggacctgggctgcgacggcgagccctgcttctcatgcctctacggcaacggcccgcacccgccggccccgcagccctccagcaggttcaacgacgcgcccgcggccgacaaggagcccagcgtggtgcagttctgtgagttcgtatctgccccagaggtgagccgctgggcggggcccatcatcgatgtcctcctggactacgtgggcaacgtgcagctctgctcgcggctgaaggaacacatcgacagctttgaggactgggccgtcatcaaggagaaggcagaacctccaagacctctggctcacctttgccgactgcgggttcgaaaggccattgggaaataccgtataaaactcctagacaccttgccgctcccaggcaggctgattagatacctgaaatacgagaacacccagtaactggggccacggggagagaggagtagcccctcagactcttcttactaagtctcaggacgtcggtgttcccaactccaaggggacctggtgacagacgaggctgcaggctgcctccctctcagcctggacagctaccaggatctcactgggtctcagggcccagagctttggccagagcagagaacagaatgtgtcaaggagaagaatcatttgtttacaaactgatgagcagatcccagaccttctctaccttcaggaatggcagaaacctctattcctggggccagggcagagcttgaggtgttctggggaaggtggtgctcagagccttccctgtgcccctccacttgttctggaaaactcaccacttgacttcagagctttctctccaaagactaagatgaagacgtggcccaaggtagggggtagggggagcctgggtcttggagggctttgttaagtattaatataataaatgttacacatgtga

SEQ ID NO: 2006 - DNA, 2729 bp, Homo sapiens
  source 1..2729: mol_type = unassigned DNA
attcgatgcacccggaggaacggaaggcaggattgcagcttcctcagtgcaacctccaaacaggaaatctgagatgtataacatcttatagtttggcttgtcaacgttggtcatgcggtggccccaaaataaactccctgcttcaaaggacagcgtttcagaactgcctggcagagcagccagaagcttggggccagggcagaaggaaaactcggggagcatgttctgaattaagacactttcaagaaaatcctttgtattacccctgaattgtacccttgtttcagagcctaacagggttttctgatttgctgttccctcctccccactgggtgtctgttctggaggccagggtgagaggtggaggaggagtacagcctgtacagcagcctgagcgaggatgaactggtgcagatggccatcgagcagagcctagcggacaagacaaggggcccaaccactgctgaggccaccgcgtctgcatgtaccaaccgccaacctgcccatttctacccatggaccaggtccactgcacctcctgagagttcgccggcccgggccccaatgggcttgttccaaggggtcatgcagaaatacagcagcagcttgttcaagacctcccagctggcgcctgcggaccccttgataaaggccatcaaggatggcgatgaagaggccttgaagaccatgatcaaggaagggaagaatctcgcagagcccaacaaggagggctggctgccgctgcacgaggccgcatactatggccaggtgggctgcctgaaagtcctgcagcgagcgtacccagggaccatcgaccagcgcaccctgcaggaggaaacagccgtttacttggcaacgtgcaggggccacctggactgtctcctgtcactgctccaagcaggggcagagccggacatctccaacaaatcccgagagacaccgctctacaaagcctgcgagcgcaagaacgcggaggccgtgaagattctggtgcagcacaatgcagacaccaaccaccgctgcaaccgcggctggaccgctctgcacgagtctgtgtctcgcaatgacctggaggtcatgcagatcctggtgagcggaggagccaaggtggaatccaagaacgcctacggcatcacccccttgttcgtggccgcccagagtggacagttggaggccttgaggttcttagccaagtacggtgctgacatcaacacgcaggccagcgacaacgcgtctgccctctacgaggcctgcaagaatgagcatgaggaggtggtggagtttctgctgtcacagggtgccgacgccaacaagaccaacaaggacggcttgctcccgctgcacatcgcctccaagaagggcaactacaggatcgtgcagatgctgctgccggtgaccagccgcacgcgcatacgccgtagcggcgtcagtccgctgcacctggcggccgagcgcaaccacgacgaggtgctggaggcgctgctgagcgcgcgcttcgacgtgaacacgccgctggcccccgagcgcgcgcgcctctacgaagaccggcgcagctccgcgctgtacttcgcggtggtcaacaacaacgtgtacgccaccgagctgctgctgcaacacggcgccgaccccaaccgcgacgtcatcagccccttgctcgtggccatccgccacggctgcctgcgcacaatgcagctgctgctggaccacggcgcgaacatcgacgcctatatcgccacgcaccccaccgccttccccgccaccatcatgttcgccatgaagtgcctgtcgctgctcaagttcctcatggacctgggctgcgacggcgagccctgcttctcatgcctctacggcaacggcccgcacccgccggccccgcagccctccagcaggttcaacgacgcgcccgcggccgacaaggagcccagcgtggtgcagttctgtgagttcgtatctgccccagaggtgagccgctgggcggggcccatcatcgatgtcctcctggactacgtgggcaacgtgcagctctgctcgcggctgaaggaacacatcgacagctttgaggactgggccgtcatcaaggagaaggcagaacctccaagacctctggctcacctttgccgactgcgggttcgaaaggccattgggaaataccgtataaaactcctagacaccttgccgctcccaggcaggctgattagatacctgaaatacgagaacacccagtaactggggccacggggagagaggagtagcccctcagactcttcttactaagtctcaggacgtcggtgttcccaactccaaggggacctggtgacagacgaggctgcaggctgcctccctctcagcctggacagctaccaggatctcactgggtctcagggcccagagctttggccagagcagagaacagaatgtgtcaaggagaagaatcatttgtttacaaactgatgagcagatcccagaccttctctaccttcaggaatggcagaaacctctattcctggggccagggcagagcttgaggtgttctggggaaggtggtgctcagagccttccctgtgcccctccacttgttctggaaaactcaccacttgacttcagagctttctctccaaagactaagatgaagacgtggcccaaggtagggggtagggggagcctgggtcttggagggctttgttaagtattaatataataaatgttacacatgtgacacctgcccagtg

SEQ ID NO: 2007 - DNA, 1959 bp, Homo sapiens
  source 1..1959: mol_type = unassigned DNA
agctggggtccctttggagacactccaggaaaaggggggcacatacccccactgggcttttcctgatgctgacaggggctgctctggctgttcctaagtggaactcgtcaaggtggcagtgacggtgctgatggggacctcaggacttatctgatcagtttcccatcgtccttgctgggtctgttgcttcaccggcatctgtgctctgacaccattaataaccacagagtctgagagtcaggaggaagtgctgctcacgctggaggaagtggctgggagagtgcaggggctggtggcagagaccgcccagagcccatcctagcccaacatggcgtgggtgtcctgggaatgaggcctgcctccagcctcaccttctccatctgggaaatgggactattgatgcagaagcctccccaaaagtggatctgagaggcatagacatcgtggttctcacggactctccaaggatgaggcctgcggaccccttgataaaggccatcaaggatggcgatgaagaggccttgaagaccatgatcaaggaagggaagaatctcgcagagcccaacaaggagggctggctgccgctgcacgaggccgcatactatggccaggtgggctgcctgaaagtcctgcagcgagcgtacccagggaccatcgaccagcgcaccctgcaggaggaaacagccgtttacttggcaacgtgcaggggccacctggactgtctcctgtcactgctccaagcaggggcagagccggacatctccaacaaatcccgagagacaccgctctacaaagcctgcgagcgcaagaacgcggaggccgtgaagattctggtgcagcacaatgcagacaccaaccaccgctgcaaccgcggctggaccgctctgcacgagtctgtgtctcgcaatgacctggaggtcatgcagatcctggtgagcggaggagccaaggtggaatccaagaacgcctacggcatcacccccttgttcgtggccgcccagagtggacagttggaggccttgaggttcttagccaagtacggtgctgacatcaacacgcaggccagcgacaacgcgtctgccctctacgaggcctgcaagaatgagcatgaggaggtggtggagtttctgctgtcacagggtgccgacgccaacaagaccaacaaggacggcttgctcccgctgcacatcgcctccaagaagggcaactacaggatcgtgcagatgctgctgccggtgaccagccgcacgcgcatacgccgtagcggcgtcagtccgctgcacctggcggccgagcgcaaccacgacgaggtgctggaggcgctgctgagcgcgcgcttcgacgtgaacacgccgctggcccccgagcgcgcgcgcctctacgaagaccggcgcagctccgcgctgtacttcgcggtggtcaacaacaacgtgtacgccaccgagctgctgctgcaacacggcgccgaccccaaccgcgacgtcatcagccccttgctcgtggccatccgccacggctgcctgcgcacaatgcagctgctgctggaccacggcgcgaacatcgacgcctatatcgccacgcaccccaccgccttccccgccaccatcatgttcgccatgaagtgcctgtcgctgctcaagttcctcatggacctgggctgcgacggcgagccctgcttctcatgcctctacggcaacggcccgcacccgccggccccgcagccctccagcaggttcaacgacgcgcccgcggccgacaaggagcccagcgtggtgcagttctgtgagttcgtatctgccccagaggtgagccgctgggcggggcccatcatcgatgtcctcctggactacgtgggcaacgtgcagctctgctcgcggctgaaggaacacatcgacagctttgaggactgggtcttggagggctttgttaagtattaatataataaatgttacacatgtg

SEQ ID NO: 2008 - DNA, 2842 bp, Homo sapiens
  source 1..2842: mol_type = unassigned DNA
acaaatgatgacatcacgtgagggccaaagctccgggatcctctctgaagtgagagtctgtattcgatgcacccggaggaacggaaggcaggattgcagcttcctcagtgcaacctccaaacaggaaatctgagatgtataacatcttatagtttggcttgtcaacgttggtcatgcggtggccccaaaataaactccctgcttcaaaggacagcgtttcagaactgcctggcagagcagccagaagcttggggccagggcagaaggaaaactcggggagcatgttctgaattaagacactttcaagaaaatcctttgtattacccctgaattgtacccttgtttcagagcctaacagggttttctgatttgctgttccctcctccccactgggtgtctgttctggaggccagggtgagaggtggaggaggatggccacgcagatcagcactcggggcagccagtgtaccattgggcaggaggagtacagcctgtacagcagcctgagcgaggatgaactggtgcagatggccatcgagcagagcctagcggacaagacaaggggcccaaccactgctgaggccaccgcgtctgcatgtaccaaccgccaacctgcccatttctacccatggaccaggtccactgcacctcctgagagttcgccggcccgggccccaatgggcttgttccaaggggtcatgcagaaatacagcagcagcttgttcaagacctcccagctggcgcctgcggaccccttgataaaggccatcaaggatggcgatgaagaggccttgaagaccatgatcaaggaagggaagaatctcgcagagcccaacaaggagggctggctgccgctgcacgaggccgcatactatggccaggtgggctgcctgaaagtcctgcagcgagcgtacccagggaccatcgaccagcgcaccctgcaggaggaaacagccgtttacttggcaacgtgcaggggccacctggactgtctcctgtcactgctccaagcaggggcagagccggacatctccaacaaatcccgagagacaccgctctacaaagcctgcgagcgcaagaacgcggaggccgtgaagattctggtgcagcacaatgcagacaccaaccaccgctgcaaccgcggctggaccgctctgcacgagtctgtgtctcgcaatgacctggaggtcatgcagatcctggtgagcggaggagccaaggtggaatccaagaacgcctacggcatcacccccttgttcgtggccgcccagagtggacagttggaggccttgaggttcttagccaagtacggtgctgacatcaacacgcaggccagcgacaacgcgtctgccctctacgaggcctgcaagaatgagcatgaggaggtggtggagtttctgctgtcacagggtgccgacgccaacaagaccaacaaggacggcttgctcccgctgcacatcgcctccaagaagggcaactacaggatcgtgcagatgctgctgccggtgaccagccgcacgcgcatacgccgtagcggcgtcagtccgctgcacctggcggccgagcgcaaccacgacgaggtgctggaggcgctgctgagcgcgcgcttcgacgtgaacacgccgctggcccccgagcgcgcgcgcctctacgaagaccggcgcagctccgcgctgtacttcgcggtggtcaacaacaacgtgtacgccaccgagctgctgctgcaacacggcgccgaccccaaccgcgacgtcatcagccccttgctcgtggccatccgccacggctgcctgcgcacaatgcagctgctgctggaccacggcgcgaacatcgacgcctatatcgccacgcaccccaccgccttccccgccaccatcatgttcgccatgaagtgcctgtcgctgctcaagttcctcatggacctgggctgcgacggcgagccctgcttctcatgcctctacggcaacggcccgcacccgccggccccgcagccctccagcaggttcaacgacgcgcccgcggccgacaaggagcccagcgtggtgcagttctgtgagttcgtatctgccccagaggtgagccgctgggcggggcccatcatcgatgtcctcctggactacgtgggcaacgtgcagctctgctcgcggctgaaggaacacatcgacagctttgaggactgggccgtcatcaaggagaaggcagaacctccaagacctctggctcacctttgccgactgcgggttcgaaaggccattgggaaataccgtataaaactcctagacaccttgccgctcccaggcaggctgattagatacctgaaatacgagaacacccagtaactggggccacggggagagaggagtagcccctcagactcttcttactaagtctcaggacgtcggtgttcccaactccaaggggacctggtgacagacgaggctgcaggctgcctccctctcagcctggacagctaccaggatctcactgggtctcagggcccagagctttggccagagcagagaacagaatgtgtcaaggagaagaatcatttgtttacaaactgatgagcagatcccagaccttctctaccttcaggaatggcagaaacctctattcctggggccagggcagagcttgaggtgttctggggaaggtggtgctcagagccttccctgtgcccctccacttgttctggaaaactcaccacttgacttcagagctttctctccaaagactaagatgaagacgtggcccaaggtagggggtagggggagcctgggtcttggagggctttgttaagtattaatataataaatgttacacatgtgacacctgcccagtg

SEQ ID NO: 2009 - DNA, 2043 bp, Homo sapiens
  source 1..2043: mol_type = unassigned DNA
gtctctcgttttcggacggctgcagcatcgcggtggggatcgaaagcgggggcttctgggacgcagctctggagacgcggcctcggaccagccatttcggtgtagaagtggcagcacggcagactggtcaaacaaatggattttacagaggcttacgcggacacgtgctctacagttggacttgctgccagggaaggcaatgttaaagtcttaaggaaactgctcaaaaagggccgaagtgtcgatgttgctgataacaggggatggatgccaattcatgaagcagcttatcacaactctgtagaatgtttgcaaatgttaattaatgcagattcatctgaaaactacattaagatgaagacctttgaaggtttctgtgctttgcatctcgctgcaagtcaaggacattggaaaatcgtacagattcttttagaagctggggcagatcctaatgcaactactttagaagaaacgacaccattgtttttagctgttgaaaatggacagatagatgtgttaaggctgttgcttcaacacggagcaaatgttaatggatcccattctatgtgtggatggaactccttgcaccaggcttcttttcaggaaaatgctgagatcataaaattgcttcttagaaaaggagcaaacaaggaatgccaggatgactttggaatcacacctttatttgtggctgctcagtatggcaagctagaaagcttgagcatacttatttcatcgggtgcaaatgtcaattgtcaagccttggacaaagctacacccttgttcattgctgctcaagagggacacacaaaatgtgtggagcttttgctctccagtggggcagatcctgatctttactgtaatgaggacagttggcagttacctattcatgcagctgcacaaatgggccatacaaaaatcttggacttgttaataccacttactaaccgggcctgtgacactgggctaaacaaagtaagccctgtttactcagcagtgtttgggggacatgaagattgcctagaaatattactccggaatggctacagcccagacgcccaggcgtgccttgtttttggattcagttctcctgtgtgcatggctttccaaaaggactgtgagttctttggaattgtgaacattcttttgaaatatggagcccagataaatgaacttcatttggcatactgcctgaagtacgagaagttttcgatatttcgctactttttgaggaaaggttgctcattgggaccatggaaccatatatatgaatttgtaaatcatgcaattaaagcacaagcaaaatataaggagtggttgccacatcttctggttgctggatttgacccactgattctactgtgcaattcttggattgactcagtcagcattgacacccttatcttcactttggagtttactaattggaagacacttgcaccagctgttgaaaggatgctctctgctcgtgcctcaaacgcttggattctacagcaacatattgccactgttccatccctgacccatctttgtcgtttggaaattcggtccagtctaaaatcagaacgtctacggtctgacagttatattagtcagctgccacttcccagaagcctacataattatttgctctatgaagacgttctgaggatgtatgaagttccagaactggcagctattcaagatggataaatcagtgaaactacttaacacagctaatttttttctctgaaaaatcatcgagacaaaagagccacagagtacaagtttttatgattttatagtcaaaagatgattattgattgtgagataggttaggttttggggggccagtagttcagtgagaatgtttatgtttacaactagccttcccagtaaaaaaaaaaaaaaaaaaaaaaaaaattgtaaacatcacttatattactttattgcagcttcatcaccagtacattatatgttgtaatatttatttacctgatcattttgatcattttctgctttattttgctaataaactgtgatgttacttctagtgctaaacat

SEQ ID NO: 2010 - DNA, 1960 bp, Homo sapiens
  source 1..1960: mol_type = unassigned DNA
aggcccgggtgtccggcggagggggcggtgccctcggcgtctccgtgactgcgcctctgcgcccgcgtcttgccgcggctcccgggatgcgcggaggcggtggcgatggcgatgatgcctctagtcctgcatcatccagagcggcaggcggagctggggtccggactgcgagatggaggaggggcggcgctgcggccacccggcagactggtcaaacaaatggattttacagaggcttacgcggacacgtgctctacagttggacttgctgccagggaaggcaatgttaaagtcttaaggaaactgctcaaaaagggccgaagtgtcgatgttgctgataacaggggatggatgccaattcatgaagcagcttatcacaactctgtagaatgtttgcaaatgttaattaatgcagattcatctgaaaactacattaagatgaagacctttgaaggtttctgtgctttgcatctcgctgcaagtcaaggacattggaaaatcgtacagattcttttagaagctggggcagatcctaatgcaactactttagaagaaacgacaccattgtttttagctgttgaaaatggacagatagatgtgttaaggctgttgcttcaacacggagcaaatgttaatggatcccattctatgtgtggatggaactccttgcaccaggcttcttttcaggaaaatgctgagatcataaaattgcttcttagaaaaggagcaaacaaggaatgccaggatgactttggaatcacacctttatttgtggctgctcagtatggcaagctagaaagcttgagcatacttatttcatcgggtgcaaatgtcaattgtcaagccttggacaaagctacacccttgttcattgctgctcaagagggacacacaaaatgtgtggagcttttgctctccagtggggcagatcctgatctttactgtaatgaggacagttggcagttacctattcatgcagctgcacaaatgggccatacaaaaatcttggacttgttaataccacttactaaccgggcctgtgacactgggctaaacaaagtaagccctgtttactcagcagtgtttgggggacatgaagattgcctagaaatattactccggaatggctacagcccagacgcccaggcgtgccttgtttttggattcagttctcctgtgtgcatggctttccaaaaggactgtgagttctttggaattgtgaacattcttttgaaatatggagcccagataaatgaacttcatttggcatactgcctgaagtacgagaagttttcgatatttcgctactttttgaggaaaggttgctcattgggaccatggaaccatatatatgaatttgtaaatcatgcaattaaagcacaagcaaaatataaggagtggttgccacatcttctggttgctggatttgacccactgattctactgtgcaattcttggattgactcagtcagcattgacacccttatcttcactttggagtttactaattggaagacacttgcaccagctgttgaaaggatgctctctgctcgtgcctcaaacgcttggattctacagcaacatattgccactgttccatccctgacccatctttgtcgtttggaaattcggtccagtctaaaatcagaacgtctacggtctgacagttatattagtcagctgccacttcccagaagcctacataattatttgctctatgaagacgttctgaggatgtatgaagttccagaactggcagctattcaagatggataaatcagtgaaactacttaacacagctaatttttttctctgaaaaatcatcgagacaaaagagccacagagtacaagtttttatgattttatagtcaaaagatgattattgattgtgagataggttaggttttggggggccagtagttcagtgagaatgtttatgtttacaactagccttcccagt

SEQ ID NO: 2011 - DNA, 1734 bp, Homo sapiens
  source 1..1734: mol_type = unassigned DNA
agacgacatatcaacatccgggggtcgcggagccgtccgcctacgggggccgggacgtcgcctgcgcgtctctcgttttcggacggctgcagcatcgcggtggggatcgaaagcgggggcttctgggacgcagctctggagacgcggcctcggaccagccatttcggtgtagaagtggcagcacggcagattcatctgaaaactacattaagatgaagacctttgaaggtttctgtgctttgcatctcgctgcaagtcaaggacattggaaaatcgtacagattcttttagaagctggggcagatcctaatgcaactactttagaagaaacgacaccattgtttttagctgttgaaaatggacagatagatgtgttaaggctgttgcttcaacacggagcaaatgttaatggatcccattctatgtgtggatggaactccttgcaccaggcttcttttcaggaaaatgctgagatcataaaattgcttcttagaaaaggagcaaacaaggaatgccaggatgactttggaatcacacctttatttgtggctgctcagtatggcaagctagaaagcttgagcatacttatttcatcgggtgcaaatgtcaattgtcaagccttggacaaagctacacccttgttcattgctgctcaagagggacacacaaaatgtgtggagcttttgctctccagtggggcagatcctgatctttactgtaatgaggacagttggcagttacctattcatgcagctgcacaaatgggccatacaaaaatcttggacttgttaataccacttactaaccgggcctgtgacactgggctaaacaaagtaagccctgtttactcagcagtgtttgggggacatgaagattgcctagaaatattactccggaatggctacagcccagacgcccaggcgtgccttgtttttggattcagttctcctgtgtgcatggctttccaaaaggactgtgagttctttggaattgtgaacattcttttgaaatatggagcccagataaatgaacttcatttggcatactgcctgaagtacgagaagttttcgatatttcgctactttttgaggaaaggttgctcattgggaccatggaaccatatatatgaatttgtaaatcatgcaattaaagcacaagcaaaatataaggagtggttgccacatcttctggttgctggatttgacccactgattctactgtgcaattcttggattgactcagtcagcattgacacccttatcttcactttggagtttactaattggaagacacttgcaccagctgttgaaaggatgctctctgctcgtgcctcaaacgcttggattctacagcaacatattgccactgttccatccctgacccatctttgtcgtttggaaattcggtccagtctaaaatcagaacgtctacggtctgacagttatattagtcagctgccacttcccagaagcctacataattatttgctctatgaagacgttctgaggatgtatgaagttccagaactggcagctattcaagatggataaatcagtgaaactacttaacacagctaatttttttctctgaaaaatcatcgagacaaaagagccacagagtacaagtttttatgattttatagtcaaaagatgattattgattgtgagataggttaggttttggggggccagtagttcagtgagaatgtttatgtttacaactagccttcccagt

SEQ ID NO: 2012 - DNA, 2113 bp, Homo sapiens
  source 1..2113: mol_type = unassigned DNA
aaaactgcgagcctgaaaaacctggctcaagcgcccctcgtgaggcgggcagcgggagtggccgggctctgggccccaggaggcaggcgacggaggcgcggagggtgcggggcgcaggcgggacgccaggcccgggtgtccggcggagggggcggtgccctcggcgtctccgtgactgcgcctctgcgcccgcgtcttgccgcggctcccgggatgcgcggaggcggtggcgatggcgatgatgcctctagtcctgcatcatccagagcggcaggcggagctggggtccggactgcgagatggaggaggggcggcgctgcggccacccggcagactggtcaaacaaatggattttacagaggcttacgcggacacgtgctctacagttggacttgctgccagggaaggcaatgttaaagtcttaaggaaactgctcaaaaagggccgaagtgtcgatgttgctgataacaggggatggatgccaattcatgaagcagcttatcacaactctgtagaatgtttgcaaatgttaattaatgcagattcatctgaaaactacattaagatgaagacctttgaaggtttctgtgctttgcatctcgctgcaagtcaaggacattggaaaatcgtacagattcttttagaagctggggcagatcctaatgcaactactttagaagaaacgacaccattgtttttagctgttgaaaatggacagatagatgtgttaaggctgttgcttcaacacggagcaaatgttaatggatcccattctatgtgtggatggaactccttgcaccaggcttcttttcaggaaaatgctgagatcataaaattgcttcttagaaaaggagcaaacaaggaatgccaggatgactttggaatcacacctttatttgtggctgctcagtatggcaagctagaaagcttgagcatacttatttcatcgggtgcaaatgtcaattgtcaagccttggacaaagctacacccttgttcattgctgctcaagagggacacacaaaatgtgtggagcttttgctctccagtggggcagatcctgatctttactgtaatgaggacagttggcagttacctattcatgcagctgcacaaatgggccatacaaaaatcttggacttgttaataccacttactaaccgggcctgtgacactgggctaaacaaagtaagccctgtttactcagcagtgtttgggggacatgaagattgcctagaaatattactccggaatggctacagcccagacgcccaggcgtgccttgtttttggattcagttctcctgtgtgcatggctttccaaaaggactgtgagttctttggaattgtgaacattcttttgaaatatggagcccagataaatgaacttcatttggcatactgcctgaagtacgagaagttttcgatatttcgctactttttgaggaaaggttgctcattgggaccatggaaccatatatatgaatttgtaaatcatgcaattaaagcacaagcaaaatataaggagtggttgccacatcttctggttgctggatttgacccactgattctactgtgcaattcttggattgactcagtcagcattgacacccttatcttcactttggagtttactaattggaagacacttgcaccagctgttgaaaggatgctctctgctcgtgcctcaaacgcttggattctacagcaacatattgccactgttccatccctgacccatctttgtcgtttggaaattcggtccagtctaaaatcagaacgtctacggtctgacagttatattagtcagctgccacttcccagaagcctacataattatttgctctatgaagacgttctgaggatgtatgaagttccagaactggcagctattcaagatggataaatcagtgaaactacttaacacagctaatttttttctctgaaaaatcatcgagacaaaagagccacagagtacaagtttttatgattttatagtcaaaagatgattattgattgtgagataggttaggttttggggggccagtagttcagtgagaatgtttatgtttacaactagccttcccagtaaaaaaaaaaaaaaaaaaaaaaaaaa

SEQ ID NO: 2013 - DNA, 2205 bp, Homo sapiens
  source 1..2205: mol_type = unassigned DNA
gcgtctctcgttttcggacggctgcagcatcgcggtggggatcgaaagcgggggcttctgggacgcagctctggagacgcggcctcggaccagccatttcggtgtagaagtggcagcacggcaggtcggtgagtctcggaggcggcagccgcttcctgaagccattcccgctgctctccagtgggcaggcagaggtttgacccacacggagtgatagcgggaagaagacagtgtgaaccgtgcgggtgcgggtccttagatgagaaaattcgaagtagcgatgagatgtgagaaatggcggtgttcctgactgacctgccttcttgcagcttttcttctttttctccgcatttggcatttgtacacttcatttttcccgcttgaggcttatctccatctcttctgctgtggaccgtggccatctcgttacttaacagcttctgactaacgcagggcagtttgttcagcgactgcaactctgtgttaggggaaacctggggtgaggtagcccgccatctccccgtaggtgaataccgcaagcctccgaatttggcgtggtgggcgactctcgtggaatgggcagctagacatcacaaccctacatttttaccctccatctctagattgaagtgttggggtgttgttttatcaaggaagctgattcatctgaaaactacattaagatgaagacctttgaaggtttctgtgctttgcatctcgctgcaagtcaaggacattggaaaatcgtacagattcttttagaagctggggcagatcctaatgcaactactttagaagaaacgacaccattgtttttagctgttgaaaatggacagatagatgtgttaaggctgttgcttcaacacggagcaaatgttaatggatcccattctatgtgtggatggaactccttgcaccaggcttcttttcaggaaaatgctgagatcataaaattgcttcttagaaaaggagcaaacaaggaatgccaggatgactttggaatcacacctttatttgtggctgctcagtatggcaagctagaaagcttgagcatacttatttcatcgggtgcaaatgtcaattgtcaagccttggacaaagctacacccttgttcattgctgctcaagagggacacacaaaatgtgtggagcttttgctctccagtggggcagatcctgatctttactgtaatgaggacagttggcagttacctattcatgcagctgcacaaatgggccatacaaaaatcttggacttgttaataccacttactaaccgggcctgtgacactgggctaaacaaagtaagccctgtttactcagcagtgtttgggggacatgaagattgcctagaaatattactccggaatggctacagcccagacgcccaggcgtgccttgtttttggattcagttctcctgtgtgcatggctttccaaaaggactgtgagttctttggaattgtgaacattcttttgaaatatggagcccagataaatgaacttcatttggcatactgcctgaagtacgagaagttttcgatatttcgctactttttgaggaaaggttgctcattgggaccatggaaccatatatatgaatttgtaaatcatgcaattaaagcacaagcaaaatataaggagtggttgccacatcttctggttgctggatttgacccactgattctactgtgcaattcttggattgactcagtcagcattgacacccttatcttcactttggagtttactaattggaagacacttgcaccagctgttgaaaggatgctctctgctcgtgcctcaaacgcttggattctacagcaacatattgccactgttccatccctgacccatctttgtcgtttggaaattcggtccagtctaaaatcagaacgtctacggtctgacagttatattagtcagctgccacttcccagaagcctacataattatttgctctatgaagacgttctgaggatgtatgaagttccagaactggcagctattcaagatggataaatcagtgaaactacttaacacagctaatttttttctctgaaaaatcatcgagacaaaagagccacagagtacaagtttttatgattttatagtcaaaagatgattattgattgtgagataggttaggttttggggggccagtagttcagtgagaatgtttatgtttacaactagccttcccagt

SEQ ID NO: 2014 - DNA, 1626 bp, Homo sapiens
  source 1..1626: mol_type = unassigned DNA
gttttcggacggctgcagcatcgcggtggggatcgaaagcgggggcttctgggacgcagctctggagacgcggcctcggaccagccatttcggtgtagaagtggcagcacggcagactggtcaaacaaatggattttacagaggcttacgcggacacgtgctctacagttggacttgctgccagggaaggcaatgttaaagtcttaaggaaactgctcaaaaagggccgaagtgtcgatgttgctgataacaggggatggatgccaattcatgaagcagcttatcacaactctgtagaatgtttgcaaatgttaattaatgcagattcatctgaaaactacattaagatgaagacctttgaaggtttctgtgctttgcatctcgctgcaagtcaaggacattggaaaatcgtacagattcttttagaagctggggcagatcctaatgcaactactttagaagaaacgacaccattgtttttaggtgcaaatgtcaattgtcaagccttggacaaagctacacccttgttcattgctgctcaagagggacacacaaaatgtgtggagcttttgctctccagtggggcagatcctgatctttactgtaatgaggacagttggcagttacctattcatgcagctgcacaaatgggccatacaaaaatcttggacttgttaataccacttactaaccgggcctgtgacactgggctaaacaaagtaagccctgtttactcagcagtgtttgggggacatgaagattgcctagaaatattactccggaatggctacagcccagacgcccaggcgtgccttgtttttggattcagttctcctgtgtgcatggctttccaaaaggagtggagctgtgagttctttggaattgtgaacattcttttgaaatatggagcccagataaatgaacttcatttggcatactgcctgaagtacgagaagttttcgatatttcgctactttttgaggaaaggttgctcattgggaccatggaaccatatatatgaatttgtaaatcatgcaattaaagcacaagcaaaatataaggagtggttgccacatcttctggttgctggatttgacccactgattctactgtgcaattcttggattgactcagtcagcattgacacccttatcttcactttggagtttactaattggaagacacttgcaccagctgttgaaaggatgctctctgctcgtgcctcaaacgcttggattctacagcaacatattgccactgttccatccctgacccatctttgtcgtttggaaattcggtccagtctaaaatcagaacgtctacggtctgacagttatattagtcagctgccacttcccagaagcctacataattatttgctctatgaagacgttctgaggatgtatgaagttccagaactggcagctattcaagatggataaatcagtgaaactacttaacacagctaatttttttctctgaaaaatcatcgagacaaaagagccacagagtacaagtttttatgattttatagtcaaaagatgattattgattgtgagataggttaggttttggggggccagtagttcagtgagaatgtttatgtttacaactagccttcccagt

SEQ ID NO: 2015 - DNA, 3825 bp, Homo sapiens
  source 1..3825: mol_type = unassigned DNA
cagcatgcgcctgtttgctcggtgctgttctctcgataaatcacaacaaagcttccagagggagaggaaggatggacggcaccactgcccctgtcactaaatctggagctgccaagttagttaagagaaatttccttgaggcgctaaagtccaatgacttcggaaaattgaaggctattttgatccaaaggcaaatagatgtggacactgtttttgaagtcgaagatgagaatatggttttggcatcttataaacaaggttactggttgcctagctataaattgaagtcttcctgggccacaggcctccatctctctgtcttgtttggccatgtggaatgtcttctggtgctactggaccacaatgctacaatcaactgtagacccaatgggaaaacccctcttcacgtggcttgtgaaatggccaatgtggattgtgttaagatcctctgtgatcgtggggcaaagctcaattgctactccttaagtggacacacagctttgcacttttgtacaactccaagttccattctctgtgccaagcaattggtttggagaggggcgaatgtgaacatgaagaccaacaaccaagatgaggagacgcccttgcacacggctgcccacttcggcctttcggagctggtggccttctacgtggaacacggggccatagtggacagcgtgaatgcccacatggagacccccctggccatcgccgcctactgggccctccgctttaaggagcaggagtacagcacggagcaccacctggtctgccgcatgctgcttgactacaaagccgaagtcaatgcccgagatgacgactttaaatctcccctccacaaggcagcctggaactgtgaccacgtgctcatgcacatgatgctggaagctggcgccgaagccaatctcatggatatcaacggctgtgctgccatccagtacgtgctgaaggtcacctccgtgcgccctgctgcccagcctgagatctgctaccagctcctgttgaaccatggggctgcccgaatataccctccacagttccataaggtgatacaggcctgccattcttgtcctaaagcaattgaagttgtagtcaatgcctatgaacacatcagatggaacacaaagtggagaagagctatccccgatgatgacttggagaaatactgggatttttaccactctctctttactgtgtgctgtaactctccaaggactctcatgcacttatcgagatgtgccattagaagaacattacacaacagatgccatagagcaattcctttgctttccctcccattgtcattgaaaaagtacttgcttttagagccagagggaattatttattaagccttatgagacagcagttcccaatcctaggtatttaagtggacttgctgggtagacacagtttgcctaaataaaatggtacttgggttgattataacacttcagggatttcaaaacactttacaaacactgccattaatcctagaatatcatggtatggggaaataaagaagaagtaaagttaaggaattttcaaagacaaggatgtattcagaatgtactgatagaacagtaataactaatatgtatagtgttcttactaagtacctgaaatatttttgtaaaacttcttatatcttatctcatctgaaatgggacccaggttttcttccaaccaatataattctgtgccttatcagtaatatgtttacattctcattcaaatggccatatagcaggctttgcaattggcctcttaaacttggtgttttcccccattaccccttagcagtaattactgtcactagttttgcaaactcctactccccaaaccaagctactcaagtttatttcagtgatgaaggcatatgagcatagtcaaaacaaggagatcttggagtcaaattagaaatgagaaagaaacatcagtccagttaatagtcaagaatggacatttgaaccagacatcactgagccagagactggagatgcaaagatgagtcccatgtgactcctgccttccaggatctcaccatttagcagaggatccagacatacacacagctaactgcaatataaagtgatggggcaagagtacaggtgcagactcacttttaatgcttatctttcaaagttgtgtttctgacatgaagtgtgatttttcttttaagcatgaagttaaagagtgaaggggttatgtaaagtagagggatctcctgctcttgttagggtatttttaaggttttttctagatagtgtgtctttttggtatggtttcttggttagtattaatactttcccagactccttgagaaaaatattgcacactcaatggctccagtgcatgtgacaaggaagcataggaaaatgggggaaagaaagtgtgtgaggggacctagttgattacttcggtctttttatgtagcagactgacatttcatagcattgtagctaagagataaggagcactttgctagtgacagtgggctacgaaaagtaaatagagagactttttgaaaatggtaaaagtttgagaaacttgggaagattagtgtgttaatcaggcttgctagttagtggattgcagaaagaaaaatgtaggtgattaagctctgggccttgtggtttatgaggtcaattttgcttcacttttttttttgttcttgctataatcacttttagataagctcattgctcttagcatcattttttagaggttaaagcagaagtaaattgcaaacaaatctgtcagttgtgagcagatttcttttatgtgtgtggttctccatcatatttaactttggatgctggagtgttgaatagagatgatgtcagatattccaataggctatcatttaatgttaactggcaatcacctaactggttaatctcagttgagactgtgcttctgaactgggattgtcttactcccagggctgtgtaagaaaagtcataggtggatacaataatctcttttaagtatcagttttactcagatattttggtggagatattttgtactaaaacaagatctatatcatggaatagaatgctgaatttgtatgaattattcacataaagcttgatctttcaaaaaatagtttgcttgcagcaagtggtattagaacacatcctaaaacagaatgaaatgatgtcttttgcagcaacttggatggagctggaggccattattctaagtgaagtaactcaggaatggaaagtgaaataccatatgttctcacttataagtgggagctaagcaatgaggatgcaaagacatccagagtgatataatggactatggggacttgcaaggggaagcttgagagtggggtgagggataaaagactacatattgggtacagtgtacactgctccagtgatgggtgcactaaaatctcaaaattcaccactaaagaatgtatccatgtaaccaaaaaccacctgtacccccaaaactattgaaatcttaaaatagtaataattaacaaagtaaaacaagatcacaccctggaacaattggaggattgcttgctgccctgcatcttaaggcgtattctagcagcaaagcttgtgatgcactgacttggggcaagtaaaactgatgctgaggacaaagggagaagatgttcctcgcccagggaaatgaaaacttttcttattcaccttgcttgtgcttaaacacttatgttcatctagtgtagaatacatggctacttgtttgtaatttttttattggtggaattaaagtaatttttccttatctttgaacttttatttagagaacttaaataaagctcttctgtctcctttc

SEQ ID NO: 2016 - DNA, 1547 bp, Homo sapiens
  source 1..1547: mol_type = unassigned DNA
cagcatgcgcctgtttgctcggtgctgttctctcgataaatcacaacaaagcttccagagggagaggaaggatggacggcaccactgcccctgtcactaaatctggagctgccaagttagttaagagaaatttccttgaggcgctaaagtccaatgacttcggaaaattgaaggctattttgatccaaaggcaaatagatgtggacactgtttttgaagtcgaagatgagaatatggttttggcatcttataaacaaggttactggttgcctagctataaattgaagtcttcctgggccacaggcctccatctctctgtcttgtttggccatgtggaatgtcttctggtgctactggaccacaatgctacaatcaactgtagacccaatgggaaaacccctcttcacgtggcttgtgaaatggccaatgtggattgtgttaagatcctctgtgatcgtggggcaaagctcaattgctactccttaagtggacacacagctttgcacttttgtacaactccaagttccattctctgtgccaagcaattggtttggagaggggcgaatgtgaacatgaagaccaacaaccaagatgaggagacgcccttgcacacggctgcccacttcggcctttcggagctggtggccttctacgtggaacacggggccatagtggacagcgtgaatgcccacatggagacccccctggccatcgccgcctactgggccctccgctttaaggagcaggagtacagcacggagcaccacctggtctgccgcatgctgcttgactacaaagccgaagtcaatgcccgagatgacgactttaaatctcccctccacaaggcagcctggaactgtgaccacgtgctcatgcacatgatgctggaagctggcgccgaagccaatctcatggatatcaacggctgtgctgccatccagtacgtgctgaaggtcacctccgtgcgccctgctgcccagcctgagatctgctaccagctcctgttgaaccatggggctgcccgaatataccctccacagttccataaggtgaggctctgcccagtggtcagcaggttgaggaagattcaaatggcagccttgtctgaaatctccaagtaactcaagcttgcttgaggcttgagtcctgggctaactacctctgatcctctttgaccttccattacatacctaatcctagctgtctcctcatctcatcctagtctaggtttgcttgaaattgggtgtgagagctagaatgagaaaaagagtagcaaataatttgttttgccttgtgtgaacaccagtgcactggtggcttcctgagggactgaggtaagtctgccagaaaggtgaatagtgttagacaggcatacatttgccatcttttaaacagaatgactgatctaaagatgactcagcctgctttgaaattagcttgtagccatgaaagggccacccgattttccagtttaatgaaagctaacgtttattaagtactaaaattatatttattatgtataataaataagcacactgttataagca

SEQ ID NO: 2017 - DNA, 3747 bp, Homo sapiens
  source 1..3747: mol_type = unassigned DNA
atggggaaggaccaggagctgctggaagctgctcgcactggaaatgtggctctggtggagaaactcctgtctggcaggaaaggagggatcctgggcggtggatccggacccctgcccctgtctaatctgctaagcatctggcgaggccccaatgtgaactgcacagacagttcgggttacactgctttacaccacgcagccttaaatggacataaggacatagttctcaaactacttcagtatgaggcatcaacaaatgtagcagacaacaaagggtattttcctattcacctggctgcctggaaaggagatgtggaaattgtgaagattcttattcatcatggaccatcacattccagggtcaatgaacagaacaatgaaaatgaaactgccctacactgtgcagctcaatatggacactcagaagtagttgctgttctcctagaagagctcactgacccgacaattagaaatagcaagctggaaacacctttggacttggcggcactctacggacggcttagagtggtaaaaatgatcatcagtgcacatcctaacttaatgagctgcaacactcgcaagcacacgccacttcaccttgctgcgcgcaatggccacaaagcagtcgtgcaggtgctgctggaggcaggaatggatgtgagctgtcaaacagaaaaggggagtgcacttcatgaagcagctttgtttggaaaggtggatgttgtacgagttctgttagaaacaggaattgatgccaacataaaggatagcttaggtagaactgtcttggacattctgaaagaacatccatctcagaaatctctccagattgcaacactcttacaagagtatttagaaggcgtgggaagatctacagtcctcgaagagcctgtacaggaagatgcaacacaagaaacacacatttcatctcctgttgagtctccttcccaaaagaccaaaagtgaaaccgtcactggagaattatcaaaactcttggatgaaataaaactctgtcaagaaaaggattattcgtttgaagacttgtgccacacaatatcagaccactacttagataatttgagcaagatttcagaggaagaacttgggaaaaatggaagccagagtgtaagaacctcatctacaatcaatttgtcaccaggagaagtggaagaagaggatgatgatgaaaatacgtgtgggccatcaggactttgggaagcattaactccgtgtaatggatgtaggaaccttggcttccccatgcttgcccaggagtcctatccaaagaagagaaattacactatggaaattgtaccatctgcttctctggatacatttccttcagaaaatgagaactttctgtgtgatctcatggacacagctgttacaaagaaaccttgctccttagaaattgcaagggcaccttccccaagaactgataatgcctctgaggtagcagttactactccaggaactagtaaccatagaaacagctcaacaggcccaacacctgattgttcacctccatcccctgatactgccctcaaaaatattgtaaaagtcattcgaccccagcctaaacagcgaacatccattgtgtcttctctggattttcaccgaatgaatcacaaccaagaatattttgaaatcaacacatctacagggtgcacaagctttactgccagtcctcctgctagtccacccacctcttctgtgggaaccacagaagtcaagaatgagggaactaaccatacagatgacctctcccgacaggatgacaatgatcccccaaaagaatatgatcctgggcaatttgcaggcctgctccatggatcctctccagcctgtgagtcccctgaaaatccatttcatctctatgggaaaagagaacaatgtgaaaaaggacaagatgaagtcagtttggcaaacagtcctttgcctttcaagcagtctccaatagaaaataactcagaacctttggtaaagaaaattaaacccaaagtggtcagtagaacaatttttcacaaaaaaagcaaccaactcgaaaaccataccattgttggcacaagatcaaccaggagtggatctcggaatggggaccagtgggttatgaacgcagggggatttgtggagagagcctgtactctggggagaataaggtcattgcctaaagccttgatcgacatgcatttgtcaaaaagtgtctctaaatctgattctgatctcattgcctatccttccaatgagaaaacatcaagagttaactggagtgaatcttccactgctgaacacagttctaaagggaattctgaaagaacaccatccttcacatcggaatgggaagaaattgacaaaataatgagttccatagatgttggaatcaacaacgaacttaaagagatgaatggtgagaccacaagacccagatgccctgtccaaacagtgggacaatggttggaaagcattgggctacctcagtacgagaaccacctgatggctaatggatttgacaatgtgcagtttatgggaagcaatgttatggaagatcaggatttgttggaaattggaatccttaattctgggcacagacaaagaattctacaggcaatccagctccttccaaagatgagacccattgggcatgatggctaccatcccacctctgtagctgagtggctggattccattgaactgggcgactacaccaaagcctttctaattaatggctacacttcgatggacctgttgaaaaaaatctgggaggttgaacttattaatgttttaaaaatcaatttgattggccacaggaaacgtattttggcatctctgggagacaggctgcacgacgatcccccacagaagccccctcggtccatcaccctcagggaacccagtggtaatcacactcctcctcagttgtctccatcacttagccaaagcacttacaccactggtggctccctagacgttcctcacattatcatgcagggcgatgcaaggaggagaagaaatgaaaactactttgatgatattccccgatcaaaactggagaggcagatggctcagacaggagactggggagaaccttccattaccttgcgacctccgaatgaagccacagcctctaccccggtacagtactggcagcatcacccagaaaagcttatcttccagtcgtgtgattacaaagctttttatttaggttctatgctgataaaagagcttagggggacagaatcaacccaagatgcttgtgcaaaaatgcgggtaatgtgcgtgaagtctacagagcaaatgaagaaggtccctactattattctttctgtctcatataaaggagtcaaatttattgatgcaacaaataagaacataattgctgagcatgaaattcgtaatatctcctgtgctgcccaggacccagaagacctctcaacatttgcctatatcacaaaagatttgaagtctaatcaccactactgtcatgtgtttactgcctttgatgtgaatttagcctatgaaatcatcctaaccctgggacaggcattcgaagtcgcttaccagctagcactacaagcaagaaaagggggacactcctccacacttccagaaagctttgaaaacaaaccctccaaacccatccccaagccccgcgttagcattcgcaagtccgtggatcttcttcatgccagccataccgggcaggaaccatcagagagacacactgaggaggcactcagaaaattttga

SEQ ID NO: 2018 - DNA, 1353 bp, Homo sapiens
  source 1..1353: mol_type = unassigned DNA
atgatgtggcaatgccacctctcagcccaggactaccgctattaccccgtggacggctactccctgcttaaacgcttccctcttcatcctcttacaggacccagatgccctgtccaaacagtgggacaatggttggaaagcattgggctacctcagtacgagaaccacctgatggctaatggatttgacaatgtgcagtttatgggaagcaatgttatggaagatcaggatttgttggaaattggaatccttaattctgggcacagacaaagaattctacaggcaatccagctccttccaaagatgagacccattgggcatgatggctaccatcccacctctgtagctgagtggctggattccattgaactgggcgactacaccaaagcctttctaattaatggctacacttcgatggacctgttgaaaaaaatctgggaggttgaacttattaatgttttaaaaatcaatttgattggccacaggaaacgtattttggcatctctgggagacaggctgcacgacgatcccccacagaagccccctcggtccatcaccctcaggtcgtctgtctgtgaaatatggacgaatcagaacgcaggatttcctttctcagcgatccatcaggttcataatacaggagactggggagaaccttccattaccttgcgacctccgaatgaagccacagcctctaccccggtacagtactggcagcatcacccagaaaagcttatcttccagtcgtgtgattacaaagctttttatttaggttctatgctgataaaagagcttagggggacagaatcaacccaagatgcttgtgcaaaaatgcgggcaaatattcagaagtctacagagcaaatgaagaaggtccctactattattctttctgtctcatataaaggagtcaaatttattgatgcaacaaataagaacataattgctgagcatgaaattcgtaatatctcctgtgctgcccaggacccagaagacctctcaacatttgcctatatcacaaaagatttgaagtctaatcaccactactgtcatgtgtttactgcctttgatgtgaatttagcctatgaaatcatcctaaccctgggacaggcattcgaagtcgcttaccagctagcactacaagcaagaaaagggggacactcctccacacttccagaaagctttgaaaacaaaccctccaaacccatccccaagccccgcgttagcattcgcaagtccgtgcagatcgacccatctgagcaaaagactctggccaatctaccgtggattgtggagccgggccaagaagccaagaggggcattaataccaagtatgaaaccacgattttctga

SEQ ID NO: 2019 - DNA, 1984 bp, Homo sapiens
  source 1..1984: mol_type = unassigned DNA
attcgctgggggcgcccagaaagatgcacagaggcaacggctaggggagcggaggttcaagccacatgtctgcgtcctcgggggccagagcccgccagccctcgcggatcccggctcgcggccagcccgagcggctcgggttttaaaaatcaatttgattggccacaggaaacgtattttggcatctctgggagacaggctgcacgacgatcccccacagaagccccctcggtccatcaccctcagggaacccagtggtaatcacactcctcctcagttgtctccatcacttagccaaagcacttacaccactggtggctccctagacgttcctcacattatcatgcagggcgatgcaaggaggagaagaaatgaaaactactttgatgatattccccgatcaaaactggagaggcagatggctcagacaggagactggggagaaccttccattaccttgcgacctccgaatgaagccacagcctctaccccggtacagtactggcagcatcacccagaaaagcttatcttccagtcgtgtgattacaaagctttttatttaggttctatgctgataaaagagcttagggggacagaatcaacccaagatgcttgtgcaaaaatgcgggctaactgtcagaagtctacagagcaaatgaagaaggtccctactattattctttctgtctcatataaaggagtcaaatttattgatgcaacaaataagaacataattgctgagcatgaaattcgtaatatctcctgtgctgcccaggacccagaagacctctcaacatttgcctatatcacaaaagatttgaagtctaatcaccactactgtcatgtgtttactgcctttgatgtgaatttagcctatgaaatcatcctaaccctgggacaggcattcgaagtcgcttaccagctagcactacaagcaagaaaagggggacactcctccacacttccagaaagctttgaaaacaaaccctccaaacccatccccaagccccgcgttagcattcgcaagtccgtggatcttcttcatgccagccataccgggcaggaaccatcagagagacacactgaggaggcactcagaaaattttgatagaattgaatttacatatagctgataaagcctaaatagaaaggttgatgtatttagcttgaatccttcactttagtggtctaatcaacagataaatgacaagcaaagaatgaaacaatccaaaaatgtttttcaaaacaattttgtgaattttatttttacaaaaattttttaaattcatattttaaaatgtataccaaggcaaaaaaatcatataagctatatcataaatacaagagtttcaaaacatacaagagacatataatgtaaaaaaaaattatatatatgaagtccaatgtaatttataatacaaaaaaatacagcaagggaaaatgctttagaaatgctcatctgcaaactacaaaacaaaatcctcctcttgaccgactgcatgaactgccatgaaatttgcagctccatcatactaggtatctcttctttcttcatgttaccttgtctttcttcccatttttcttttaagacagggtcttgctatgtcacccaggctggactcaaactccagggctcaaggaatcctcctgtcttagcctcccaaggagctgggattacaggcacgtgccaccgcacctggctcctaatttctttttaagacaagggccattcaaggctttttaaaacctgatgtgtgttgttatactttataacagtcagtggcttttaattccaaaaggtaatactttatactctgcctacatgagatgagcccctaacagtgtgtacaaataaaattatgatttgggtattctaaggagacataccatttacagaaatttcttttgataaaattaaggtttcacttttcacatttgcttaaatcacagtaagcctgtaaactagctccttgacccaccattt

SEQ ID NO: 2020 - DNA, 1053 bp, Homo sapiens
  source 1..1053: mol_type = unassigned DNA
gttttgtttcagggaagcaatgttatggaagatcaggatttgttggaaattggaatccttaattctgggcacagacaaagaattctacaggcaatccagctccttccaaagatgagacccattgggcatgatggctaccatcccacctctgtagctgagtggctggattccattgaactgggcgactacaccaaagcctttctaattaatggctacacttcgatggacctgttgaaaaaaatctgggaggttgaacttattaatcagtcgtctgtctgtgaaatatggacgaatcagaacgcaggatttcctttctcagcgatccatcaggttcataatacaggagactggggagaaccttccattaccttgcgacctccgaatgaagccacagcctctaccccggtacagtactggcagcatcacccagaaaagcttatcttccagtcgtgtgattacaaagctttttatttaggttctatgctgataaaagagcttagggggacagaatcaacccaagatgcttgtgcaaaaatgcgggcaaatattcagaagtctacagagcaaatgaagaaggtccctactattattctttctgtctcatataaaggagtcaaatttattgatgcaacaaataagaacataattgctgagcatgaaattcgtaatatctcctgtgctgcccaggacccagaagacctctcaacatttgcctatatcacaaaagatttgaagtctaatcaccactactgtcatgtgtttactgcctttgatgtgaatttagcctatgaaatcatcctaaccctgggacaggcattcgaagtcgcttaccagctagcactacaagcaagaaaagggggacactcctccacacttccagaaagctttgaaaacaaaccctccaaacccatccccaagccccgcgttagcattcgcaagtccgtgatcgacccatctgagcaaaagactctggccaatctaccgtggattgtggagccgggccaagaagccaagaggggcattaataccaagtatgaaaccacgattttctga

SEQ ID NO: 2021 - DNA, 2292 bp, Homo sapiens
  source 1..2292: mol_type = unassigned DNA
tcttttcaggagtcctatccaaagaagagaaattacactatggaaattgtaccatctgcttctctggatacatttccttcagaaaatgagaactttctgtgtgatctcatggacacagctgttacaaagaaaccttgctccttagaaattgcaagggcaccttccccaagaactgataatgcctctgaggtagcagttactactccaggaactagtaaccatagaaacagctcaacaggcccaacacctgattgttcacctccatcccctgatactgccctcaaaaatattgtaaaagtcattcgaccccagcctaaacagcgaacatccattgtgtcttctctggattttcaccgaatgaatcacaaccaagaatattttgaaatcaacacatctacagggtgcacaagctttactgccagtcctcctgctagtccacccacctcttctgtgggaaccacagaagtcaagaatgagggaactaaccatacagatgacctctcccgacaggatgacaatgatcccccaaaagaatatgatcctgggcaatttgcaggcctgctccatggatcctctccagcctgtgagtcccctgaaaatccatttcatctctatgggaaaagagaacaatgtgaaaaaggacaagatgaagtcagtttggcaaacagtcctttgcctttcaagcagtctccaatagaaaataactcagaacctttggtaaagaaaattaaacccaaagtggtcagtagaacaatttttcacaaaaaaagcaaccaactcgaaaaccataccattgttggcacaagatcaaccaggagtggatctcggaatggggaccagtgggttatgaacgcagggggatttgtggagagagcctgtactctggggagaataaggtcattgcctaaagccttgatcgacatgcatttgtcaaaaagtgtctctaaatctgattctgatctcattgcctatccttccaatgagaaaacatcaagagttaactggagtgaatcttccactgctgaacacagttctaaagggaattctgaaagaacaccatccttcacatcggaatgggaagaaattgacaaaataatgagttccatagatgttggaatcaacaacgaacttaaagagatgaatggacccagatgccctgtccaaacagtgggacaatggttggaaagcattgggctacctcagtacgagaaccacctgatggctaatggatttgacaatgtgcagtttatgggaagcaatgttatggaagatcaggatttgttggaaattggaatccttaattctgggcacagacaaagaattctacaggcaatccagctccttccaaagatgagacccattgggcatgatggctaccatcccacctctgtagctgagtggctggattccattgaactgggcgactacaccaaagcctttctaattaatggctacacttcgatggacctgttgaaaaaaatctgggaggttgaacttattaatgttttaaaaatcaatttgattggccacaggaaacgtattttggcatctctgggagacaggctgcacgacgatcccccacagaagccccctcggtccatcaccctcaggacaggagactggggagaaccttccattaccttgcgacctccgaatgaagccacagcctctaccccggtacagtactggcagcatcacccagaaaagcttatcttccagtcgtgtgattacaaagctttttatttaggttctatgctgataaaagagcttagggggacagaatcaacccaagatgcttgtgcaaaaatgcgggtaatgtgcgtgaagtctacagagcaaatgaagaaggtccctactattattctttctgtctcatataaaggagtcaaatttattgatgcaacaaataagaacataattgctgagcatgaaattcgtaatatctcctgtgctgcccaggacccagaagacctctcaacatttgcctatatcacaaaagatttgaagtctaatcaccactactgtcatgtgtttactgcctttgatgtgaatttagcctatgaaatcatcctaaccctgggacaggcattcgaagtcgcttaccagctagcactacaagcaagaaaagggggacactcctccacacttccagaaagctttgaaaacaaaccctccaaacccatccccaagccccgcgttagcattcgcaagtccgtggatcttcttcatgccagccataccgggcaggaaccatcagagagacacactgaggaggcactcagaaaattttga

SEQ ID NO: 2022 - DNA, 1281 bp, Homo sapiens
  source 1..1281: mol_type = unassigned DNA
atgatgtggcaatgccacctctcagcccaggactaccgctattaccccgtggacggctactccctgcttaaacgcttccctcttcatcctcttacaggacccagatgccctgtccaaacagtgggacaatggttggaaagcattgggctacctcagtacgagaaccacctgatggctaatggatttgacaatgtgcagtttatgggaagcaatgttatggaagatcaggatttgttggaaattggaatccttaattctgggcacagacaaagaattctacaggcaatccagctccttccaaagatgagacccattgggcatgatggctaccatcccacctctgtagctgagtggctggattccattgaactgggcgactacaccaaagcctttctaattaatggctacacttcgatggacctgttgaaaaaaatctgggaggttgaacttattaatgttttaaaaatcaatttgattggccacaggaaacgtattttggcatctctgggagacaggctgcacgacgatcccccacagaagccccctcggtccatcaccctcaggacaggagactggggagaaccttccattaccttgcgacctccgaatgaagccacagcctctaccccggtacagtactggcagcatcacccagaaaagcttatcttccagtcgtgtgattacaaagctttttatttaggttctatgctgataaaagagcttagggggacagaatcaacccaagatgcttgtgcaaaaatgcgggctaactgtcagaagtctacagagcaaatgaagaaggtccctactattattctttctgtctcatataaaggagtcaaatttattgatgcaacaaataagaacataattgctgagcatgaaattcgtaatatctcctgtgctgcccaggacccagaagacctctcaacatttgcctatatcacaaaagatttgaagtctaatcaccactactgtcatgtgtttactgcctttgatgtgaatttagcctatgaaatcatcctaaccctgggacaggcattcgaagtcgcttaccagctagcactacaagcaagaaaagggggacactcctccacacttccagaaagctttgaaaacaaaccctccaaacccatccccaagccccgcgttagcattcgcaagtccgtgcagatcgacccatctgagcaaaagactctggccaatctaccgtggattgtggagccgggccaagaagccaagaggggcattaataccaagtatgaaaccacgattttctga

SEQ ID NO: 2023 - DNA, 1383 bp, Homo sapiens
  source 1..1383: mol_type = unassigned DNA
atgatgtggcaatgccacctctcagcccaggactaccgctattaccccgtggacggctactccctgcttaaacgcttccctcttcatcctcttacaggacccagatgccctgtccaaacagtgggacaatggttggaaagcattgggctacctcagtacgagaaccacctgatggctaatggatttgacaatgtgcagtttatgggaagcaatgttatggaagatcaggatttgttggaaattggaatccttaattctgggcacagacaaagaattctacaggcaatccagctccttccaaagatgagacccattgggcatgatggctaccatcccacctctgtagctgagtggctggattccattgaactgggcgactacaccaaagcctttctaattaatggctacacttcgatggacctgttgaaaaaaatctgggaggttgaacttattaatgttttaaaaatcaatttgattggccacaggaaacgtattttggcatctctgggagacaggctgcacgacgatcccccacagaagccccctcggtccatcaccctcagggaacccagtggtaatcacactcctcctcagttgtctccatcacttagccaaagcacttacaccactggtggctccctagacgttcctcacattatcatgcagggcgatgcaaggaggagaagaaatgaaaactactttgatgatattccccgatcaaaactggagaggcagatggctcagacaggagactggggagaaccttccattaccttgcgacctccgaatgaagccacagcctctaccccggtacagtactggcagcatcacccagaaaagcttatcttccagtcgtgtgattacaaagctttttatttaggttctatgctgataaaagagcttagggggacagaatcaacccaagatgcttgtgcaaaaatgcgggctaactgtcagaagtctacagagcaaatgaagaaggtccctactattattctttctgtctcatataaaggagtcaaatttattgatgcaacaaataagaacataattgctgagcatgaaattcgtaatatctcctgtgctgcccaggacccagaagacctctcaacatttgcctatatcacaaaagatttgaagtctaatcaccactactgtcatgtgtttactgcctttgatgtgaatttagcctatgaaatcatcctaaccctgggacaggcattcgaagtcgcttaccagctagcactacaagcaagaaaagggggacactcctccacacttccagaaagctttgaaaacaaaccctccaaacccatccccaagccccgcgttagcattcgcaagtccgtgcctttctgttttaaagcagatcgacccatctga

SEQ ID NO: 2024 - DNA, 2595 bp, Homo sapiens
  source 1..2595: mol_type = unassigned DNA
ggcaaggactctgtgggggagtcggtgagagactatggggaaggaccaggagctgctggaagctgctcgcactggaaatgtggctctggtggagaaactcctgtctggcaggaaaggagggatcctgggcggtggatccggacccctgcccctgtctaatctgctaagagaacctcatctacaatcaatttgtcaccaggagaagtggaagaagaggatgatgatgaaaatacgtgtgggccatcaggactttgggaagcattaactccgtgtaatggatgtaggaaccttggcttccccatgcttgcccaggagtcctatccaaagaagagaaattacactatggaaattgtaccatctgcttctctggatacatttccttcagaaaatgagaactttctgtgtgatctcatggacacagctgttacaaagaaaccttgctccttagaaattgcaagggcaccttccccaagaactgataatgcctctgaggtagcagttactactccaggaactagtaaccatagaaacagctcaacaggcccaacacctgattgttcacctccatcccctgatactgccctcaaaaatattgtaaaagtcattcgaccccagcctaaacagcgaacatccattgtgtcttctctggattttcaccgaatgaatcacaaccaagaatattttgaaatcaacacatctacagggtgcacaagctttactgccagtcctcctgctagtccacccacctcttctgtgggaaccacagaagtcaagaatgagggaactaaccatacagatgacctctcccgacaggatgacaatgatcccccaaaagaatatgatcctgggcaatttgcaggcctgctccatggatcctctccagcctgtgagtcccctgaaaatccatttcatctctatgggaaaagagaacaatgtgaaaaaggacaagatgaagtcagtttggcaaacagtcctttgcctttcaagcagtctccaatagaaaataactcagaacctttggtaaagaaaattaaacccaaagtggtcagtagaacaatttttcacaaaaaaagcaaccaactcgaaaaccataccattgttggcacaagatcaaccaggagtggatctcggaatggggaccagtgggttatgaacgcagggggatttgtggagagagcctgtactctggggagaataaggtcattgcctaaagccttgatcgacatgcatttgtcaaaaagtgtctctaaatctgattctgatctcattgcctatccttccaatgagaaaacatcaagagttaactggagtgaatcttccactgctgaacacagttctaaagggaattctgaaagaacaccatccttcacatcggaatgggaagaaattgacaaaataatgagttccatagatgttggaatcaacaacgaacttaaagagatgaatggacccagatgccctgtccaaacagtgggacaatggttggaaagcattgggctacctcagtacgagaaccacctgatggctaatggatttgacaatgtgcagtttatgggaagcaatgttatggaagatcaggatttgttggaaattggaatccttaattctgggcacagacaaagaattctacaggcaatccagctccttccaaagatgagacccattgggcatgatggctaccatcccacctctgtagctgagtggctggattccattgaactgggcgactacaccaaagcctttctaattaatggctacacttcgatggacctgttgaaaaaaatctgggaggttgaacttattaatgttttaaaaatcaatttgattggccacaggaaacgtattttggcatctctgggagacaggctgcacgacgatcccccacagaagccccctcggtccatcaccctcaggacaggagactggggagaaccttccattaccttgcgacctccgaatgaagccacagcctctaccccggtacagtactggcagcatcacccagaaaagcttatcttccagtcgtgtgattacaaagctttttatttaggttctatgctgataaaagagcttagggggacagaatcaacccaagatgcttgtgcaaaaatgcgggctaactgtcagaagtctacagagcaaatgaagaaggtccctactattattctttctgtctcatataaaggagtcaaatttattgatgcaacaaataagaacataattgctgagcatgaaattcgtaatatctcctgtgctgcccaggacccagaagacctctcaacatttgcctatatcacaaaagatttgaagtctaatcaccactactgtcatgtgtttactgcctttgatgtgaatttagcctatgaaatcatcctaaccctgggacaggcattcgaagtcgcttaccagctagcactacaagcaagaaaagggggacactcctccacacttccagaaagctttgaaaacaaaccctccaaacccatccccaagccccgcgttagcattcgcaagtccgtggatcttcttcatgccagccataccgggcaggaaccatcagagagacacactgaggaggcactcagaaaattttga

SEQ ID NO: 2025 - DNA, 3885 bp, Homo sapiens
  source 1..3885: mol_type = unassigned DNA
atggggaaggaccaggagctgctggaagctgctcgcactggaaatgtggctctggtggagaaactcctgtctggcaggaaaggagggatcctgggcggtggatccggacccctgcccctgtctaatctgctaagcatctggcgaggccccaatgtgaactgcacagacagttcgggttacactgctttacaccacgcagccttaaatggacataaggacatagttctcaaactacttcagtatgaggcatcaacaaatgtagcagacaacaaagggtattttcctattcacctggctgcctggaaaggagatgtggaaattgtgaagattcttattcatcatggaccatcacattccagggtcaatgaacagaacaatgaaaatgaaactgccctacactgtgcagctcaatatggacactcagaagtagttgctgttctcctagaagagctcactgacccgacaattagaaatagcaagctggaaacacctttggacttggcggcactctacggacggcttagagtggtaaaaatgatcatcagtgcacatcctaacttaatgagctgcaacactcgcaagcacacgccacttcaccttgctgcgcgcaatggccacaaagcagtcgtgcaggtgctgctggaggcaggaatggatgtgagctgtcaaacagaaaaggggagtgcacttcatgaagcagctttgtttggaaaggtggatgttgtacgagttctgttagaaacaggaattgatgccaacataaaggatagcttaggtagaactgtcttggacattctgaaagaacatccatctcagaaatctctccagattgcaacactcttacaagagtatttagaaggcgtgggaagatctacagtcctcgaagagcctgtacaggaagatgcaacacaagaaacacacatttcatctcctgttgagtctccttcccaaaagaccaaaagtgaaaccgtcactggagaattatcaaaactcttggatgaaataaaactctgtcaagaaaaggattattcgtttgaagacttgtgccacacaatatcagaccactacttagataatttgagcaagatttcagaggaagaacttgggaaaaatggaagccagagtgtaagaacctcatctacaatcaatttgtcaccaggagaagtggaagaagaggatgatgatgaaaatacgtgtgggccatcaggactttgggaagcattaactccgtgtaatggatgtaggaaccttggcttccccatgcttgcccaggagtcctatccaaagaagagaaattacactatggaaattgtaccatctgcttctctggatacatttccttcagaaaatgagaactttctgtgtgatctcatggacacagctgttacaaagaaaccttgctccttagaaattgcaagggcaccttccccaagaactgataatgcctctgaggtagcagttactactccaggaactagtaaccatagaaacagctcaacaggcccaacacctgattgttcacctccatcccctgatactgccctcaaaaatattgtaaaagtcattcgaccccagcctaaacagcgaacatccattgtgtcttctctggattttcaccgaatgaatcacaaccaagaatattttgaaatcaacacatctacagggtgcacaagctttactgccagtcctcctgctagtccacccacctcttctgtgggaaccacagaagtcaagaatgagggaactaaccatacagatgacctctcccgacaggatgacaatgatcccccaaaagaatatgatcctgggcaatttgcaggcctgctccatggatcctctccagcctgtgagtcccctgaaaatccatttcatctctatgggaaaagagaacaatgtgaaaaaggacaagatgaagtcagtttggcaaacagtcctttgcctttcaagcagtctccaatagaaaataactcagaacctttggtaaagaaaattaaacccaaagtggtcagtagaacaatttttcacaaaaaaagcaaccaactcgaaaaccataccattgttggcacaagatcaaccaggagtggatctcggaatggggaccagtgggttatgaacgcagggggatttgtggagagagcctgtactctggggagaataaggtcattgcctaaagccttgatcgacatgcatttgtcaaaaagtgtctctaaatctgattctgatctcattgcctatccttccaatgagaaaacatcaagagttaactggagtgaatcttccactgctgaacacagttctaaagggaattctgaaagaacaccatccttcacatcggaatgggaagaaattgacaaaataatgagttccatagatgttggaatcaacaacgaacttaaagagatgaatggtgagaccacaagacccagatgccctgtccaaacagtgggacaatggttggaaagcattgggctacctcagtacgagaaccacctgatggctaatggatttgacaatgtgcagtttatgggaagcaatgttatggaagatcaggatttgttggaaattggaatccttaattctgggcacagacaaagaattctacaggcaatccagctccttccaaagatgagacccattgggcatgatggctaccatcccacctctgtagctgagtggctggattccattgaactgggcgactacaccaaagcctttctaattaatggctacacttcgatggacctgttgaaaaaaatctgggaggttgaacttattaatgttttaaaaatcaatttgattggccacaggaaacgtattttggcatctctgggagacaggctgcacgacgatcccccacagaagccccctcggtccatcaccctcagggaacccagtggtaatcacactcctcctcagttgtctccatcacttagccaaagcacttacaccactggtggctccctagacgttcctcacattatcatgcagggcgatgcaaggaggagaagaaatgaaaactactttgatgatattccccgatcaaaactggagaggcagatggctcagacaggagactggggagaaccttccattaccttgcgacctccgaatgaagccacagcctctaccccggtacagtactggcagcatcacccagaaaagcttatcttccagtcgtgtgattacaaagctttttatttaggttctatgctgataaaagagcttagggggacagaatcaacccaagatgcttgtgcaaaaatgcgggctaactgtcagaagtctacagagcaaatgaagaaggtccctactattattctttctgtctcatataaaggagtcaaatttattgatgcaacaaataagaacataattgctgagcatgaaattcgtaatatctcctgtgctgcccaggacccagaagacctctcaacatttgcctatatcacaaaagatttgaagtctaatcaccactactgtcatgtgtttactgcctttgatgtgaatttagcctatgaaatcatcctaaccctgggacaggcattcgaagtcgcttaccagctagcactacaagcaagaaaagggggacactcctccacacttccagaaagctttgaaaacaaaccctccaaacccatccccaagccccgcgttagcattcgcaagtccgtggatcttcttcatgccagccataccgggcaggaaccatcagagagacacactgaggaggcactcagaaaattttgatagaattgaatttacatatagctgataaagcctaaatagaaaggttgatgtatttagcttgaatccttcactttagtggtctaatcaacagataaatgacaagcaaagaatgaaacaatccaaaaatgtttttcaaaa

SEQ ID NO: 2026 - DNA, 2973 bp, Homo sapiens
  source 1..2973: mol_type = unassigned DNA
gggtaatgaaggggagcgagcgagggggagcaaggagcatggagctgcatactgatgagtgacccagatgccctgtccaaacagtgggacaatggttggaaagcattgggctacctcagtacgagaaccacctgatggctaatggatttgacaatgtgcagtttatgggaagcaatgttatggaagatcaggatttgttggaaattggaatccttaattctgggcacagacaaagaattctacaggcaatccagctccttccaaagatgagacccattgggcatgatggctaccatcccacctctgtagctgagtggctggattccattgaactgggcgactacaccaaagcctttctaattaatggctacacttcgatggacctgttgaaaaaaatctgggaggttgaacttattaatcagtcgtctgtctgtgaaatatggacgaatcagaacgcaggatttcctttctcagcgatccatcaggttcataatacaggagactggggagaaccttccattaccttgcgacctccgaatgaagccacagcctctaccccggtacagtactggcagcatcacccagaaaagcttatcttccagtcgtgtgattacaaagctttttatttaggttctatgctgataaaagagcttagggggacagaatcaacccaagatgcttgtgcaaaaatgcgggctaactgtcagaagtctacagagcaaatgaagaaggtccctactattattctttctgtctcatataaaggagtcaaatttattgatgcaacaaataagaacataattgctgagcatgaaattcgtaatatctcctgtgctgcccaggacccagaagacctctcaacatttgcctatatcacaaaagatttgaagtctaatcaccactactgtcatgtgtttactgcctttgatgtgaatttagcctatgaaatcatcctaaccctgggacaggcattcgaagtcgcttaccagctagcactacaagcaagaaaagggggacactcctccacacttccagaaagctttgaaaacaaaccctccaaacccatccccaagccccgcgttagcattcgcaagtccgtgatcgacccatctgagcaaaagactctggccaatctaccgtggattgtggagccgggccaagaagccaagaggggcattaataccaagtatgaaaccacgattttctgatactcgccgtcctcctgtcctcgcggtgccttgctcgccaagcggtcccggagcaggctttccttcgcgcctccgcgtccacccagcccaggaggaagactgctctgagcgtgcggccttgttacgggcgaaaggccactggccattcctggggaagttctttctgcaccagtgatggaaaacgcaagactttccagtcgcaacccctgagaggcgtgagttgagatgggttttccctgatgctcccgactcccctccccaccacctcccaaggtatttctgatgactccgccccagtacttgctttgcttcatttggggaaaataataccttttctttaaaaaaaaaaaaaaaaaaaaaaaagtaaaggggatctctaatactgcctaaaagtatgctttcactgtcagcagttttaaaggtgaaatcagagcagcactacccctcccacctccaaagcatctgtaaaatcattctatcattgagtatcgtttaatgcaaaaggacaaaaacaactcccgtgatatgattgccaggagattctgtttccccatttctatatttgtggattttatatgtaatcacctatgtcagagaaagaaaacctttcaaccaaatgattggttcaaaaggaaagaatgattcaaagcagaggaatttattatgcacagcaaaatgtgtcttgtattaaatatttttattaaaagaatgtttcattaatgcattgataagaaaactaggttagttgcgagggatgtttctggtttcatttcaaataattaaatttctactgctactaccaagaggactggctcagtggtggcaaaatactggtgatgctccctagagcaggaggcccggaagtgctgacgcagccatcagcctgccaagattgttttttaatcttcacagtgttttaaagaacatgttaaaaaaaaaaaaatctagtgctcctgctgtcaagatttctgtcatggaaaccttgtttgagaaaggtgttaataaaattctattgcaaaaatttctttttctagaaaaaataaatacaaaaaaaaaaaagaagaaattccaaagtaataaaacttttcttgagacaaacaaaaaaaaagtttgcttactatttgattaaataaaatttacttacatttctttaaggtattttaattttttaatgtctctgtggagtatttgtatgataccataatgtatatttatgtagaatcaaattatataaacagtaccaatatcattatagaaaaaaataacattttaatgtatattgttctaacaatcatattgtgaatcattttgaagttcattatagcgatattgataaattgtggaattgtcttaatgtttttttattaactgacattattttaaacctaactgagatgatcagttacattcatcagttggtgagttttgaagaataactacattttatttcaaactaacaaatgtatacggttttagttcagtgttgaagaattttaatacaatattaaattacttgaactgaacagttccttgtatatattttgcctattcactgttgatatgtatgtagcaaaatgagagttaaataacactaaaatatggtaccaggaggcaattgtataggagcaaagttaataggagctttgctgaaacagaagcatatgtgtaaataagcttgggcttccagttataaattttgtaatttttgtcattatttatatcctataaaaaaagcacacaaaaataaaacagaagttgtacagca

SEQ ID NO: 2027 - DNA, 3328 bp, Homo sapiens
  source 1..3328: mol_type = unassigned DNA
attgctcattgtggagtactccaacaatcacatagaacgcagaccagcccaagctgacagcttgatatgccttcttctgctgcctggttttgggggctgtatgacgtactggtcggtagtaaagattaatatgtaagaaatgtggagctaggatcaagtcatactccacagcctgcctggcaaactatgttttacttctgactttgctctctcgctgagaacattaatctgtcaagctggcgggctcctttgatagcaactttcccaggggcatgatgtggcaatgccacctctcagcccaggactaccgctattaccccgtggacggctactccctgcttaaacgcttccctcttcatcctcttacaggacccagatgccctgtccaaacagtgggacaatggttggaaagcattgggctacctcagtacgagaaccacctgatggctaatggatttgacaatgtgcagtttatgggaagcaatgttatggaagatcaggatttgttggaaattggaatccttaattctgggcacagacaaagaattctacaggcaatccagctccttccaaagatgagacccattgggcatgatggctaccatcccacctctgtagctgagtggctggattccattgaactgggcgactacaccaaagcctttctaattaatggctacacttcgatggacctgttgaaaaaaatctgggaggttgaacttattaatgttttaaaaatcaatttgattggccacaggaaacgtattttggcatctctgggagacaggctgcacgacgatcccccacagaagccccctcggtccatcaccctcagggaacccagtggtaatcacactcctcctcagttgtctccatcacttagccaaagcacttacaccactggtggctccctagacgttcctcacattatcatgcagggcgatgcaaggaggagaagaaatgaaaactactttgatgatattccccgatcaaaactggagaggcagatggctcagtcgtctgtctgtgaaatatggacgaatcagaacgcaggatttcctttctcagcgatccatcaggttcataatacaggagactggggagaaccttccattaccttgcgacctccgaatgaagccacagcctctaccccggtacagtactggcagcatcacccagaaaagcttatcttccagtcgtgtgattacaaagctttttatttaggttctatgctgataaaagagcttagggggacagaatcaacccaagatgcttgtgcaaaaatgcgggctaactgtcagaagtctacagagcaaatgaagaaggtccctactattattctttctgtctcatataaaggagtcaaatttattgatgcaacaaataagaacataattgctgagcatgaaattcgtaatatctcctgtgctgcccaggacccagaagacctctcaacatttgcctatatcacaaaagatttgaagtctaatcaccactactgtcatgtgtttactgcctttgatgtgaatttagcctatgaaatcatcctaaccctgggacaggcattcgaagtcgcttaccagctagcactacaagcaagaaaagggggacactcctccacacttccagaaagctttgaaaacaaaccctccaaacccatccccaagccccgcgttagcattcgcaagtccgtgcagatcgacccatctgagcaaaagactctggccaatctaccgtggattgtggagccgggccaagaagccaagaggggcattaataccaagtatgaaaccacgattttctgatactcgccgtcctcctgtcctcgcggtgccttgctcgccaagcggtcccggagcaggctttccttcgcgcctccgcgtccacccagcccaggaggaagactgctctgagcgtgcggccttgttacgggcgaaaggccactggccattcctggggaagttctttctgcaccagtgatggaaaacgcaagactttccagtcgcaacccctgagaggcgtgagttgagatgggttttccctgatgctcccgactcccctccccaccacctcccaaggtatttctgatgactccgccccagtacttgctttgcttcatttggggaaaataataccttttctttaaaaaaaaaaaaaaaaaaaaaaaagtaaaggggatctctaatactgcctaaaagtatgctttcactgtcagcagttttaaaggtgaaatcagagcagcactacccctcccacctccaaagcatctgtaaaatcattctatcattgagtatcgtttaatgcaaaaggacaaaaacaactcccgtgatatgattgccaggagattctgtttccccatttctatatttgtggattttatatgtaatcacctatgtcagagaaagaaaacctttcaaccaaatgattggttcaaaaggaaagaatgattcaaagcagaggaatttattatgcacagcaaaatgtgtcttgtattaaatatttttattaaaagaatgtttcattaatgcattgataagaaaactaggttagttgcgagggatgtttctggtttcatttcaaataattaaatttctactgctactaccaagaggactggctcagtggtggcaaaatactggtgatgctccctagagcaggaggcccggaagtgctgacgcagccatcagcctgccaagattgttttttaatcttcacagtgttttaaagaacatgttaaaaaaaaaaaaatctagtgctcctgctgtcaagatttctgtcatggaaaccttgtttgagaaaggtgttaataaaattctattgcaaaaatttctttttctagaaaaaataaatacaaaaaaaaaaaagaagaaattccaaagtaataaaacttttcttgagacaaacaaaaaaaaagtttgcttactatttgattaaataaaatttacttacatttctttaaggtattttaattttttaatgtctctgtggagtatttgtatgataccataatgtatatttatgtagaatcaaattatataaacagtaccaatatcattatagaaaaaaataacattttaatgtatattgttctaacaatcatattgtgaatcattttgaagttcattatagcgatattgataaattgtggaattgtcttaatgtttttttattaactgacattattttaaacctaactgagatgatcagttacattcatcagttggtgagttttgaagaataactacattttatttcaaactaacaaatgtatacggttttagttcagtgttgaagaattttaatacaatattaaattacttgaactgaa

SEQ ID NO: 2028 - DNA, 2268 bp, Homo sapiens
  source 1..2268: mol_type = unassigned DNA
ctccaacaatcacatagaacgcagaccagcccaagctgacagcttgatatgccttcttctgctgcctggttttgggggctgtatgacgtactggtcggtagtaaagattaatatgtaagaaatgtggagctaggatcaagtcatactccacagcctgcctggcaaactatgttttacttctgactttgctctctcgctgagaacattaatctgtcaagctggcgggctcctttgatagcaactttcccaggggcatgatgtggcaatgccacctctcagcccaggactaccgctattaccccgtggacggctactccctgcttaaacgcttccctcttcatcctcttacaggacccagatgccctgtccaaacagtgggacaatggttggaaagcattgggctacctcagtacgagaaccacctgatggctaatggatttgacaatgtgcagtttatgggaagcaatgttatggaagatcaggatttgttggaaattggaatccttaattctgggcacagacaaagaattctacaggcaatccagctccttccaaagatgagacccattgggcatgatggctaccatcccacctctgtagctgagtggctggattccattgaactgggcgactacaccaaagcctttctaattaatggctacacttcgatggacctgttgaaaaaaatctgggaggttgaacttattaatgttttaaaaatcaatttgattggccacaggaaacgtattttggcatctctgggagacaggctgcacgacgatcccccacagaagccccctcggtccatcaccctcaggacaggagactggggagaaccttccattaccttgcgacctccgaatgaagccacagcctctaccccggtacagtactggcagcatcacccagaaaagcttatcttccagtcgtgtgattacaaagctttttatttaggttctatgctgataaaagagcttagggggacagaatcaacccaagatgcttgtgcaaaaatgcgggctaactgtcagaagtctacagagcaaatgaagaaggtccctactattattctttctgtctcatataaaggagtcaaatttattgatgcaacaaataagaacataattgctgagcatgaaattcgtaatatctcctgtgctgcccaggacccagaagacctctcaacatttgcctatatcacaaaagatttgaagtctaatcaccactactgtcatgtgtttactgcctttgatgtgaatttagcctatgaaatcatcctaaccctgggacaggcattcgaagtcgcttaccagctagcactacaagcaagaaaagggggacactcctccacacttccagaaagctttgaaaacaaaccctccaaacccatccccaagccccgcgttagcattcgcaagtccgtggatcttcttcatgccagccataccgggcaggaaccatcagagagacacactgaggaggcactcagaaaattttgatagaattgaatttacatatagctgataaagcctaaatagaaaggttgatgtatttagcttgaatccttcactttagtggtctaatcaacagataaatgacaagcaaagaatgaaacaatccaaaaatgtttttcaaaacaattttgtgaattttatttttacaaaaattttttaaattcatattttaaaatgtataccaaggcaaaaaaatcatataagctatatcataaatacaagagtttcaaaacatacaagagacatataatgtaaaaaaaaattatatatatgaagtccaatgtaatttataatacaaaaaaatacagcaagggaaaatgctttagaaatgctcatctgcaaactacaaaacaaaatcctcctcttgaccgactgcatgaactgccatgaaatttgcagctccatcatactaggtatctcttctttcttcatgttaccttgtctttcttcccatttttcttttaagacagggtcttgctatgtcacccaggctggactcaaactccagggctcaaggaatcctcctgtcttagcctcccaaggagctgggattacaggcacgtgccaccgcacctggctcctaatttctttttaagacaagggccattcaaggctttttaaaacctgatgtgtgttgttatactttataacagtcagtggcttttaattccaaaaggtaatactttatactctgcctacatgagatgagcccctaacagtgtgtacaaataaaattatgatttgggtattctaa

SEQ ID NO: 2029 - DNA, 3372 bp, Homo sapiens
  source 1..3372: mol_type = unassigned DNA
ctccaacaatcacatagaacgcagaccagcccaagctgacagcttgatatgccttcttctgctgcctggttttgggggctgtatgacgtactggtcggtagtaaagattaatatgtaagaaatgtggagctaggatcaagtcatactccacagcctgcctggcaaactatgttttacttctgactttgctctctcgctgagaacattaatctgtcaagctggcgggctcctttgatagcaactttcccaggggcatgatgtggcaatgccacctctcagcccaggactaccgctattaccccgtggacggctactccctgcttaaacgcttccctcttcatcctcttacaggacccagatgccctgtccaaacagtgggacaatggttggaaagcattgggctacctcagtacgagaaccacctgatggctaatggatttgacaatgtgcagtttatgggaagcaatgttatggaagatcaggatttgttggaaattggaatccttaattctgggcacagacaaagaattctacaggcaatccagctccttccaaagatgagacccattgggcatgatggctaccatcccacctctgtagctgagtggctggattccattgaactgggcgactacaccaaagcctttctaattaatggctacacttcgatggacctgttgaaaaaaatctgggaggttgaacttattaatgttttaaaaatcaatttgattggccacaggaaacgtattttggcatctctgggagacaggctgcacgacgatcccccacagaagccccctcggtccatcaccctcaggtcgtctgtctgtgaaatatggacgaatcagaacgcaggatttcctttctcagcgatccatcaggttcataatacaggagactggggagaaccttccattaccttgcgacctccgaatgaagccacagcctctaccccggtacagtactggcagcatcacccagaaaagcttatcttccagtcgtgtgattacaaagctttttatttaggttctatgctgataaaagagcttagggggacagaatcaacccaagatgcttgtgcaaaaatgcgggctaactgtcagaagtctacagagcaaatgaagaaggtccctactattattctttctgtctcatataaaggagtcaaatttattgatgcaacaaataagaacataattgctgagcatgaaattcgtaatatctcctgtgctgcccaggacccagaagacctctcaacatttgcctatatcacaaaagatttgaagtctaatcaccactactgtcatgtgtttactgcctttgatgtgaatttagcctatgaaatcatcctaaccctgggacaggcattcgaagtcgcttaccagctagcactacaagcaagaaaagggggacactcctccacacttccagaaagctttgaaaacaaaccctccaaacccatccccaagccccgcgttagcattcgcaagtccgtgcagatcgacccatctgagcaaaagactctggccaatctaccgtggattgtggagccgggccaagaagccaagaggggcattaataccaagtatgaaaccacgattttctgatactcgccgtcctcctgtcctcgcggtgccttgctcgccaagcggtcccggagcaggctttccttcgcgcctccgcgtccacccagcccaggaggaagactgctctgagcgtgcggccttgttacgggcgaaaggccactggccattcctggggaagttctttctgcaccagtgatggaaaacgcaagactttccagtcgcaacccctgagaggcgtgagttgagatgggttttccctgatgctcccgactcccctccccaccacctcccaaggtatttctgatgactccgccccagtacttgctttgcttcatttggggaaaataataccttttctttaaaaaaaaaaaaaaaaaaaaaaaagtaaaggggatctctaatactgcctaaaagtatgctttcactgtcagcagttttaaaggtgaaatcagagcagcactacccctcccacctccaaagcatctgtaaaatcattctatcattgagtatcgtttaatgcaaaaggacaaaaacaactcccgtgatatgattgccaggagattctgtttccccatttctatatttgtggattttatatgtaatcacctatgtcagagaaagaaaacctttcaaccaaatgattggttcaaaaggaaagaatgattcaaagcagaggaatttattatgcacagcaaaatgtgtcttgtattaaatatttttattaaaagaatgtttcattaatgcattgataagaaaactaggttagttgcgagggatgtttctggtttcatttcaaataattaaatttctactgctactaccaagaggactggctcagtggtggcaaaatactggtgatgctccctagagcaggaggcccggaagtgctgacgcagccatcagcctgccaagattgttttttaatcttcacagtgttttaaagaacatgttaaaaaaaaaaaaatctagtgctcctgctgtcaagatttctgtcatggaaaccttgtttgagaaaggtgttaataaaattctattgcaaaaatttctttttctagaaaaaataaatacaaaaaaaaaaaagaagaaattccaaagtaataaaacttttcttgagacaaacaaaaaaaaagtttgcttactatttgattaaataaaatttacttacatttctttaaggtattttaattttttaatgtctctgtggagtatttgtatgataccataatgtatatttatgtagaatcaaattatataaacagtaccaatatcattatagaaaaaaataacattttaatgtatattgttctaacaatcatattgtgaatcattttgaagttcattatagcgatattgataaattgtggaattgtcttaatgtttttttattaactgacattattttaaacctaactgagatgatcagttacattcatcagttggtgagttttgaagaataactacattttatttcaaactaacaaatgtatacggttttagttcagtgttgaagaattttaatacaatattaaattacttgaactgaacagttccttgtatatattttgcctattcactgttgatatgtatgtagcaaaatgagagttaaataacactaaaatatggtaccaggaggcaattgtataggagcaaagttaataggagctttgctgaaacagaagcatatgtgtaaataagcttgggcttccagttataaattttgtaatttttgtcattatttatatcctataaaaaaagcacacaaaaataaaacagaagttgtacagca

SEQ ID NO: 2030 - DNA, 1690 bp, Homo sapiens
  source 1..1690: mol_type = unassigned DNA
gtaacgtataaccagtatgaagattcaattcagatttaagcactttggtttgcttttgaatcttgctattttctgcatttgttttgactgctctcatcattcaagattgacgcttggatgggacccagatgccctgtccaaacagtgggacaatggttggaaagcattgggctacctcagtacgagaaccacctgatggctaatggatttgacaatgtgcagtttatgggaagcaatgttatggaagatcaggatttgttggaaattggaatccttaattctgggcacagacaaagaattctacaggcaatccagctccttccaaagatgagacccattgggcatgatggctaccatcccacctctgtagctgagtggctggattccattgaactgggcgactacaccaaagcctttctaattaatggctacacttcgatggacctgttgaaaaaaatctgggaggttgaacttattaatgttttaaaaatcaatttgattggccacaggaaacgtattttggcatctctgggagacaggctgcacgacgatcccccacagaagccccctcggtccatcaccctcaggacaggagactggggagaaccttccattaccttgcgacctccgaatgaagccacagcctctaccccggtacagtactggcagcatcacccagaaaagcttatcttccagtcgtgtgattacaaagctttttatttaggttctatgctgataaaagagcttagggggacagaatcaacccaagatgcttgtgcaaaaatgcgggctaactgtcagaagtctacagagcaaatgaagaaggtccctactattattctttctgtctcatataaaggagtcaaatttattgatgcaacaaataagaacataattgctgagcatgaaattcgtaatatctcctgtgctgcccaggacccagaagacctctcaacatttgcctatatcacaaaagatttgaagtctaatcaccactactgtcatgtgtttactgcctttgatgtgaatttagcctatgaaatcatcctaaccctgggacaggcattcgaagtcgcttaccagctagcactacaagcaagaaaagggggacactcctccacacttccagaaagctttgaaaacaaaccctccaaacccatccccaagccccgcgttagcattcgcaagtccgtgatcgacccatctgagcaaaagactctggccaatctaccgtggattgtggagccgggccaagaagccaagaggggcattaataccaagtatgaaaccacgattttctgatactcgccgtcctcctgtcctcgcggtgccttgctcgccaagcggtcccggagcaggctttccttcgcgcctccgcgtccacccagcccaggaggaagactgctctgagcgtgcggccttgttacgggcgaaaggccactggccattcctggggaagttctttctgcaccagtgatggaaaacgcaagactttccagtcgcaacccctgagaggcgtgagttgagatgggttttccctgatgctcccgactcccctccccaccacctcccaaggtatttctgatgactccgccccagtacttgctttgcttcatttggggaaaataataccttttctttaaaaaaaaaaaaaaaaaaaaaaaagtaaaggggatctctaatactgcct

SEQ ID NO: 2031 - DNA, 2906 bp, Homo sapiens
  source 1..2906: mol_type = unassigned DNA
ctgcctggagagacatctggccaagttctggtgagcaggaaaaatgtctactcgttaccaccaagctgctagtgatagttacctggaacttctaaaagaggctaccaagcgagatctaaatctttcggatgaagacggcatgactcctactctcttggcagcctaccatgggaacttggaagccctagagataatctgcagtagaggaggggaccctgataggtgtgacatctggggaaacactcctctacattttgcagcctccaatggccatgcccactgcgtctcattcctggtcaactttggtgccaacatctttgccctggataatgacttacagactccactggatgctgctgccagcagggagcagaatgaatgtgttgctctcctggacaaggctgccactgcacagaacatcatgaaccccaagaaggtcaccaggctgaaggagcaggctcagaagaatgccaggaggcagatcaaagagtgtgagaggctccaggagaagcaccaaaataagatggcccacacctacagcaaggaggaatccgggactctctcttcttccaagggtaccttctccagatcatccccttcaaatgcttctgctcctggcacattcgggtcactatctaagggcattaaagacactttcaagatcaagttcaagaagaacaaagatacagcagaacaggtggggaaggaaggcagaagtgggcagaggaacgtgatggaagtgttcagagaggaagaggaagactcgttctcaggggacttcaaagagaagctccagttgtcagcagaggaggacggcagtgtgcaccatgaatccattctcaatcgtccaggtctaggaagtattgtttttagaaggaacaggatatcgagtcctgaagacatctcagatagcaagagagagtttggttttaaactgcccagtgaattgcttcaaagacaaggagcatcagaggctgatgagggtgcagctgatgaagagggagaggaaaacggcctcaaagatgatctgccgtgggatgacgatgaagtggagtgggaggaagatgtggtcgatgccacgcccctggaagtgttcttgctgtctcagcacctggaagaattcctgcctatcttcaagagagagcagattgatctagaagctctgctgctctgctctgatgaggaccttcagagcatacaaatgcagctgggtcccaggaagaaagttctgaatgctatcaacaggaggaagcaggtgcttcaacagcctgggcagctggtcgacaccagcctgtgatggagagttttggcctggagcattggggtgatgctgtggcccgctggcagcactccaggcggcaccccctctttacccaatgccagaccactgggaatggattctagggcatcggaaatgcctacctgagagagagacccaaactttactctgggaggtaggctatgcccatccaaataaatctccatgagaaacttgaggagacttcataacaagaatctggcatttctcttcagttatcttatatgtacatataattgtttttgtggttgttttgttttgttttgttttgttttttggagatgaaggtctcagtctcttacccaggctagggtgcagtggtatgatcatagttcactgtattctcaacctcctgggctcaaatgatctcctcccacctcagcctcccaagtagctgagactacaggttcacaccccccacacctggcttattttgtatgttttagtagaggtggggtcttgccacattgcccaggctggtctcaaactcctggcctcaagcaatcctcccacctcagcctcctaaagcactgggattacaggtgtgaaccaccgtacccagcctatctttttgatacttttgaataaagaaagggtcatatgcatgacaggaaaatgaaagaaacttcctttacttttctatctctggatttaaaattataatctcatcacattatcctgctgcttgctttccgatctgtgtaacctgggaattccaattctttttctctcctgagatctatgactttgcctagtggtagagactagagttctttcctggcctgcggcttgatgcccaacttaaatgcatctaaccctttaacaaatgtgtacatgtttacaagtaatggaaatgcgtctataatactcctgcctgagaatagagacagagtggtggtggggagagtgaagaaagagatagaatacaggtggtacctgttgtggactgaattgcgtcaaattcatatgttggagctctaacccctaatgtgactgtaattggaaataagacctttaaagaagtgattaaggttaaatgaagtcataagaatgcaaccctaatcctgtaggactggtgtcctttttttccctttttttttttttttttgagatggagccttgctctgtcactcatgctggagtgcagtggcgtgatctcagctcactgcaacccccgcctcccaggttcgagcacttttcatgcctcagcctcctgagtagctgggattacaggcgtgcaccacaacgcctggctaagtttttgtatttttagtagaggcggggtttcaccatgttggccaggctggtctcaaactcctgacctcaggtgatccacctgcctcggcctcccagagtgctgggattacaggcatgagccactgcacctggcctaggactggtgtcctaagaagaggaagagacacttaggtggaaggcacacagagaggccacgtgaggacacagtgagaaggtggccgtctgcaagccgaggagggggcctcaggagaaaccaaccctgcaatcaccttgatcttgggctttcagcccccaaaggtgtgagaaaataaacttcggttgataaactgct

SEQ ID NO: 2032 - DNA, 9304 bp, Homo sapiens
  source 1..9304: mol_type = unassigned DNA
agaggccgccctgagacggtgcgcgatggaccgagggccccagccggggaggcgccgccgccgagcccgcggccagacgccccatcagtagcgtccgcaccgggagccgcggctctcgcccgagccgtgggcgcgcccgaggggcgggctcgcctcccgccgtccctcgcagctctgccgggcccgagcccgcgccgccgccgccgccgccttgccgctcgggccgcgcggcccgggaaacgcggccgcgggctgcatgggcagcgcccgcgccccgccgctgagccgtcgcggagccgcgcagccctcggagcacgaatatatacagccctgctctgggacacacctccattggatttaaaagacagtcctcgtcagcactgactttcagctatggaatcgcagacggttgatgatgaagcgccggccgtgtaaatgaagatcgggtgaggagcaggacgatgcccaagggtgggtgccctaaagcaccacagcaggaagagcttcccctcagcagcgacatggtggagaagcagactgggaaaaaggataaagataaagtttctctaaccaagaccccaaaactggagcgtggcgatggcgggaaggaggtgagggagcgagccagcaagcggaagctgcccttcaccgcgggcgccaatggggagcagaaggactcggacacagagaagcagggccctgagcggaagaggattaagaaggagcctgtcacccggaaggccgggctgctgtttggcatggggctgtctggaatccgagccggctaccccctctccgagcgccagcaggtggcccttctcatgcagatgacggccgaggagtctgccaacagcccagtggacacaacaccaaagcacccctcccagtctacagtgtgtcagaagggaacgcccaactctgcctcaaaaaccaaagataaagtgaacaagagaaacgagcgtggagagacccgcctgcaccgagccgccatccgcggggacgcccggcgcatcaaagagctcatcagcgagggggcagacgtcaacgtcaaggacttcgcaggctggacggcgctgcacgaggcctgtaaccggggctactacgacgtcgcgaagcagctgctggctgcaggtgcggaggtgaacaccaagggcctagatgacgacacgcctttgcacgacgctgccaacaacgggcactacaaggtggtgaagctgctgctgcggtacggagggaacccgcagcagagcaacaggaaaggcgagacgccgctgaaagtggccaactcccccacgatggtgaacctcctgttaggcaaaggcacttacacttccagcgaggagagctcgacggagagctcagaagaggaagacgcaccatccttcgcaccttccagttcagtcgacggcaacaacacggactccgagttcgaaaaaggcctcaagcacaaggccaagaacccagagccacagaaggccacggcccccgtcaaggacgagtatgagtttgatgaggacgacgagcaggacagggttcctccggtggacgacaagcacctattgaaaaaggactacagaaaagaaacgaaatccaatagttttatctctatacccaaaatggaggttaaaagttacactaaaaataacacgattgcaccaaagaaagcgtcccatcgtatcctgtcagacacgtcggacgaggaggacgcgagtgtcaccgtggggacaggagagaagctgagactctcggcacatacgatattgcctggtagtaagacacgagagccttctaatgccaagcagcagaaggaaaaaaataaagtgaaaaagaagcgaaagaaagaaacaaaaggcagagaggttcgcttcggaaagcggagcgacaagttctgctcctcggagtcggagagcgagtcctcagagagtggggaggatgacagggactctctggggagctctggctgcctcaaggggtccccgctggtgctgaaggacccctccctgttcagctccctctctgcctcctccacctcgtctcacgggagctctgccgcccagaagcagaaccccagccacacagaccagcacaccaagcactggcggacagacaattggaaaaccatttcttccccggcttggtcagaggtcagttctttatcagactccacaaggacgagactgacaagcgagtctgactactcctctgagggctccagtgtggaatcgctgaagccagtgaggaagaggcaggagcacaggaagcgagcctccctgtcggagaagaagagccccttcctgtccagcgcggagggcgctgtccccaaactggacaaggaggggaaagttgtcaaaaaacataaaacaaaacacaaacacaaaaacaaggagaagggacagtgttccatcagccaagagctgaagttgaaaagttttacttacgaatatgaggactccaagcagaagtcagataaggctatactgttagagaatgatctttccactgaaaacaagctaaaagtgttaaagcacgatcgcgaccactttaaaaaagaagagaaacttagcaaaatgaaattagaagaaaaagaatggctctttaaagatgaaaaatcactgaagagaatcaaagacacaaacaaagacatcagcaggtctttccgagaagagaaagaccgttcgaataaagcagaaaaggagagatcgctgaaggaaaagtctccgaaagaagaaaaactgagactgtacaaagaggagagaaagaagaaatcaaaagaccggccctcaaaattagagaagaagaatgatttaaaagaggacaaaatttcaaaagagaaggagaagatttttaaagaagataaagaaaaactcaaaaaagaaaaggtttatagggaagattctgcttttgacgaatattgtaacaaaaatcagtttctggagaatgaagacaccaaatttagcctttctgacgatcagcgagatcggtggttttctgacttgtccgattcatcctttgatttcaaaggggaggacagctgggactcgccagtgacagactacagggacatgaagagcgactctgtggccaagctcatcttggagacggtgaaggaggacagcaaggagaggaggcgggacagccgggcccgggagaagcgagactacagagagcccttcttccgaaagaaggacagggactatttggataaaaactctgagaagaggaaagagcagaccgaaaagcataaaagtgtccctggctacctttcggaaaaggacaagaagaggagagagtccgcagaggccgggcgggacagaaaggacgccctggagagctgcaaggagcgcagggacggcagggccaagcccgaggaggcgcaccgggaggagctgaaggagtgtggctgcgagagtggcttcaaggacaagtccgacggcgactttgggaagggcctggagccgtgggaacggcaccacccagcacgagagaaggagaagaaggatggccccgataaggaaaggaaggagaagacaaaaccagaaagatacaaagagaaatccagtgacaaggacaaaagtgagaaatcaatcctggaaaaatgtcagaaggacaaagaatttgataaatgttttaaagagaaaaaagataccaaggaaaaacataaagacacacatggcaaagacaaagaaaggaaagcgtctctcgaccaagggaaagagaagaaggagaaggctttccctgggatcatctcagaagacttctctgaaaaaaaagatgacaagaaaggcaaagagaaaagctggtacatcgcagacatcttcacagatgagagtgaggacgacagagacagctgcatggggagcgggttcaagatgggagaggccagcgacttgccgaggacggacggcctccaggagaaggaggaaggacgggaggcctatgcctccgacagacacaggaagtcttctgacaagcagcaccctgagaggcagaaggacaaggagcccagagacaggagaaaggaccgaggggctgccgacgcggggagagacaaaaaagagaaagtctttgaaaagcacaaggagaagaaggataaagagtccacagaaaagtacaaggacaggaaggacagagcctcagtggactccacgcaagataagaaaaataaacagaagctccccgagaaggctgaaaagaagcacgctgccgaagacaaggctaaaagcaaacacaaagagaagtcggacaaagaacattccaaggagaggaagtcctcgagaagtgccgacgcggaaaaaagcctgcttgaaaagttggaagaagaggctctccatgagtacagagaagactccaacgataaaatcagcgaggtctcctctgacagcttcacggaccgagggcaggagccggggctgactgccttcctggaggtctctttcacggagccacctggagacgacaagccgagggagagcgcctgcctccctgagaagctgaaagagaaggagaggcacagacactcctcatcttcatccaagaagagccacgaccgagagcgagccaagaaagagaaggccgagaagaaagagaagggcgaagattacaaggagggcggtagcaggaaggactccggccagtacgaaaaggacttcctggaggcggatgcttacggagtttcttacaacatgaaagctgacatagaagatgagctagataaaaccattgaattgttttctaccgaaaagaaagataaaaatgattccgagagagaaccttccaagaaaatagaaaaggaactaaagccttatggatctagtgccatcaacatcctaaaagagaagaagaagagagagaaacacagggagaaatggagagacgagaaggagaggcaccgggacaggcatgcggatgggctgctgcggcatcacagggacgagctcctgcggcatcacagggacgagcagaagcccgccaccagggacaaggacagcccgccccgcgtgctcaaagacaagtccagggacgagggcccgaggctcggcgatgccaaactgaaggagaaattcaaggacggtgcagagaaagaaaagggcgacccagtgaagatgagcaacgggaatgataaggtagcgccatccaaagacccaggcaagaaagacgccaggcccagggagaagctcctgggggacggcgacctgatgatgaccagcttcgagaggatgctgtcccagaaggacctggagatcgaggagcgccacaagcggcacaaggagaggatgaagcaaatggagaagctgaggcaccggtccggagaccccaagctcaaggagaaggcgaagccggcagacgacgggcggaagaagggtctggacattcctgctaagaaaccgccggggctggaccctccatttaaagacaaaaagctcaaagagtcgactcctattccacctgccgcggaaaataagctacacccagcatcaggtgcagactccaaagactggctggcaggccctcacatgaaagaggtcctgcctgcgtcccccaggcctgaccagagccggcccactggcgtgcccacccctacgtcggtgctatcctgccccagctacgaggaggtgatgcacacgcccaggaccccgtcctgcagcgccgatgactacgcggacctcgtgttcgactgcgccgactcgcagcactccacgcccgtgcccaccgctcccaccagcgcctgctccccctcctttttcgacaggttctccgtggcttcaagtgggctttcggaaaacgccagccaggctcctgccaggcctctctccacaaacctttaccgctcggtctctgtcgacattaggaggacccccgaggaagaattcagcgtcggagacaagctcttcaggcagcagagcgttcctgctgcctccagctacgactctcccatgccaccctcgatggaagacagggcgcccctgcccccggttcccgcggagaagtttgcctgcttgtcgccagggtactactccccagactatggcctcccgtcgcccaaagtcgacgctttgcactgcccaccggctgccgttgtcactgtcaccccgtctccagagggcgtcttctcaagtttacaagcaaaaccttccccttcccccagagccgagctgctggttccttccctcgaaggggcccttcccccggacctggacacctccgaggaccagcaggcgacggccgccatcatccccccggagcccagctacctggagccgctggacgagggtcccttcagcgccgtcatcaccgaggagcccgttgagtgggcccacccctccgagcaggcgcttgcctctagcctgatcgggggcacctctgaaaaccctgtgagctggcctgtgggctcggacctcctgctgaagtctccacagagattccccgagtccccaaagcgtttctgccccgcggaccccctccactctgccgccccagggcccttcagcgcctcggaggcgccgtaccccgcccctcccgcctctcctgccccgtacgctctgcccgtcgctgagccggggctggaggacgtcaaggacggagtggacgccgtccccgccgccatctccacctcagaggcggctccctacgcccctccctccgggctggagtccttcttcagcaactgcaagtcacttccggaagccccgctggacgtggcccccgagcccgcctgtgtagccgctgtggctcaggtggaggctctggggcccctggaaaatagcttcctggacggcagccgcggcctgtctcacctcggccaggtggagccggtgccctgggcggacgccttcgccggccccgaggacgacctggacctggggcccttctccctgccggagcttcccctgcagactaaagatgccgcagatggtgaagcggaacccgtggaagaaagtcttgctcctccagaagagatgcctccaggggcccccggggtcataaacggtggggatgtttccaccgtagtggctgaggagccgccggcactgcctcctgaccaggcctccacccggctccctgcagagctcgagcctgagccctcaggggagccaaagctggacgtggctctagaagctgcggtggaggcggagacggtgccggaagagagggcccgtggggatccggactccagcgtggagcccgcgcccgttcccccagaacagcgcccactggggagcggagaccagggggctgaggctgaaggcccccccgccgcgtccctctgtgcccctgacggccccgccccgaacactgtggcacaagctcaggccgcagacggtgccggccccgaggacgacactgaggcctcccgtgccgccgccccagccgaaggccctcctggcggcatccagccggaagccgcagaaccaaaacccacggccgaagccccgaaggccccccgagtggaggagatccctcagcgcatgaccaggaaccgggcgcagatgctcgcgaaccagagcaagcagggcccgcccccctccgagaaggagtgcgcccccacccctgccccggtcaccagggccaaggcccgcggctccgaggacgacgacgcccaggcccagcatccgcgcaaacgccgctttcagcgctccacccagcagctgcagcagcagctgaacacgtccacgcagcagacgcgggaggtgatccagcagacgctggccgccatcgtggacgccatcaagctggatgccatcgagccctaccacagcgacagggccaacccctacttcgaatacctgcagatcaggaagaagatcgaggagaagcgcaagatcctgtgctgtatcacgccgcaggcgccccagtgctacgccgagtacgtcacctacacgggctcctacctcctggacggcaagccgctcagcaagctccacatccccgtgatcgcaccccctccctccctggcggagcccctgaaggagctgttcaggcagcaggaggccgtccggggaaagctgcgtctacagcacagcatcgagcgggagaagctgatcgtatcctgtgagcaggagattctgcgggttcactgccgggcggccaggaccatcgccaaccaggcagtgccattcagcgcctgcacgatgctgctggactccgaggtctacaacatgcccctggagagccagggtgacgagaacaagtcagtgcgcgaccgtttcaacgcccgccagttcatctcctggctccaggacgtggatgacaagtatgaccgcatgaagacttgcctcctcatgcggcagcagcacgaggccgcggccctgaacgccgtgcagaggatggagtggcagctgaaggtgcaggaactggaccccgccgggcacaagtccctgtgcgtgaacgaggtgccctccttctacgtgcccatggtcgacgtcaacgacgactttgtattgttgccggcatgacaccgcgggacggccgcaggacgcaggcgagggccgcacggctgcccaggactgctgctgagccccaggggcggaggagggagcgccctgtccacccgggcggggagagaccccgagagagactgcacttggccacagcgcctccatcccttccagactggtccagacgtcggggaggtgaaacacgtctcttctctaccagctgccgcggcgggggcaaagcccccagagcctcactggccccggcgggatgaggagaccatgccgggcgcgcacacacggcagcttctgtttgaaaacggcgaccttcgggcccttttctccagcaactgcagaggcatttcaggagttggagaacggagtacatttttaaaattttttgttccattctgatcaactaaagaaaattaaggtgtccacctctcacaaacagtgacctgcaggtcggaggggcaggagccccatcccagccgtggttctgttgccgccgagctgcgacggcctcagactgggcttcagacctggtgcggagccaggcggagggacacagagccaggactcccagccgtattgaaatggagtcaaatccgcgtggtttgtatcttctttcctttaatcttgggcattttgtttctctttctgagaacgtaacttgaaacactacagagccaataatcatataaaaagtgtatccgtaaacgctgtacagttttatataccttcacaatgtacttttgctgccttctagataatttattttgcaacacattactgcacagttgtaaataacttatgtactgtaacatcactttcagttatgtgtaaagaaataaataaattaattaaaatgc

SEQ ID NO: 2033 - DNA, 1833 bp, Homo sapiens
  source 1..1833: mol_type = unassigned DNA
tctatacccaaaatggaggttaaaagttacactaaaaataacacgattgcaccaaagaaagcgtcccatcgtatcctgtcagacacgtcggacgaggaggacgcgagtgtcaccgtggggacaggagagaagctgagactctcggcacatacgatattgcctggtagtaagacacgagagccttctaatgccaagcagcagaaggaaaaaaataaagtgaaaaagaagcgaaagaaagaaacaaaaggcagagaggttcgcttcggaaagcggagcgacaagttctgctcctcggagtcggagagcgagtcctcagagagtggggaggatgacagggactctctggggagctctggctgcctcaaggggtccccgctggtgctgaaggacccctccctgttcagctccctctctgcctcctccacctcgtctcacgggagctctgccgcccagaagcagaaccccagccacacagaccagcacaccaagcactggcggacagacaattggaaaaccatttcttccccggcttggtcagaggtcagttctttatcagactccacaaggacgagactgacaagcgagtctgactactcctctgagggctccagtgtggaatcgctgaagccagtgaggaagaggcaggagcacaggaagcgagcctccctgtcggagaagaagagccccttcctgtccagcgcggagggcgctgtccccaaactggacaaggaggggaaagttgtcaaaaaacataaaacaaaacacaaacacaaaaacaaggagaagggacagtgttccatcagccaagagctgaagttgaaaagttttacttacgaatatgaggactccaagcagaagtcagataaggctatactgttagagaatgatctttccactgaaaacaagctaaaagtgttaaagcacgatcgcgaccactttaaaaaagaagagaaacttagcaaaatgaaattagaagaaaaagaatggctctttaaagatgaaaaatcactgaagagaatcaaagacacaaacaaagacatcagcaggtctttccgagaagagaaagaccgttcgaataaagcagaaaaggagagatcgctgaaggaaaagtctccgaaagaagaaaaactgagactgtacaaagaggagagaaagaagaaatcaaaagaccggccctcaaaattagagaagaagaatgatttaaaagaggacaaaatttcaaaagagaaggagaagatttttaaagaagataaagaaaaactcaaaaaagaaaaggtttatagggaagattctgcttttgacgaatattgtaacaaaaatcagtttctggagaatgaagacaccaaatttagcctttctgacgatcagcgagatcggtggttttctgacttgtccgattcatcctttgatttcaaaggggaggacagctgggactcgccagtgacagactacagggacatgaagagcgactctgtggccaagctcatcttggagacggtgaaggaggacagcaaggagaggaggcgggacagccgggcccgggagaagcgagactacagagagcccttcttccgaaagaaggacagggactatttggataaaaactctgagaagaggaaagagcagaccgaaaagcataaaagtgtccctggctacctttcggaaaagcacgagagaaggagaagaaggatggccccgataaggaaaggaaggagaagacaaaaccagaaagatacaaagagaaatccagtgacaaggacaaaagtgagaaatcaatcctggaaaaatgtcagaaggacaaagaatttgataaatgttttaaagagaaaaaag

SEQ ID NO: 2034 - DNA, 9129 bp, Homo sapiens
  source 1..9129: mol_type = unassigned DNA
ggccgcgggctgcatgggcagcgcccgcgccccgccgctgagccgtcgcggagccgcgcagccctcggagcacgcccgtgcagcctgccaggactcttccagacacgggatttgtcggtgaacaacgcagagctgatgcagacataatatatacagccctgctctgggacacacctccattggatttaaaagacagtcctcgtcagcactgactttcagctatggaatcgcagacggttgatgatgaagcgccggccgtgtaaatgaagatcgggtgaggagcaggacgatgcccaagggtgggtgccctaaagcaccacagcaggaagagcttcccctcagcagcgacatggtggagaagcagactgggaaaaaggataaagataaagtttctctaaccaagaccccaaaactggagcgtggcgatggcgggaaggaggtgagggagcgagccagcaagcggaagctgcccttcaccgcgggcgccaatggggagcagaaggactcggacacagagaagcagggccctgagcggaagaggattaagaaggagcctgtcacccggaaggccgggctgctgtttggcatggggctgtctggaatccgagccggctaccccctctccgagcgccagcaggtggcccttctcatgcagatgacggccgaggagtctgccaacagcccagtggacacaacaccaaagcacccctcccagtctacagtgtgtcagaagggaacgcccaactctgcctcaaaaaccaaagataaagtgaacaagagaaacgagcgtggagagacccgcctgcaccgagccgccatccgcggggacgcccggcgcatcaaagagctcatcagcgagggggcagacgtcaacgtcaaggacttcgcaggctggacggcgctgcacgaggcctgtaaccggggctactacgacgtcgcgaagcagctgctggctgcaggtgcggaggtgaacaccaagggcctagatgacgacacgcctttgcacgacgctgccaacaacgggcactacaaggtggtgaagctgctgctgcggtacggagggaacccgcagcagagcaacaggaaaggcgagacgccgctgaaagtggccaactcccccacgatggtgaacctcctgttaggcaaaggcacttacacttccagcgaggagagctcgacggagagctcagaagaggaagacgcaccatccttcgcaccttccagttcagtcgacggcaacaacacggactccgagttcgaaaaaggcctcaagcacaaggccaagaacccagagccacagaaggccacggcccccgtcaaggacgagtatgagtttgatgaggacgacgagcaggacagggttcctccggtggacgacaagcacctattgaaaaaggactacagaaaagaaacgaaatccaatagttttatctctatacccaaaatggaggttaaaagttacactaaaaataacacgattgcaccaaagaaagcgtcccatcgtatcctgtcagacacgtcggacgaggaggacgcgagtgtcaccgtggggacaggagagaagctgagactctcggcacatacgatattgcctggtagtaagacacgagagccttctaatgccaagcagcagaaggaaaaaaataaagtgaaaaagaagcgaaagaaagaaacaaaaggcagagaggttcgcttcggaaagcggagcgacaagttctgctcctcggagtcggagagcgagtcctcagagagtggggaggatgacagggactctctggggagctctggctgcctcaaggggtccccgctggtgctgaaggacccctccctgttcagctccctctctgcctcctccacctcgtctcacgggagctctgccgcccagaagcagaaccccagccacacagaccagcacaccaagcactggcggacagacaattggaaaaccatttcttccccggcttggtcagaggtcagttctttatcagactccacaaggacgagactgacaagcgagtctgactactcctctgagggctccagtgtggaatcgctgaagccagtgaggaagaggcaggagcacaggaagcgagcctccctgtcggagaagaagagccccttcctgtccagcgcggagggcgctgtccccaaactggacaaggaggggaaagttgtcaaaaaacataaaacaaaacacaaacacaaaaacaaggagaagggacagtgttccatcagccaagagctgaagttgaaaagttttacttacgaatatgaggactccaagcagaagtcagataaggctatactgttagagaatgatctttccactgaaaacaagctaaaagtgttaaagcacgatcgcgaccactttaaaaaagaagagaaacttagcaaaatgaaattagaagaaaaagaatggctctttaaagatgaaaaatcactgaagagaatcaaagacacaaacaaagacatcagcaggtctttccgagaagagaaagaccgttcgaataaagcagaaaaggagagatcgctgaaggaaaagtctccgaaagaagaaaaactgagactgtacaaagaggagagaaagaagaaatcaaaagaccggccctcaaaattagagaagaagaatgatttaaaagaggacaaaatttcaaaagagaaggagaagatttttaaagaagataaagaaaaactcaaaaaagaaaaggtttatagggaagattctgcttttgacgaatattgtaacaaaaatcagtttctggagaatgaagacaccaaatttagcctttctgacgatcagcgagatcggtggttttctgacttgtccgattcatcctttgatttcaaaggggaggacagctgggactcgccagtgacagactacagggacatgaagagcgactctgtggccaagctcatcttggagacggtgaaggaggacagcaaggagaggaggcgggacagccgggcccgggagaagcgagactacagagagcccttcttccgaaagaaggacagggactatttggataaaaactctgagaagaggaaagagcagaccgaaaagcataaaagtgtccctggctacctttcggaaaaggacaagaagaggagagagtccgcagaggccgggcgggacagaaaggacgccctggagagctgcaaggagcgcagggacggcagggccaagcccgaggaggcgcaccgggaggagctgaaggagtgtggctgcgagagtggcttcaaggacaagtccgacggcgactttgggaagggcctggagccgtgggaacggcaccacccagcacgagagaaggagaagaaggatggccccgataaggaaaggaaggagaagacaaaaccagaaagatacaaagagaaatccagtgacaaggacaaaagtgagaaatcaatcctggaaaaatgtcagaaggacaaagaatttgataaatgttttaaagagaaaaaagataccaaggaaaaacataaagacacacatggcaaagacaaagaaaggaaagcgtctctcgaccaagggaaagagaagaaggagaaggctttccctgggatcatctcagaagacttctctgaaaaaaaagatgacaagaaaggcaaagagaaaagctggtacatcgcagacatcttcacagatgagagtgaggacgacagagacagctgcatggggagcgggttcaagatgggagaggccagcgacttgccgaggacggacggcctccaggagaaggaggaaggacgggaggcctatgcctccgacagacacaggaagtcttctgacaagcagcaccctgagaggcagaaggacaaggagcccagagacaggagaaaggaccgaggggctgccgacgcggggagagacaaaaaagagaaagtctttgaaaagcacaaggagaagaaggataaagagtccacagaaaagtacaaggacaggaaggacagagcctcagtggactccacgcaagataagaaaaataaacagaagctccccgagaaggctgaaaagaagcacgctgccgaagacaaggctaaaagcaaacacaaagagaagtcggacaaagaacattccaaggagaggaagtcctcgagaagtgccgacgcggaaaaaagcctgcttgaaaagttggaagaagaggctctccatgagtacagagaagactccaacgataaaatcagcgaggtctcctctgacagcttcacggaccgagggcaggagccggggctgactgccttcctggaggtctctttcacggagccacctggagacgacaagccgagggagagcgcctgcctccctgagaagctgaaagagaaggagaggcacagacactcctcatcttcatccaagaagagccacgaccgagagcgagccaagaaagagaaggccgagaagaaagagaagggcgaagattacaaggagggcggtagcaggaaggactccggccagtacgaaaaggacttcctggaggcggatgcttacggagtttcttacaacatgaaagctgacatagaagatgagctagataaaaccattgaattgttttctaccgaaaagaaagataaaaatgattccgagagagaaccttccaagaaaatagaaaaggaactaaagccttatggatctagtgccatcaacatcctaaaagagaagaagaagagagagaaacacagggagaaatggagagacgagaaggagaggcaccgggacaggcatgcggatgggctgctgcggcatcacagggacgagctcctgcggcatcacagggacgagcagaagcccgccaccagggacaaggacagcccgccccgcgtgctcaaagacaagtccagggacgagggcccgaggctcggcgatgccaaactgaaggagaaattcaaggacggtgcagagaaagaaaagggcgacccagtgaagatgagcaacgggaatgataaggtagcgccatccaaagacccaggcaagaaagacgccaggcccagggagaagctcctgggggacggcgacctgatgatgaccagcttcgagaggatgctgtcccagaaggacctggagatcgaggagcgccacaagcggcacaaggagaggatgaagcaaatggagaagctgaggcaccggtccggagaccccaagctcaaggagaaggcgaagccggcagacgacgggcggaagaagggtctggacattcctgctaagaaaccgccggggctggaccctccatttaaagacaaaaagctcaaagagtcgactcctattccacctgccgcggaaaataagctacacccagcatcaggtgcagactccaaagactggctggcaggccctcacatgaaagaggtcctgcctgcgtcccccaggcctgaccagagccggcccactggcgtgcccacccctacgtcggtgctatcctgccccagctacgaggaggtgatgcacacgcccaggaccccgtcctgcagcgccgatgactacgcggacctcgtgttcgactgcgccgactcgcagcactccacgcccgtgcccaccgctcccaccagcgcctgctccccctcctttttcgacaggttctccgtggcttcaagtgggctttcggaaaacgccagccaggctcctgccaggcctctctccacaaacctttaccgctcggtctctgtcgacattaggaggacccccgaggaagaattcagcgtcggagacaagctcttcaggcagcagagcgttcctgctgcctccagctacgactctcccatgccaccctcgatggaagacagggcgcccctgcccccggttcccgcggagaagtttgcctgcttgtcgccagggtactactccccagactatggcctcccgtcgcccaaagtcgacgctttgcactgcccaccggctgccgttgtcactgtcaccccgtctccagagggcgtcttctcaagtttacaagcaaaaccttccccttcccccagagccgagctgctggttccttccctcgaaggggcccttcccccggacctggacacctccgaggaccagcaggcgacggccgccatcatccccccggagcccagctacctggagccgctggacgagggtcccttcagcgccgtcatcaccgaggagcccgttgagtgggcccacccctccgagcaggcgcttgcctctagcctgatcgggggcacctctgaaaaccctgtgagctggcctgtgggctcggacctcctgctgaagtctccacagagattccccgagtccccaaagcgtttctgccccgcggaccccctccactctgccgccccagggcccttcagcgcctcggaggcgccgtaccccgcccctcccgcctctcctgccccgtacgctctgcccgtcgctgagccggggctggaggacgtcaaggacggagtggacgccgtccccgccgccatctccacctcagaggcggctccctacgcccctccctccgggctggagtccttcttcagcaactgcaagtcacttccggaagccccgctggacgtggcccccgagcccgcctgtgtagccgctgtggctcaggtggaggctctggggcccctggaaaatagcttcctggacggcagccgcggcctgtctcacctcggccaggtggagccggtgccctgggcggacgccttcgccggccccgaggacgacctggacctggggcccttctccctgccggagcttcccctgcagactaaagatgccgcagatggtgaagcggaacccgtggaagaaagtcttgctcctccagaagagatgcctccaggggcccccggggtcataaacggtggggatgtttccaccgtagtggctgaggagccgccggcactgcctcctgaccaggcctccacccggctccctgcagagctcgagcctgagccctcaggggagccaaagctggacgtggctctagaagctgcggtggaggcggagacggtgccggaagagagggcccgtggggatccggactccagcgtggagcccgcgcccgttcccccagaacagcgcccactggggagcggagaccagggggctgaggctgaaggcccccccgccgcgtccctctgtgcccctgacggccccgccccgaacactgtggcacaagctcaggccgcagacggtgccggccccgaggacgacactgaggcctcccgtgccgccgccccagccgaaggccctcctggcggcatccagccggaagccgcagaaccaaaacccacggccgaagccccgaaggccccccgagtggaggagatccctcagcgcatgaccaggaaccgggcgcagatgctcgcgaaccagagcaagcagggcccgcccccctccgagaaggagtgcgcccccacccctgccccggtcaccagggccaaggcccgcggctccgaggacgacgacgcccaggcccagcatccgcgcaaacgccgctttcagcgctccacccagcagctgcagcagcagctgaacacgtccacgcagcagacgcgggaggtgatccagcagacgctggccgccatcgtggacgccatcaagctggatgccatcgagccctaccacagcgacagggccaacccctacttcgaatacctgcagatcaggaagaagatcgaggagaagcgcaagatcctgtgctgtatcacgccgcaggcgccccagtgctacgccgagtacgtcacctacacgggctcctacctcctggacggcaagccgctcagcaagctccacatccccgtgatcgcaccccctccctccctggcggagcccctgaaggagctgttcaggcagcaggaggccgtccggggaaagctgcgtctacagcacagcatcgagcgggagaagctgatcgtatcctgtgagcaggagattctgcgggttcactgccgggcggccaggaccatcgccaaccaggcagtgccattcagcgcctgcacgatgctgctggactccgaggtctacaacatgcccctggagagccagggtgacgagaacaagtcagtgcgcgaccgtttcaacgcccgccagttcatctcctggctccaggacgtggatgacaagtatgaccgcatgaagacttgcctcctcatgcggcagcagcacgaggccgcggccctgaacgccgtgcagaggatggagtggcagctgaaggtgcaggaactggaccccgccgggcacaagtccctgtgcgtgaacgaggtgccctccttctacgtgcccatggtcgacgtcaacgacgactttgtattgttgccggcatgacaccgcgggacggccgcaggacgcaggcgagggccgcacggctgcccaggactgctgctgagccccaggggcggaggagggagcgccctgtccacccgggcggggagagaccccgagagagactgcacttggccacagcgcctccatcccttccagactggtccagacgtcggggaggtgaaacacgtctcttctctaccagctgccgcggcgggggcaaagcccccagagcctcactggccccggcgggatgaggagaccatgccgggcgcgcacacacggcagcttctgtttgaaaacggcgaccttcgggcccttttctccagcaactgcagaggcatttcaggagttggagaacggagtacatttttaaaattttttgttccattctgatcaactaaagaaaattaaggtgtccacctctcacaaacagtgacctgcaggtcggaggggcaggagccccatcccagccgtggttctgttgccgccgagctgcgacggcctcagactgggcttcagacctggtgcggagccaggcggagggacacagagccaggactcccagccgtattgaaatggagtcaaatccgcgtggtttgtatcttctttcctttaatcttgggcattttgtttctctttctgagaacgtaacttgaaacactacagagccaataatcatataaaaagtgtatccgtaaacgctgtacagttttatataccttcacaatgtacttttgctgccttctagataatttattttgcaacacattactgcacagttgtaaataacttatgtactgtaacatcactttcagttatgtgtaaagaaataaataaattaattaaaa

SEQ ID NO: 2035 - DNA, 1736 bp, Homo sapiens
  source 1..1736: mol_type = unassigned DNA
agaggccgccctgagacggtgcgcgatggaccgagggccccagccggggaggcgccgccgccgagcccgcggccagacgccccatcagtagcgtccgcaccgggagccgcggctctcgcccgagccgtgggcgcgcccgaggggcgggctcgcctcccgccgtccctcgcagctctgccgggcccgagcccgcgccgccgccgccgccgccttgccgctcgggccgcgcggcccgggaaacgcggccgcgggctgcatgggcagcgcccgcgccccgccgctgagccgtcgcggagccgcgcagccctcggagcacgaatatatacagccctgctctgggacacacctccattggatttaaaagacagtcctcgtcagcactgactttcagctatggaatcgcagacggttgatgatgaagcgccggccgtgtaaatgaagatcgggtgaggagcaggacgatgcccaagggtgggtgccctaaagcaccacagcaggaagagcttcccctcagcagcgacatggtggagaagcagactgggaaaaaggataaagataaagtttctctaaccaagaccccaaaactggagcgtggcgatggcgggaaggaggtgagggagcgagccagcaagcggaagctgcccttcaccgcgggcgccaatggggagcagaaggactcggacacagagaagcagggccctgagcggaagaggattaagaaggagcctgtcacccggaaggccgggctgctgtttggcatggggctgtctggaatccgagccggctaccccctctccgagcgccagcaggtggcccttctcatgcagatgacggccgaggagtctgccaacagcccagtggacacaacaccaaagcacccctcccagtctacagtgtgtcagaagggaacgcccaactctgcctcaaaaaccaaagataaagtgaacaagagaaacgagcgtggagagacccgcctgcaccgagccgccatccgcggggacgcccggcgcatcaaagagctcatcagcgagggggcagacgtcaacgtcaaggacttcgcaggctggacggcgctgcacgaggcctgtaaccggggctactacgacgtcgcgaagcagctgctggctgcaggtgcggaggtgaacaccaagggcctagatgacgacacgcctttgcacgacgctgccaacaacgggcactacaaggtggtgaagctgctgctgcggtacggagggaacccgcagcagagcaacaggaaaggcgagacgccgctgaaagtggccaactcccccacgatggtgaacctcctgttaggcaaaggcacttacacttccagcgaggagagctcgacggagagctcagaagaggaagacgcaccatccttcgcaccttccagttcagtcgacggcaacaacacggactccgagttcgaaaaaggcctcaagcacaaggccaagaacccagagccacagaaggccacggcccccgtcaaggacgagtatgagtttgatgaggacgacgagcaggacagggttcctccggtggacgacaagcacctattgaaaaaggactacagaaaagaaacgaaatccaatagttttatctctatacccaaaatggagaaagttacactaaaaataacacgattgcaccaaagaaagcgtcccatcgtatcctgtcagacacgtcggacgaggaggacgcgagtgtcaccgtggggacaggagagaagctga

SEQ ID NO: 2036 - DNA, 9069 bp, Homo sapiens
  source 1..9069: mol_type = unassigned DNA
aatcgcggggcgacgctgtcctgggagcgaggaggctgtggtgagagacggaccgagaccggagatgttttcaagcccggctccggcggctttacaggcggctgcagcggcgacgaagacaacgacagcgacggctacgccgaagcactcgttccgggggtgaagcctcctgcgccggccttgcctcggatccaggatgagaagactgataaaagaagaagctagctgaacagctgtaaaatgcccaaatctgggttcacaaaaccaattcagagtgaaaattctgacagtgacagcaatatggtagagaaaccatatggaagaaagagtaaagacaagattgcatcctacagcaaaactccaaaaattgaacgaagtgatgtgagcaaggagatgaaagagaaatcatccatgaaacgtaaacttccttttactattagcccatcaagaaatgaagaacgagattcagacacagattcagatccaggacatacaagtgaaaattggggggagagacttatatcttcttacaggacatactcagagaaagaaggtccagaaaagaagaagacaaaaaaggaagctggaaataagaaatccacaccagttagcattctttttggttatccactctctgagcgaaaacagatggcacttcttatgcagatgacagcaagagacaacagtccagattccacaccaaatcatccatcacaaacaacgcctgcccaaaagaaaactcccagttcttcatctcgacagaaagataaagttaataaaagaaatgaacgtggtgaaactcctttacacatggctgctattcgaggagatgtgaaacaagttaaagaattaataagtttaggggcaaatgtgaatgtgaaagattttgcaggttggacaccactgcatgaagcttgcaatgttggatattacgatgttgctaagatacttatagcagctggagcagatgttaacacacaaggattagatgatgacactccactccatgattctgctagtagtgggcacagagatatagtaaagctgttacttcgtcacggtggaaatccatttcaagctaataaacatggggagcgtccagtggatgtagcagaaacagaggagttggagttgctactaaaaagagaggtgcctttatctgatgatgatgaaagttacacagattccgaagaggctcaatctgtaaatccttctagtgttgatgaaaatattgactctgaaacagagaaagactctctcatctgtgaaagtaaacagatacttcccagtaaaacacctcttccatctgcccttgatgagtatgagttcaaagatgatgatgatgaagaaattaataagatgattgatgataggcatattcttaggaaagaacaacgaaaagaaaatgaacctgaagcagaaaaaactcatttatttgcaaaacaggagaaagccttctatcctaaatcatttaaaagtaaaaaacaaaagccatctagggtcttatattcaagtactgaaagttctgatgaagaagctcttcagaataaaaagatttctacttcatgttccgtcatccctgaaacatcaaattctgatatgcaaaccaaaaaggaatatgtagtttcaggtgaacacaaacagaaaggcaaagttaaaagaaaattgaaaaatcagaataaaaataaagagaaccaagagctaaagcaagaaaaggaaggaaaagaaaatacaagaataacaaacttgacagtaaatactggactagattgttcagaaaagaccagagaggaggggaactttaggaaatcttttagcccaaaagatgatacttcattacatttatttcatatttccactggtaaatctcccaaacattcttgtggattaagtgaaaaacagtcaacaccactaaaacaagaacatactaaaacatgtttatcaccaggaagttctgaaatgtcattacagcctgatcttgttcggtatgataatacagaatctgaattcttgccagaaagttcaagtgtaaaatcttgtaagcataaggaaaaaagcaaacatcagaaagatttccacttagaatttggtgaaaaatcaaatgccaaaataaaggatgaagatcatagtccaacatttgaaaattcagattgcacactgaaaaaaatggataaagaaggtaaaacattaaaaaaacataaattgaagcataaagagagggaaaaagaaaagcataaaaaagaaattgaaggtgaaaaggaaaaatacaaaactaaggatagtgccaaagaactgcagaggagtgtggaatttgatagagaattttggaaagagaatttttttaaaagtgatgaaactgaagatctctttttaaatatggaacatgaatccttaacattagaaaaaaaatcaaaattggaaaaaaacatcaaagatgataaatcaaccaaggaaaagcatgtgtcaaaagagaggaactttaaagaggaacgagacaagattaaaaaggaaagcgagaaatcttttagggaggaaaaaataaaagatctaaaagaagagagagaaaacatacccacagataaagactcagaatttacttctttgggtatgagtgccattgaggaatctatagggcttcatttagtggaaaaggaaatagacattgaaaaacaagaaaagcatataaaggaaagtaaagaaaaacctgagaagcgatctcaaattaaagaaaaggacattgagaagatggaaagaaaaacctttgaaaaagaaaagaagataaaacatgagcataagtcagaaaaagacaaattagatcttagtgaatgtgttgataaaataaaagaaaaggacaagctatattcgcatcacacagaaaaatgccataaagaaggtgagaagagcaaaaatactgctgctattaaaaaaactgacgacagagagaaaagtagagaaaagatggataggaaacatgacaaagaaaagcctgaaaaagagaggcatctagcagaaagcaaagaaaagcacttgatggagaaaaaaaataaacaatcagataatagtgaatacagtaaatcagaaaaaggcaaaaataaagaaaaagacagggagctagataaaaaggaaaaatctagagataaagaaagtataaatataactaactccaaacacatacaggaagaaaaaaaatcaagtatagtagacggtaataaagcacaacatgaaaaacccttatcccttaaagaaaaaacaaaagatgaacctttgaaaactccagatggaaaagaaaaagataaaaaagataaagatatagatagatacaaagaacgagacaaacataaagataaaattcaaataaatagcttactcaaactaaaatctgaagcagataagcctaaacctaagtcatcaccagcatcaaaagatacccgacctaaagaaaagaggttagtgaatgatgatttaatgcagacaagttttgaacgaatgctaagccttaaagacctagaaatagaacagtggcacaaaaaacataaggaaaaaattaagcaaaaagaaaaggaacggttgagaaaccgaaactgtttagaacttaaaataaaagataaagaaaaaacaaagcatacaccaactgaatccaaaaataaagaacttactaggtcaaagagttcagaagtgactgatgcatataccaaggagaaacaacctaaagatgctgtaagtaacagatcacaatctgttgacaccaaaaatgtaatgactttagggaagtcatcttttgtttcagataatagcttaaacaggtctcctagatcagaaaatgaaaagccgggtctcagctccagatctgtatccatgatttctgttgctagttcagaagattcctgccatactacagtgacaaccccaaggcctccagttgagtatgactctgactttatgttagagagttcagaatcccaaatgtccttttcccagtcaccttttttgtcaattgccaaatctcctgctcttcatgaaagggaattggacagcctggctgacttgccggagcggattaaaccaccatatgcaaacagactttcaacatcccatcttaggtcatcttctgtagaagatgttaaactaattataagcgaggggagacctaccatagaagttcgaagatgtagcatgccttctgtcatttgtgaacataccaaacaattccaaacaatatcagaagagagcaatcaaggtagcttattaactgtgccaggagatactagtccttctcccaaacctgaggtattctcaaatgtgcctgaaagagacctttcaaatgtatctaacatacattccagttttgcaacttctccaactggagcttcaaacagcaagtatgtttcagctgatagaaatctcatcaagaatactgccccagtgaacactgtaatggacagtccagtgcatttagagccatctagtcaggttggtgtgatccagaataaatcatgggagatgcctgttgatagactagagacattaagcaccagagactttatctgcccaaattctaacatacctgatcaagaatcctctcttcagagtttttgtaattctgaaaataaggtattgaaagaaaatgctgattttttatccctgcgccagactgaactgccaggaaactcttgtgctcaggatccggcatcctttatgcctccacagcagccttgctctttccccagccaatcactttcagatgctgaatcgatttctaaacatatgtctttgtcatatgttgctaatcaagagccaggtattttacaacaaaaaaatgcagttcagattattagttctgctttagatactgataatgaatctacaaaagatacagaaaatacttttgtcctaggagatgttcaaaaaacagatgcctttgtcccagtgtactctgacagcactattcaagaagcatcaccaaactttgagaaagcttatactttacctgtgttaccatcagaaaaggactttaatggaagtgatgcctctacccagctaaatacacattatgcatttagcaaactaacttacaagtcttccagtggccatgaagttgagaatagcacaactgatactcaggtcatttcacatgaaaaagaaaacaaactggagagtttggttttaactcatttgagtaggtgtgattctgatttatgtgaaatgaatgcagggatgccaaaaggaaacctaaatgaacaagatccaaaacattgtcctgaaagtgaaaagtgtttgctttccatagaagatgaggaatctcaacaaagcattttatcaagtctggaaaaccattcacagcagtcaactcaaccagaaatgcataaatatggtcagttagttaaagtagaattagaagaaaatgccgaagatgataaaactgaaaaccaaatccctcaaagaatgactagaaacaaagcaaatacaatggcaaatcaaagcaaacagattcttgctagctgtacactattatcagaaaaagacagtgaatcctcatctcctagaggaagaataagattaactgaagatgacgatcctcaaattcaccatccacggaaaaggaaagtgtcacgtgtacctcagcctgtgcaagtgagtccctctttactacaagcaaaagagaaaactcagcaatctctggcagccattgtagattctctaaaactagatgagattcagccatacagttcagagagagcaaatccatattttgaatacttgcacataaggaaaaaaatagaagaaaaacgcaaattactgtgtagtgtgattcctcaagcacctcagtactatgacgaatatgtaacatttaacggatcatatctcctggatggaaaccccttaagcaagatttgtattcccacaattacaccaccaccttcactgtcagatccacttaaagagctttttcgacaacaggaagttgtaaggatgaaactacgtttgcaacacagtattgaaagggaaaaactcattgtatccaacgaacaagaagttttgcgagttcattacagagctgcaagaacattggcaaatcaaacactgccatttagtgcttgtactgttttgctggatgccgaagtatacaatgtaccattggactctcagtctgatgacagtaaaacttctgtgagggatcgctttaatgcaagacaattcatgtcttggttacaagatgtggatgataaatttgacaaattaaagacctgtcttttaatgaggcaacaacatgaagctgcggctttaaatgctgtccagaggttagaatggcagctcaaactccaggaacttgatcctgccacctataaatctatcagcatttacgaaatccaggagttttatgttccccttgttgatgttaacgacgactttgaattgactcctatatagcagtcagtacttcctgatggtattgtcctaaactggtgatgctcaagcattatactgtggaatactgccttttgacaaaaatactcatgcctttacaattgttagtaaagttcgattatagttggttatgtagtaaacactgtcattttataaaaaatgagaattattttggatcttagatccaaacacagtttctaatagaaaactattatttatattgggaaaggtaactattgcattagagcatgttggcagactggtaggtatttaaaaagttgagaatctgctaacagcgctggaagttgttagcgctctaagtaataagataaccactagtattcaaatctctttcaggttttattaaaaaatatatatcaataaactaaaaggttcaattcctaccaaatagtttctaatgtgggagaaaaacttggcacaaaatttcttcagtttattatctgtaaattgtacagttttctttttgaaagttttaatattgtcttcctttttaataacttattttatacatattgtgcagatgtaaatcttgtaattaatggtcaaactgtataaagggattggtagtcaaaacatgtacaaagaaatacctgtaaaactgttttgtctcatgttttattggaccaaagttgtggtttgtatggagtgtagtagtagtgtgtacaggtagaaaacttttaaatacagcatgcaggtgtttcagttagcttgttttcatcaccataactgcaaagatgtggcttagttgtattgcatgcttcctataatttaactctccataattgatgcctgcagtagtgtaaggcatttcatactagtctcctctagtagacctgtgacttactgtgttggacatattatttagacttagtcatacaaagaaacttagctcttttttcatctcacagtaaagcctatttccccaggaaaaaaataaatgcctttgaatgaaaattctgaaattgtaaatgtctattttaatattcacctatgaaagaatctgtgaatatatgtaaatacgtttaataaattttattggtcatgttaaatcattgtaaaacttttttacattgcttaatgttttaagcttaatagcctttgcacttttaaaataaaaaccaagtatgcaaatcaaagatatttggtagtcaaaataagtaaaagaaatataggaatattccagtcaatctctgaaatgtttatgaaaaacaggttaatatgttgtatttttttccttgtatcaagatgcaaaacataatttgcaaaattttataattgaaataaaacttggtatgctgttttataataaattagcaatatactttaaaaaaaatccagtttctcctataacatgatgtaaattaaatattcaggaatatttcaggtctgaaatctgctgctgaacttgttagacatttttgaaaggaaaattaggttagcgtacaatttatcataaatatatgaggtaaaatttgcaaaactttccacagtactttcttgaattataatactgaatgttttctgttccgatagagaaaagtgaagcaaatatgtgaggaatgaagtgatctagtgcaagttggtaattccagctaatgggagagaatgtaaatgtgcaaaggtacatattaagcttagggatttttgaatttttacgtcagtttatattttaattcttactgtacttggcatgcgcaataaagcagcacatgtaaaaaaaaaatacacagtgcaaggactttattataaaggttggatgtagttttccttagaaatttaggtgagagattttggccttttttattggataaattgggccagaaaggcagggtagatttcgaagcactggttctgttgaagttaagtttattaagcctgggaacattaaaagctaatttataaaagcaatactttttaatatgaaaacttactgcaaagtttgtttatacttttgcctaaaaaggaaattggatgggatactgtggcaaatcataaaaaaccagataattgaactttgaagttatagaaaatcagagaggggtaagtttatagggcattttgttctgatggttcaaccagaggtctgggaaatagcactgttggcccaaacagaacaggcttttagaagataaaagcgacaagaaggaatctggtgaattttagtcatcccagctttttagtcttaaccacagttctcactctcttaaatggtacctcaaaaagctggagcctctctgccatgattatgcttctacaaatttcttttataaagagactcaaagctaatgatagcttaaaagaaaagttaatgccttctcattggaaatgtataatcaaataagtagttaagggcttttggtattaaagatattctgaagctctgaaatgctagaaaaaaatttggaatggagtatatgcctgaaaaggttttggattcagaaagaaaaaggatggttagtttaatcagtgattctttttaaactcttcaaatatcatgaacaagatactaaattgtacctaaggatttgtatttctttacaatttgttctaaatatctgtttaatgactagttgatatttgtgcatgttatttaataaagagttatatttttatagaaaaaaa

SEQ ID NO: 2037 - DNA, 2241 bp, Homo sapiens
  source 1..2241: mol_type = unassigned DNA
ttgcaatgttggatattacgatgttgctaagatacttatagcagctggagcagatgttaacacacaaggattagatgatgacactccactccatgattctgctagtagtgggcacagagatatagtaaagctgttacttcgtcacggtggaaatccatttcaagctaataaacatggggagcgtccagtggatgtagcagaaacagaggagttggagttgctactaaaaagagaggtgcctttatctgatgatgatgaaagttacacagaatatttattttccacatggtgaatgtgcctgaattattgcttggtcaaagtccctcaaggaatgatacaaaaatcatcaattccgaagaggctcaatctgtaaatccttctagtgttgatgaaaatattgactctgaaacagagaaagactctctcatctgtgaaagtaaacagatacttcccagtaaaacacctcttccatctgcccttgatgagtatgagttcaaagatgatgatgatgaagaaattaataagatgattgatgataggcatattcttaggaaagaacaacgaaaagaaaatgaacctgaagcagaaaaaactcatttatttgcaaaacaggagaaagccttctatcctaaatcatttaaaagtaaaaaacaaaagccatctagggtcttatattcaagtactgaaagttctgatgaagaagctcttcagaataaaaagatttctacttcatgttccgtcatccctgaaacatcaaattctgatatgcaaaccaaaaaggaatatgtagtttcaggtgaacacaaacagaaaggcaaagttaaaagaaaattgaaaaatcagaataaaaataaagagaaccaagagctaaagcaagaaaaggaaggaaaagaaaatacaagaataacaaacttgacagtaaatactggactagattgttcagaaaagaccagagaggaggggaactttaggaaatcttttagcccaaaagatgatacttcattacatttatttcatatttccactggtaaatctcccaaacattcttgtggattaagtgaaaaacagtcaacaccactaaaacaagaacatactaaaacatgtttatcaccaggaagttctgaaatgtcattacagcctgatcttgttcggtatgataatacagaatctgaattcttgccagaaagttcaagtgtaaaatcttgtaagcataaggaaaaaagcaaacatcagaaagatttccacttagaatttggtgaaaaatcaaatgccaaaataaaggatgaagatcatagtccaacatttgaaaattcagattgcacactgaaaaaaatggataaagaaggtaaaacattaaaaaaacataaattgaagcataaagagagggaaaaagaaaagcataaaaaagaaattgaaggtgaaaaggaaaaatacaaaactaaggatagtgccaaagaactgcagaggagtgtggaatttgatagagaattttggaaagagaatttttttaaaagtgatgaaactgaagatctctttttaaatatggaacatgaatccttaacattagaaaaaatcaaaattggaaaaaaacatcaaagatgataaatcaaccaaggaaaagcatgtgtcaaaagagaggaactttaaagaggaacgagacaagattaaaaaggaaagcgagaaatcttttagggaggaaaaaataaaagatctaaaagaagagagagaaaacatacccacagataaagactcagaatttacttctttgggtatgagtgccattgaggaatctatagggcttcatttagtggaaaaggaaatagacattgaaaaacaagaaaagcatataaaggaaagtaaagaaaaacctgagaagcgatctcaaattaaagaaaaggacattgagaagatggaaagaaaaacctttgaaaaagaaaagaagataaaacatgagcataagtcagaaaaagacaaattagatcttagtgaatgtgttgataaaataaaagaaaaggacaagctatattcgcatcacacagaaaaatgccataaagaaggtgagaagagcaaaaatactgctgctattaaaaaaactgacgacagagagaaaagtagagaaaagatggataggaaacatgacaaagaaaagcctgaaaaagagaggcatctagcagaaagcaaagaaaagcacttgatggagaaaaaaaataaacaatcagataatagtgaatacagtaaatc

SEQ ID NO: 2038 - DNA, 10459 bp, Homo sapiens
  source 1..10459: mol_type = unassigned DNA
gtgctcgcgtcgcagccaatcgcggggcgacgctgtcctgggagcgaggaggctgtggtgagagacggaccgagaccggagatgttttcaagcccggctccggcggctttacaggcggctgcagcggcgacgaagacaacgacagcgacggctacgccgaagcactcgttccgggggtgaagcctcctgcgccggccttgcctcggatccaggatgagaagactgataaaagaagaagctagctgaacagctgtaaaatgcccaaatctgggttcacaaaaccaattcagagtgaaaattctgacagtgacagcaatatggtagagaaaccatatggaagaaagagtaaagacaagattgcatcctacagcaaaactccaaaaattgaacgaagtgatgtgagcaaggagatgaaagagaaatcatccatgaaacgtaaacttccttttactattagcccatcaagaaatgaagaacgagattcagacacagagaaagaaggtccagaaaagaagaagacaaaaaaggaagctggaaataagaaatccacaccagttagcattctttttggttatccactctctgagcgaaaacagatggcacttcttatgcagatgacagcaagagacaacagtccagattccacaccaaatcatccatcacaaacaacgcctgcccaaaagaaaactcccagttcttcatctcgacagaaagataaagttaataaaagaaatgaacgtggtgaaactcctttacacatggctgctattcgaggagatgtgaaacaagttaaagaattaataagtttaggggcaaatgtgaatgtgaaagattttgcaggttggacaccactgcatgaagcttgcaatgttggatattacgatgttgctaagatacttatagcagctggagcagatgttaacacacaaggattagatgatgacactccactccatgattctgctagtagtgggcacagagatatagtaaagctgttacttcgtcacggtggaaatccatttcaagctaataaacatggggagcgtccagtggatgtagcagaaacagaggagttggagttgctactaaaaagagaggtgcctttatctgatgatgatgaaagttacacagattccgaagaggctcaatctgtaaatccttctagtgttgatgaaaatattgactctgaaacagagaaagactctctcatctgtgaaagtaaacagatacttcccagtaaaacacctcttccatctgcccttgatgagtatgagttcaaagatgatgatgatgaagaaattaataagatgattgatgataggcatattcttaggaaagaacaacgaaaagaaaatgaacctgaagcagaaaaaactcatttatttgcaaaacaggagaaagccttctatcctaaatcatttaaaagtaaaaaacaaaagccatctagggtcttatattcaagtactgaaagttctgatgaagaagctcttcagaataaaaagatttctacttcatgttccgtcatccctgaaacatcaaattctgatatgcaaaccaaaaaggaatatgtagtttcaggtgaacacaaacagaaaggcaaagttaaaagaaaattgaaaaatcagaataaaaataaagagaaccaagagctaaagcaagaaaaggaaggaaaagaaaatacaagaataacaaacttgacagtaaatactggactagattgttcagaaaagaccagagaggaggggaactttaggaaatcttttagcccaaaagatgatacttcattacatttatttcatatttccactggtaaatctcccaaacattcttgtggattaagtgaaaaacagtcaacaccactaaaacaagaacatactaaaacatgtttatcaccaggaagttctgaaatgtcattacagcctgatcttgttcggtatgataatacagaatctgaattcttgccagaaagttcaagtgtaaaatcttgtaagcataaggaaaaaagcaaacatcagaaagatttccacttagaatttggtgaaaaatcaaatgccaaaataaaggatgaagatcatagtccaacatttgaaaattcagattgcacactgaaaaaaatggataaagaaggtaaaacattaaaaaaacataaattgaagcataaagagagggaaaaagaaaagcataaaaaagaaattgaaggtgaaaaggaaaaatacaaaactaaggatagtgccaaagaactgcagaggagtgtggaatttgatagagaattttggaaagagaatttttttaaaagtgatgaaactgaagatctctttttaaatatggaacatgaatccttaacattagaaaaaaaatcaaaattggaaaaaaacatcaaagatgataaatcaaccaaggaaaagcatgtgtcaaaagagaggaactttaaagaggaacgagacaagattaaaaaggaaagcgagaaatcttttagggaggaaaaaataaaagatctaaaagaagagagagaaaacatacccacagataaagactcagaatttacttctttgggtatgagtgccattgaggaatctatagggcttcatttagtggaaaaggaaatagacattgaaaaacaagaaaagcatataaaggaaagtaaagaaaaacctgagaagcgatctcaaattaaagaaaaggacattgagaagatggaaagaaaaacctttgaaaaagaaaagaagataaaacatgagcataagtcagaaaaagacaaattagatcttagtgaatgtgttgataaaataaaagaaaaggacaagctatattcgcatcacacagaaaaatgccataaagaaggtgagaagagcaaaaatactgctgctattaaaaaaactgacgacagagagaaaagtagagaaaagatggataggaaacatgacaaagaaaagcctgaaaaagagaggcatctagcagaaagcaaagaaaagcacttgatggagaaaaaaaataaacaatcagataatagtgaatacagtaaatcagaaaaaggcaaaaataaagaaaaagacagggagctagataaaaaggaaaaatctagagataaagaaagtataaatataactaactccaaacacatacaggaagaaaaaaaatcaagtatagtagacggtaataaagcacaacatgaaaaacccttatcccttaaagaaaaaacaaaagatgaacctttgaaaactccagatggaaaagaaaaagataaaaaagataaagatatagatagatacaaagaacgagacaaacataaagataaaattcaaataaatagcttactcaaactaaaatctgaagcagataagcctaaacctaagtcatcaccagcatcaaaagatacccgacctaaagaaaagaggttagtgaatgatgatttaatgcagacaagttttgaacgaatgctaagccttaaagacctagaaatagaacagtggcacaaaaaacataaggaaaaaattaagcaaaaagaaaaggaacggttgagaaaccgaaactgtttagaacttaaaataaaagataaagaaaaaacaaagcatacaccaactgaatccaaaaataaagaacttactaggtcaaagagttcagaagtgactgatgcatataccaaggagaaacaacctaaagatgctgtaagtaacagatcacaatctgttgacaccaaaaatgtaatgactttagggaagtcatcttttgtttcagataatagcttaaacaggtctcctagatcagaaaatgaaaagccgggtctcagctccagatctgtatccatgatttctgttgctagttcagaagattcctgccatactacagtgacaaccccaaggcctccagttgagtatgactctgactttatgttagagagttcagaatcccaaatgtccttttcccagtcaccttttttgtcaattgccaaatctcctgctcttcatgaaagggaattggacagcctggctgacttgccggagcggattaaaccaccatatgcaaacagactttcaacatcccatcttaggtcatcttctgtagaagatgttaaactaattataagcgaggggagacctaccatagaagttcgaagatgtagcatgccttctgtcatttgtgaacataccaaacaattccaaacaatatcagaagagagcaatcaaggtagcttattaactgtgccaggagatactagtccttctcccaaacctgaggtattctcaaatgtgcctgaaagagacctttcaaatgtatctaacatacattccagttttgcaacttctccaactggagcttcaaacagcaagtatgtttcagctgatagaaatctcatcaagaatactgccccagtgaacactgtaatggacagtccagtgcatttagagccatctagtcaggttggtgtgatccagaataaatcatgggagatgcctgttgatagactagagacattaagcaccagagactttatctgcccaaattctaacatacctgatcaagaatcctctcttcagagtttttgtaattctgaaaataaggtattgaaagaaaatgctgattttttatccctgcgccagactgaactgccaggaaactcttgtgctcaggatccggcatcctttatgcctccacagcagccttgctctttccccagccaatcactttcagatgctgaatcgatttctaaacatatgtctttgtcatatgttgctaatcaagagccaggtattttacaacaaaaaaatgcagttcagattattagttctgctttagatactgataatgaatctacaaaagatacagaaaatacttttgtcctaggagatgttcaaaaaacagatgcctttgtcccagtgtactctgacagcactattcaagaagcatcaccaaactttgagaaagcttatactttacctgtgttaccatcagaaaaggactttaatggaagtgatgcctctacccagctaaatacacattatgcatttagcaaactaacttacaagtcttccagtggccatgaagttgagaatagcacaactgatactcaggtcatttcacatgaaaaagaaaacaaactggagagtttggttttaactcatttgagtaggtgtgattctgatttatgtgaaatgaatgcagggatgccaaaaggaaacctaaatgaacaagatccaaaacattgtcctgaaagtgaaaagtgtttgctttccatagaagatgaggaatctcaacaaagcattttatcaagtctggaaaaccattcacagcagtcaactcaaccagaaatgcataaatatggtcagttagttaaagtagaattagaagaaaatgccgaagatgataaaactgaaaaccaaatccctcaaagaatgactagaaacaaagcaaatacaatggcaaatcaaagcaaacagattcttgctagctgtacactattatcagaaaaagacagtgaatcctcatctcctagaggaagaataagattaactgaagatgacgatcctcaaattcaccatccacggaaaaggaaagtgtcacgtgtacctcagcctgtgcaagtgagtccctctttactacaagcaaaagagaaaactcagcaatctctggcagccattgtagattctctaaaactagatgagattcagccatacagttcagagagagcaaatccatattttgaatacttgcacataaggaaaaaaatagaagaaaaacgcaaattactgtgtagtgtgattcctcaagcacctcagtactatgacgaatatgtaacatttaacggatcatatctcctggatggaaaccccttaagcaagatttgtattcccacaattacaccaccaccttcactgtcagatccacttaaagagctttttcgacaacaggaagttgtaaggatgaaactacgtttgcaacacagtattgaaagggaaaaactcattgtatccaacgaacaagaagttttgcgagttcattacagagctgcaagaacattggcaaatcaaacactgccatttagtgcttgtactgttttgctggatgccgaagtatacaatgtaccattggactctcagtctgatgacagtaaaacttctgtgagggatcgctttaatgcaagacaattcatgtcttggttacaagatgtggatgataaatttgacaaattaaagacctgtcttttaatgaggcaacaacatgaagctgcggctttaaatgctgtccagaggttagaatggcagctcaaactccaggaacttgatcctgccacctataaatctatcagcatttacgaaatccaggagttttatgttccccttgttgatgttaacgacgactttgaattgactcctatatagcagtcagtacttcctgatggtattgtcctaaactggtgatgctcaagcattatactgtggaatactgccttttgacaaaaatactcatgcctttacaattgttagtaaagttcgattatagttggttatgtagtaaacactgtcattttataaaaaatgagaattattttggatcttagatccaaacacagtttctaatagaaaactattatttatattgggaaaggtaactattgcattagagcatgttggcagactggtaggtatttaaaaagttgagaatctgctaacagcgctggaagttgttagcgctctaagtaataagataaccactagtattcaaatctctttcaggttttattaaaaaatatatatcaataaactaaaaggttcaattcctaccaaatagtttctaatgtgggagaaaaacttggcacaaaatttcttcagtttattatctgtaaattgtacagttttctttttgaaagttttaatattgtcttcctttttaataacttattttatacatattgtgcagatgtaaatcttgtaattaatggtcaaactgtataaagggattggtagtcaaaacatgtacaaagaaatacctgtaaaactgttttgtctcatgttttattggaccaaagttgtggtttgtatggagtgtagtagtagtgtgtacaggtagaaaacttttaaatacagcatgcaggtgtttcagttagcttgttttcatcaccataactgcaaagatgtggcttagttgtattgcatgcttcctataatttaactctccataattgatgcctgcagtagtgtaaggcatttcatactagtctcctctagtagacctgtgacttactgtgttggacatattatttagacttagtcatacaaagaaacttagctcttttttcatctcacagtaaagcctatttccccaggaaaaaaataaatgcctttgaatgaaaattctgaaattgtaaatgtctattttaatattcacctatgaaagaatctgtgaatatatgtaaatacgtttaataaattttattggtcatgttaaatcattgtaaaacttttttacattgcttaatgttttaagcttaatagcctttgcacttttaaaataaaaaccaagtatgcaaatcaaagatatttggtagtcaaaataagtaaaagaaatataggaatattccagtcaatctctgaaatgtttatgaaaaacaggttaatatgttgtatttttttccttgtatcaagatgcaaaacataatttgcaaaattttataattgaaataaaacttggtatgctgttttataataaattagcaatatactttaaaaaaaatccagtttctcctataacatgatgtaaattaaatattcaggaatatttcaggtctgaaatctgctgctgaacttgttagacatttttgaaaggaaaattaggttagcgtacaatttatcataaatatatgaggtaaaatttgcaaaactttccacagtactttcttgaattataatactgaatgttttctgttccgatagagaaaagtgaagcaaatatgtgaggaatgaagtgatctagtgcaagttggtaattccagctaatgggagagaatgtaaatgtgcaaaggtacatattaagcttagggatttttgaatttttacgtcagtttatattttaattcttactgtacttggcatgcgcaataaagcagcacatgtaaaaaaaaaatacacagtgcaaggactttattataaaggttggatgtagttttccttagaaatttaggtgagagattttggccttttttattggataaattgggccagaaaggcagggtagatttcgaagcactggttctgttgaagttaagtttattaagcctgggaacattaaaagctaatttataaaagcaatactttttaatatgaaaacttactgcaaagtttgtttatacttttgcctaaaaaggaaattggatgggatactgtggcaaatcataaaaaaccagataattgaactttgaagttatagaaaatcagagaggggtaagtttatagggcattttgttctgatggttcaaccagaggtctgggaaatagcactgttggcccaaacagaacaggcttttagaagataaaagcgacaagaaggaatctggtgaattttagtcatcccagctttttagtcttaaccacagttctcactctcttaaatggtacctcaaaaagctggagcctctctgccatgattatgcttctacaaatttcttttataaagagactcaaagctaatgatagcttaaaagaaaagttaatgccttctcattggaaatgtataatcaaataagtagttaagggcttttggtattaaagatattctgaagctctgaaatgctagaaaaaaatttggaatggagtatatgcctgaaaaggttttggattcagaaagaaaaaggatggttagtttaatcagtgattctttttaaactcttcaaatatcatgaacaagatactaaattgtacctaaggatttgtatttctttacaatttgttctaaatatctgtttaatgactagttgatatttgtgcatgttatttaataaagagttatatttttatagaaaaaaagagtgaaatgtgtgctaactgtttttttacttaattttacttgggcagctagcaaaattgcagaaatatgcatcctgggaaaagaaacagcctttgaagaattagcctttcaagttcaaatctatttaataatgagaagtctcacaagtgaatttttaagtacaggcatacctcagacgtactttaggttccagaccatctcagtaaagcaaataccacaacaaagcgagtcaggaggaattttttggtttcccagtgcatataaaagttttgtttatactatattaagtgtgcaatagcattatgtctaaaaatatgtacataagtttaaaaatattttattgctaaaaatggtaacaaagtgagcacatgctgttggaaaaagagcaccaatagacttgcttgaagcagggttgccacaaaccttcaatttgtaaaaaacgccaatatgtacaaagcacaataaagcaaagcacaatagaacaggattgcctgtattagacatgctacaaacttcataactggaaacatctcaaagaccccatgaagctcatttgaatgggacttaacaattagacagttattttagaaattgagtgcagacctaaatacatagttttccaaaaagaaaattattgtctctgatatcttaaaacataaaaacccaaaattttatatagaagaaattgactctgtaaaacgcaatgaaatagtcctctttttaaacagtttaaaggaagcattttcaccgtttgtaaaaattatttttaaatatttagggcaaaatttttgttagataataatggaaaagcttgtgtgagtttagtggttaaaatatcttgtaattcatcattatttaagtgacttcttgggagccgtctttgtacctaaaatggagtttttttttaagcctccacagagatagtcacccaaagtatttccagtcagtaaaagtagaattcatagaaaaaactgaggcaaattaaaacaattccattaatcaaaatggctttaaacaaattaagtattagcataaaaatagcaaaaagtacaactaaaaaaatggttgggttttcccagtggttaaatgctatataataactgcaaataaaagtttttttgtacatggacagcgtcctcataaaagaaaataggccaggccaggcgcagtggctcgcgcctgtaatcccagcactttgggaggccaaggcgggcggatcacgaggtcaggagatcgagaccatcctggctaacacggtgaaaccccgtctctactaaacaaaatgcaaaaaatcagccgggtgtggccgcgggcgcctgtagttccagctactcgggaggctgaggcaggagaatggcgtgagcctgggaggcggagcttgcagtgagccgagatcgtgccactgcactccagcctgggcgacagagcgagactccgtctc

SEQ ID NO: 2039 - DNA, 451 bp, Homo sapiens
  source 1..451: mol_type = unassigned DNA
actgaagatctctttttaaatatggaacatgaatccttaacattagaaaaaaaatcaaaattggaaaaaaacatcaaagatgataaatcaaccaaggaaaagcatgtgtcaaaagagaggaactttaaagaggaacgagacaagattaaaaaggaaagcgagaaatcttttagggagggtatgagtgccattgaggaatctatagggcttcatttagtggaaaaggaaatagacattgaaaaacaagaaaagcatataaaggaaagtaaagaaaaacctgagaagcgatctcaaattaaagaaaaggacattgagaagatggaaagaaaaacctttgaaaaagggacaagctatattcgcatcacacagaaaaatgccataaagaaggtgagaagagcaaaaatactgctgctattaaaaaaactgacgacagagagaaaagtagagaaaa

SEQ ID NO: 2040 - DNA, 1313 bp, Homo sapiens
  source 1..1313: mol_type = unassigned DNA
gaggaggctgtggtgagagacggaccgagaccggagatgttttcaagcccggctccggcggctttacaggcggctgcagcggcgacgaagacaacgacagcgacggctacgccgaagcactcgttccgggggtgaagcctcctgcgccggccttgcctcggatccaggatgagaagactgataaaagaagaagctagctgaacagctgtaaaatgcccaaatctgggttcacaaaaccaattcagagtgaaaattctgacagtgacagcaatatggtagagaaaccatatggaagaaagagtaaagacaagattgcatcctacagcaaaactccaaaaattgaacgaagtgatgtgagcaaggagatgaaagagaaatcatccatgaaacgtaaacttccttttactattagcccatcaagaaatgaagaacgagattcagacacagattcagatccaggacatacaagtgaaaattggggggagagacttatatcttcttacaggacatactcagagaaagaaggtccagaaaagaagaagacaaaaaaggaagctggaaataagaaatccacaccagttagcattctttttggttatccactctctgagcgaaaacagatggcacttcttatgcagatgacagcaagagacaacagtccagattccacaccaaatcatccatcacaaacaacgcctgcccaaaagaaaactcccagttcttcatctcgacagaaagataaagttaataaaagaaatgaacgtggtgaaactcctttacacatggctgctattcgaggagatgtgaaacaagttaaagaattaataagtttaggggcaaatgtgaatgtgaaagattttgcaggttggacaccactgcatgaagcttgcaatgttggatattacgatgttgctaagatacttatagcagctggagcagatgttaacacacaaggattagatgatgacactccactccatgattctgctagtagtgggcacagagatatagtaaagctgttacttcgtcacggtggaaatccatttcaagctaataaacatggggagcgtccagtggatgtagcagaaacagaggagttggagttgctactaaaaagagaggtgcctttatctgatgatgatgaaagttacacaggatccagctaccaatttgcaggaaatgccaagctcagcggagcaagttgaactataccaagtgtatgcaatcagcaaattccagattgtgagaaagccaaacagccttggttctttaacagatattttgtgtggaaaagaaacagaagaagaccatgt

SEQ ID NO: 2041 - DNA, 1370 bp, Homo sapiens
  source 1..1370: mol_type = unassigned DNA
gtgctcgcgtcgcagccaatcgcggggcgacgctgtcctgggagcgaggaggctgtggtgagagacggaccgagaccggagatgttttcaagcccggctccggcggctttacaggcggctgcagcggcgacgaagacaacgacagcgacggctacgccgaagcactcgttccgggggtgaagcctcctgcgccggccttgcctcggatccaggatgagaagactgataaaagaagaagctagctgaacagctgtaaaatgcccaaatctgggttcacaaaaccaattcagagtgaaaattctgacagtgacagcaatatggtagagaaaccatatggaagaaagagtaaagacaagattgcatcctacagcaaaactccaaaaattgaacgaagtgatgtgagcaaggagatgaaagagaaatcatccatgaaacgtaaacttccttttactattagcccatcaagaaatgaagaacgagattcagacacagagaaagaaggtccagaaaagaagaagacaaaaaaggaagctggaaataagaaatccacaccagttagcattctttttggttatccactctctgagcgaaaacagatggcacttcttatgcagatgacagcaagagacaacagtccagattccacaccaaatcatccatcacaaacaacgcctgcccaaaagaaaactcccagttcttcatctcgacagaaagataaagttaataaaagaaatgaacgtggtgaaactcctttacacatggctgctattcgaggagatgtgaaacaagttaaagaattaataagtttaggggcaaatgtgaatgtgaaagattttgcaggttggacaccactgcatgaagcttgcaatgttggatattacgatgttgctaagatacttatagcagctggagcagatgttaacacacaaggattagatgatgacactccactccatgattctgctagtagtgggcacagagatatagtaaagctgttacttcgtcacggtggaaatccatttcaagctaataaacatggggagcgtccagtggatgtagcagaaacagaggagttggagttgctactaaaaagagaggtgcctttatctgatgatgatgaaagttacacagattccgaagaggctcaatctgtaaatccttctagtgttgatgaaaatattgactctgaaacagagaaagactctctcatctgtgaaagtaaacagatacttcccagtaaaacacctcttccatctgcccttgatgagtatgagttcaaagatgatgatgatgaagaaattaataagatgattgatgataggcatattcttaggaaagaacaacgaaaaaagaaaaggaaggaaaagaaa

SEQ ID NO: 2042 - DNA, 1385 bp, Homo sapiens
  source 1..1385: mol_type = unassigned DNA
ggctggagcatgcagccagcagttcccttttgcaactcagttgccttggctaaggcccaaccagtcccaagtgctcaggacagaggctggacgggctccttcctgcacccctgctcttgggacacagtgccctccggctctaataggccaggagttgggggggcaactggctctgctccctggccctggctccccctgctccctggggctgcccgaggtgaaggtgacaggtgggggaggcaggtggagaattgggccagtgagctcatggcaaaggcgcccagctgggcaggggtgggtgctctggcctataaagcccccgaggccctgtggcctgcagaggcggttatggacggcaccatggaggactccgaggcggtgcagagggccacagcgctcatcgagcagcggctggcacaggaggaggagaatgagaaactccgaggagacgcacgccagaagctgcccatggacttgctggtgctggaggatgagaagcaccacggggctcagagtgcagccctgcagaaggtgaagggccaagagcgcgtgcgcaagacgtccctggacctgcggcgggagatcatcgatgtgggcgggatccagaacctcatcgagctgcggaagaaacgcaagcagaagaagcgggacgctctggccgcctcgcatgagccgcccccagagcccgaggagatcactggccctgtggatgaggagaccttcctgaaagctgcggtggaggggaaaatgaaggtcattgagaagttcctggctgacggggggtcagccgacacgtgcgaccagttccgtcggacagcactgcaccgagcttccctggaaggccacatggaaatcctggagaagcttctagataatggggccactgtggacttccaggatcggctggactgcacagccatgcattgggcctgccgcgggggccacttagaggtggtgaaacttctgcaaagccatggagcagacaccaatgtgagggataaggaaggggatactgccctgcatgacgctgtgaggctcaaccgctacaaaatcatcaaactgctgctcctgcatggggctgacatgatgaccaagaacctggcaggaaagaccccgacggacctggtgcagctctggcaggctgatacccggcacgccctggagcatcctgagccgggggctgagcataacgggctggaggggcctaatgatagtgggcgagagacccctcagcctgtgccagcccagtgaatgcgtgccccagcccagccagctacccagcccctctctgtgtgcagccggagggtcctaagaatggctcccggagctaactgagggcccagccttttttctgcatgatccaggagcacataccacaaactacc

SEQ ID NO: 2043 - DNA, 1484 bp, Homo sapiens
  source 1..1484: mol_type = unassigned DNA
ggctggagcatgcagccagcagttcccttttgcaactcagttgccttggctaaggcccaaccagtcccaagtgctcaggacagaggctggacgggctccttcctgcacccctgctcttgggacacagtgccctccggctctaataggccaggagttgggggggcaactggctctgctccctggccctggctccccctgctccctggggctgcccgaggtgaaggtgacaggtgggggaggcaggtggagaattgggccagtgagctcatggcaaaggcgcccagctgggcaggggtgggtgctctggcctataaagcccccgaggccctgtggcctgcagaggcggttatggacggcaccatggaggactccgaggcggtgcagagggccacagcgctcatcgagcagcggctggcacaggaggaggagaatgagaaactccgaggagacgcacgccagaagctgcccatggacttgctggtgctggaggatgagaagcaccacggggctcagagtgcagccctgcagaaggtgaagggccaagagcgcgtgcgcaagacgtccctggacctgcggcgggagatcatcgatgtgggcgggatccagaacctcatcgagctgcggaagaaacgcaagcagaagaagcgggacgctctggccgcctcgcatgagccgcccccagagcccgaggagatcactggccctgtggatgaggagaccttcctgaaagctgcggtggaggggaaaatgaaggtcattgagaagttcctggctgacggggggtcagccgacacgtgcgaccagttccgtcggacagcactgcaccgagcttccctggaaggccacatggaaatcctggagaagcttctagataatggggccactgtggacttccaggatcggctggactgcacagccatgcattgggcctgccgcgggggccacttagaggtggtgaaacttctgcaaagccatggagcagacaccaatgtgagggataagctgctgagcaccccgctgcacgtggcagtccggacagggcaggtggagattgtggagcactttctatccctgggcctggaaatcaatgccagagacagggaaggggatactgccctgcatgacgctgtgaggctcaaccgctacaaaatcatcaaactgctgctcctgcatggggctgacatgatgaccaagaacctggcaggaaagaccccgacggacctggtgcagctctggcaggctgatacccggcacgccctggagcatcctgagccgggggctgagcataacgggctggaggggcctaatgatagtgggcgagagacccctcagcctgtgccagcccagtgaatgcgtgccccagcccagccagctacccagcccctctctgtgtgcagccggagggtcctaagaatggctcccggagctaactgagggcccagccttttttctgcatgatccaggagcacataccacaaactacc

SEQ ID NO: 2044 - DNA, 1451 bp, Homo sapiens
  source 1..1451: mol_type = unassigned DNA
aaccagtcccaagtgctcaggacagaggctggacgggctccttcctgcacccctgctcttgggacacagtgccctccggctctaataggccaggagttgggggggcaactggctctgctccctggccctggctccccctgctccctggggctgcccgaggtgaaggtgacaggtgggggaggcaggtggagaattgggccagtgagctcatggcaaaggcgcccagctgggcaggggtgggtgctctggcctataaagcccccgaggccctgtggcctgcagaggcggttatggacggcaccatggaggactccgaggcggtgcagagggccacagcgctcatcgagcagcggctggcacaggaggaggagaatgagaaactccgaggagacgcacgccagaagctgcccatggacttgctggtgctggaggatgagaagcaccacggggctcagagtgcagccctgcagaaggtgaagggccaagagcgcgtgcgcaagacgtccctggacctgcggcgggagatcatcgatgtgggcgggatccagaacctcatcgagctgcggaagaaacgcaagcagaagaagcgggacgctctggccgcctcgcatgagccgcccccagagcccgaggagatcactggccctgtggatgaggagaccttcctgaaagctgcggtggaggggaaaatgaaggtcattgagaagttcctggctgacggggggtcagccgacacgtgcgaccagttccgtcggacagcactgcaccgagcttccctggaaggccacatggaaatcctggagaagcttctagataatggggccactgtggacttccaggatcggctggactgcacagccatgcattgggcctgccgcgggggccacttagaggtggtgaaacttctgcaaagccatggagcagacaccaatgtgagggataagctgctgagcaccccgctgcacgtggcagtccggacagggcaggtggagattgtggagcactttctatccctgggcctggaaatcaatgccagagacagggaaggggatactgccctgcatgacgctgtgaggctcaaccgctacaaaatcatcaaactgctgctcctgcatggggctgacatgatgaccaagaacctggcaggaaagaccccgacggacctggtgcagctctggcaggctgatacccggcacgccctggagcatcctgagccgggggctgagcataacgggctggaggggcctaatgatagtgggcgagagacccctcagcctgtgccagcccagtgaatgcgtgccccagcccagccagctacccagcccctctctgtgtgcagccggagggtcctaagaatggctcccggagctaactgagggcccagccttttttctgcatgatccaggagcacataccacaaactaccacaataaaaaagctgtttttgctaa

SEQ ID NO: 2045 - DNA, 1072 bp, Homo sapiens
  source 1..1072: mol_type = unassigned DNA
agaggcggttatggacggcaccatggaggactccgaggcggtgcagagggccacagcgctcatcgagcagcggctggcacaggaggaggagaatgagaaactccgaggagacgcacgccagaagctgcccatggacttgctggtgctggaggatgagaagcaccacggggctcagagtgcagccctgcagaaggtgaagggccaagagcgcgtgcgcaagacgtccctggacctgcggcgggagatcatcgatgtgggcgggatccagaacctcatcgagctgcggaagaaacgcaagcagaagaagcgggacgctctggccgcctcgcatgagccgcccccagagcccgaggagatcactggccctgtggatgaggagaccttcctgaaagctgcggtggaggggaaaatgaaggtcattgagaagttcctggctgacggggggtcagccgacacgtgcgaccagttccgtcggacagcactgcaccgagcttccctggaaggccacatggaaatcctggagaagcttctagataatggggccactgtggacttccaggatcggctggactgcacagccatgcattgggcctgccgcgggggccacttagaggtggtgaaacttctgcaaagccatggagcagacaccaatgtgagggataaggaaggggatactgccctgcatgacgctgtgaggctcaaccgctacaaaatcatcaaactgctgctcctgcatggggctgacatgatgaccaagaacctggcaggaaagaccccgacggacctggtgcagctctggcaggctgatacccggcacgccctggagcatcctgagccgggggctgagcataacgggctggaggggcctaatgatagtgggcgagagacccctcagcctgtgccagcccagtgaatgcgtgccccagcccagccagctacccagcccctctctgtgtgcagccggagggtcctaagaatggctcccggagctaactgagggcccagccttttttctgcatgatccaggagcacataccacaaactaccacaataaaaaagctgtttttgctaa

SEQ ID NO: 2046 - DNA, 2597 bp, Homo sapiens
  source 1..2597: mol_type = unassigned DNA
ttcagctcttctcactggggggtgtgaggaacaggggggaccatggacttcatcagcattcagcagttggtaagtggagaaagagttgaagggaaagtgttgggatttggacatggagttcctgaccctggagcctggcctagtgactggaggaggggcccccaagaggctgtggcccgggagaagctgaaattggaagaagagaagaagaagaaacttgaaagatttaacagtaccagatttaatctggataacctggctgacttggaaaacttggttcaaagacggaaaaagcgactgagacacagagtcccccccaggaaacctgagcccctggttaagccgcagtcccaggcccaggtggagcctgtgggcctggagatgttcctgaaggcagctgctgagaaccaggagtacctgattgacaagtacttgacagacggaggggaccccaatgcccatgacaagctccaccgcaccgccttgcactgggcctgtctgaagggtcacagccagctggtgaacaagctgctggtggcaggtgccacagtggacgcgcgagacttgctggacaggacacctgtgttctgggcctgccgcggaggacatctggtcatcctcaaacagctgcttaaccagggagcccgggtcaatgcccgggacaagatcgggagcacccccctgcacgtggcagtgcgcacccggcaccccgactgcctggagcacctcatcgagtgtggcgcccacctgaacgcacaggataaggaaggggacacggctctgcacgaggccgtgcggcacggcagctacaaagccatgaagctactgctgctctatggggccgagctgggggtgcggaacgcggcctccgtgaccccggtgcagctggctcgagactggcagcgcggcatccgggaggccctgcaggcccacgtggcgcatccccgcacccggtgctgaccgcagcaccgccccccgccgcgcctttcgcactgccaccattccatcctgtgccccgcccccgcgtctgcacctctgtggttcctgccctcagccctggttcctccctctctggcctgtgccgcctcagcagccctggcagaactgaagagcggcaccgggcccagcaggcaaagagagaggcctccctggcttcgagtgtcaggggagccgcgttccctcccagggctggagcagaggaccacaaggcagcagaaagcgcgggtccagatgagggccaggaaggggaggagagtgagggccaagaacgagccttaagggagcagtcccaagctggagccacccagggctgggtctgggagtcctcagtgtccacttgtcccaggttagggggcttgccttgctctctccagggccagtctgtgtgtgtggggactcagcccgtggccggcagatgccatccaggatgtacaaggtgcagccaaggcaggccatgcaggggccgggcctgtctgcagctggtggatgcctgtgggcatggctttctctggggaccccattcctgtcagtagcaaccctggcagtgtccggagcggctctagacaactttggtcataggaactctggaggtgggttctggtcatctgaggtggctactcaacaggtttgaggccccacagcaacagaagtccaggacccactaggttgcctcagaagccctaagactgatgagctggagcgcgcatttgagagaagcctcgcacccactgtgtactggccccgctcaggccggcctggcacaccgttgcctgctggcggctctcatggggaagcgcctgggcactggggattgcttgtggcccactcaactcttggggcagtggcccgtaaccctagtttgcctgaggcccttatgtccccttatgttcctggtactggagcttgagctcttgcctggaacgctgcagctgcacccaccctgcttgatcccacctgggaggccaggacactgaggagctctgaacccagcccacagggaagcagaggaaggtgagcccccgccgccccccagcccttcccatcccttccctgctccctggtggtctaaggacccaagctccctagacttcctcttccaccgtctgtacgtttcaaattacactggtgtaggcctgtactgctggtggggctgggcccctaaacgccagaaagtgaatcttaagaagctctgccctaaactgagaaccacatgctgagggaagggctgaaaggtgaaggctcagcctccctcacatgggtcctgggttacattaggtaccgggctgattgataggcatttggccatggttccttttcgtctacctttgggggccttctcaggcccagaacaaggctgttgttactatgtggaaaagctgaccagtgctgcacactaggggcacacacctttccatgagcagctcctgccctgtggcgacagccagcgtgcacccagacgctggtgccatggcgaagcaggcgttcaagaccatggagaagacaactcctcatctagaaaatgaggacacctcagtgacaaacacacctttttataccaatcagtatcctctgttcattaaaactggctatccattaca

SEQ ID NO: 2047 - DNA, 2455 bp, Homo sapiens
  source 1..2455: mol_type = unassigned DNA
actggggggtgtgaggaacaggggggaccatggacttcatcagcattcagcagttggtaagtggagaaagagttgaagggaaagtgttgggatttggacatggagttcctgaccctggagcctggcctagtgactggaggaggggcccccaagaggctgtggcccgggagaagctgaaattggaagaagagaagaagaagaaacttgaaagatttaacagtaccagatttaatctggataacctggctgacttggaaaacttggttcaaagacggaaaaagcgactgagacacagagtcccccccaggaaacctgagcccctggttaagctccaccgcaccgccttgcactgggcctgtctgaagggtcacagccagctggtgaacaagctgctggtggcaggtgccacagtggacgcgcgagacttgctggacaggacacctgtgttctgggcctgccgcggaggacatctggtcatcctcaaacagctgcttaaccagggagcccgggtcaatgcccgggacaagatcgggagcacccccctgcacgtggcagtgcgcacccggcaccccgactgcctggagcacctcatcgagtgtggcgcccacctgaacgcacaggataaggaaggggacacggctctgcacgaggccgtgcggcacggcagctacaaagccatgaagctactgctgctctatggggccgagctgggggtgcggaacgcggcctccgtgaccccggtgcagctggctcgagactggcagcgcggcatccgggaggccctgcaggcccacgtggcgcatccccgcacccggtgctgaccgcagcaccgccccccgccgcgcctttcgcactgccaccattccatcctgtgccccgcccccgcgtctgcacctctgtggttcctgccctcagccctggttcctccctctctggcctgtgccgcctcagcagccctggcagaactgaagagcggcaccgggcccagcaggcaaagagagaggcctccctggcttcgagtgtcaggggagccgcgttccctcccagggctggagcagaggaccacaaggcagcagaaagcgcgggtccagatgagggccaggaaggggaggagagtgagggccaagaacgagccttaagggagcagtcccaagctggagccacccagggctgggtctgggagtcctcagtgtccacttgtcccaggttagggggcttgccttgctctctccagggccagtctgtgtgtgtggggactcagcccgtggccggcagatgccatccaggatgtacaaggtgcagccaaggcaggccatgcaggggccgggcctgtctgcagctggtggatgcctgtgggcatggctttctctggggaccccattcctgtcagtagcaaccctggcagtgtccggagcggctctagacaactttggtcataggaactctggaggtgggttctggtcatctgaggtggctactcaacaggtttgaggccccacagcaacagaagtccaggacccactaggttgcctcagaagccctaagactgatgagctggagcgcgcatttgagagaagcctcgcacccactgtgtactggccccgctcaggccggcctggcacaccgttgcctgctggcggctctcatggggaagcgcctgggcactggggattgcttgtggcccactcaactcttggggcagtggcccgtaaccctagtttgcctgaggcccttatgtccccttatgttcctggtactggagcttgagctcttgcctggaacgctgcagctgcacccaccctgcttgatcccacctgggaggccaggacactgaggagctctgaacccagcccacagggaagcagaggaaggtgagcccccgccgccccccagcccttcccatcccttccctgctccctggtggtctaaggacccaagctccctagacttcctcttccaccgtctgtacgtttcaaattacactggtgtaggcctgtactgctggtggggctgggcccctaaacgccagaaagtgaatcttaagaagctctgccctaaactgagaaccacatgctgagggaagggctgaaaggtgaaggctcagcctccctcacatgggtcctgggttacattaggtaccgggctgattgataggcatttggccatggttccttttcgtctacctttgggggccttctcaggcccagaacaaggctgttgttactatgtggaaaagctgaccagtgctgcacactaggggcacacacctttccatgagcagctcctgccctgtggcgacagccagcgtgcacccagacgctggtgccatggcgaagcaggcgttcaagaccatggagaagacaactcctcatctagaaaatgaggacacctcagtgacaaacacacctttttataccaatcagtatcctctgttcattaaaactggctatccatt

SEQ ID NO: 2048 - DNA, 2156 bp, Homo sapiens
  source 1..2156: mol_type = unassigned DNA
aacaggggggaccatggacttcatcagcattcagcagttggtaagtggagaaagagttgaagggaaagtgttgggatttggacatggagttcctgaccctggagcctggcctagtgactggaggaggggcccccaagaggctgtggcccgggagaagctgaaattggaagaagagaagaagaagaaacttgaaagatttaacagtaccagatttaatctggataacctggctgacttggaaaacttggttcaaagacggaaaaagcgactgagacacagagtcccccccaggaaacctgagcccctggttaagccgcagtcccaggcccaggtggagcctgtgggcctggagatgttcctgaaggcagctgctgagaaccaggagtacctgattgacaagtacttgacagacggaggggaccccaatgcccatgacaagctccaccgcaccgccttgcactgggcctgtctgaagggtcacagccagctggtgaacaagctgctggtggcaggtgccacagtggacgcgcgagacttgctggacaggacacctgtgttctgggcctgccgcggaggacatctggtcatcctcaaacagctgcttaaccagggagcccgggtcaatgcccgggacaagatcgggagcacccccctgcacgtggcagtgcgcacccggcaccccgactgcctggagcacctcatcgagtgtggcgcccacctgaacgcacaggataaggaaggggacacggctctgcacgaggccgtgcggcacggcagctacaaagccatgaagctactgctgctctatggggccgagctgggggtgcggaacgcggcctccgtgaccccggtgcagctggctcgagactggcagcgcggcatccgggaggccctgcaggcccacgtggcgcatccccgcacccggtgctgaccgcagcaccgccccccgccgcgcctttcgcactgccaccattccatcctgtgccccgcccccgcgtctgcacctctgtggttcctgccctcagccctggttcctccctctctggcctgtgccgcctcagcagccctggcagaactgaagagcggcaccgggcccagcaggcaaagagagaggcctccctggcttcgagtgtcaggggagccgcgttccctcccagggctggagcagaggaccacaaggcagcagaaagcgcgggtccagatgagggccaggaaggggaggagagtgagggccaagaacgagccttaagggagcagtcccaagctggagccacccagggctgggtctgggagtcctcagtgtccacttgtcccaggttagggggcttgccttgctctctccagggccagtctgtgtgtgtggggactcagcccgtggccggcagatgccatccaggatgtacaaggtgcagccaaggcaggccatgcaggggccgggcctgtctgcagctggtggatgcctgtgggcatggctttctctggggaccccattcctgtcagtagcaaccctggcagtgtccggagcggctctagacaactttggtcataggaactctggaggtgggttctggtcatctgaggtggctactcaacaggtttgaggccccacagcaacagaagtccaggacccactaggttgcctcagaagccctaagactgatgagctggagcgcgcatttgagagaagcctcgcacccactgtgtactggccccgctcaggccggcctggcacaccgttgcctgctggcggctctcatggggaagcgcctgggcactggggattgcttgtggcccactcaactcttggggcagtggcccgtaaccctagtttgcctgaggcccttatgtccccttatgttcctggtactggagcttgagctcttgcctggaacgctgcagctgcacccaccctgcttgatcccacctgggaggccaggacactgaggagctctgaacccagcccacagggaagcagaggaagctcctgccctgtggcgacagccagcgtgcacccagacgctggtgccatggcgaagcaggcgttcaagaccatggagaagacaactcctcatctagaaaatgaggacacctcagtgacaaacacacctttttataccaatcagtatcctctgttcattaaaactggctatccatta

SEQ ID NO: 2049 - DNA, 5278 bp, Homo sapiens
  source 1..5278: mol_type = unassigned DNA
atgaatcatatgtttcacataaaaaggcatagtatttctgctggtacagacgcttacaagaaaacaaaaccaatacagaacttgttccagaagccattatatgatcattgcagtgctaataactataaaagcatggaacctgaattagaaaatgtgaggtcttctccaccacgtggtgacagaacatcaaaagtatctctaaaagaagaattacagcaagatatgcaaaggtttaaaaatgagataggcatgttaaaagtagagttccaggctttggagaaagaaaaagtccaacttcaaaaagaggttgaagaagaaaggaaaaaacacagaaataatgaaatggaagtatcagcaaacatacatgatggtgctactgatgatgctgaagatgatgatgatgatgatggattaattcaaaaaagaaagagtggagaaactgatcatcagcaatttcccaggaaggaaaataaagagtatgctagtagtggtcctgccttgcaaatgaaggaagtaaagagcactgaaaaagaaaaacggacctcgaaagaatctgtgaattcaccagtgtttgggaaggccagtttactaactggtggcctgctacaagtggatgatgacagcagtttaagtgaaatagatgaggatgaaggaaggcctactaagaaaacatctaatgaaaagaacaaggtcaaaaaccaaatacagtctatggatgatgttgatgacttaactcagtcatctgaaacagcctcagaggattgtgagctaccccactctagttacaagaattttatgttgctcattgaacaacttggaatggagtgtaaagattctgttagcctattgaaaatccaggatgcagctctttcatgtgaaagattattagaacttaaaaaaaatcactgtgaactacttacagtaaaaattaaaaaaatggaagacaaggttaatgtactacaaagggagctatctgaaacaaaagaaataaaatcacagttagagcatcaaaaagttgaatgggaacgagaactgtgctctttgagatttagcttaaaccaagaagaagagaagagaagaaatgctgatacgttgtatgaaaaaattagggaacagttaagaagaaaagaagagcaatataggaaagaagttgaagtgaaacaacagcttgaactgagtctccaaacactggagatggaattgaggactgtaaaaagtaatttgaatcaggtcgttcaagagcgaaatgacgctcagaggcaactttctcgagaacagaatgccagaatgttacaagatggaattctgaccaatcacctttccaaacaaaaggagattgaaatggctcaaaagaaaatgaattctgagaattctcatagtcatgaagaagaaaaagacctatcgcataaaaatagcatgttgcaggaagaaattgctatgctaagactagaaatagacacaataaaaaatcaaaaccaggaaaaagaaaagaaatgttttgaggaccttaaaattgtaaaagaaaagaatgaagaccttcagaagactataaaacagaatgaggaaacattaacacaaacaatatcccagtataatggacggcttagtgttctgacagctgagaatgcaatgctaaattctaaactggagaatgaaaagcaaagcaaggaaagactggaagcagaagttgaatcataccattctagattggctgctgctatacatgatcgtgatcaaagtgagacatcaaaaagagaactagaacttgctttccagagagcaagagatgaatgttctcgtttacaggacaaaatgaattttgatgtgtctaacctaaaagataacaatgagattctttctcaacaactatttaaaactgaaagtaaactcaatagcctagaaattgagttccatcacacgagagatgccctcagagaaaagactttgggtttagaacgggtacaaaaggacctaagccaaacacagtgtcaaatgaaggaaatggaacaaaagtatcaaaatgaacaagttaaagtgaataaatacattggaaagcaggagtctgtagaggagagattgtctcaactacaaagtgagaatatgttgcttcgacaacaactggatgatgcccacaacaaggctgacaataaagagaagacagtgattaatatccaagaccagtttcatgctattgtgcaaaaacttcaagctgagagtgaaaagcaaagtcttctgctagaagaaagaaataaggagttaatcagtgaatgtaatcacttaaaagaaagacagtatcaatatgaaaatgaaaaggcagaaagagaagttgttgtgagacaacttcaacaagaactagctgataccctaaaaaaacaatctatgtcagaggcttcactggaggttacgtcacgttatcgtattaatttagaagatgagacacaggatttaaagaagaaattaggtcaaatcagaaatcaattgcaagaagcacaggatcgacatacagaagctgtcagatgtgctgagaagatgcaagatcacaagcaaaagcttgaaaaagataatgccaagttaaaagttacagtcaaaaagcaaatggacaaaattgaggagcttcagaaaaacctgttaaatgcaaatttgtctgaagatgaaaaggaacaattaaagaaacttatggaattaaaacagtcactggaatgtaatttggatcaagaaatgaagaaaaatgttgaattagaaagagagataactggatttaagaacctcttaaaaatgacaagaaagaagttaaatgaatatgaaaatggagaatttagtttccatggagatttaaaaactagtcaatttgaaatggatattcagattaataagctaaaacataagattgatgatcttacagcagaactggagactgcaggttcaaaatgtctacatctggatacaaagaaccaaattcttcaagaggagttgttatctatgaaaacagtacaaaagaaatgtgaaaaactacagaagaataaaaagaagttggaacaagaagtgatcaacctgagaagtcatatagaaaggaatatggtagaacttggtcaagtcaaacagtataaacaggagattgaagaaagagcaagacaggaaatagcagaaaaattaaaagaagtcaatctatttttacaggcacaagcagcatctcaagaaaacttagagcagtttagagagaataattttgcttcaatgaaaagtcagatggaactcagaattaaagatctggaatctgaactctccaaaataaaaacttctcaagaagactttaataaaaccgaactggaaaaatataagcaactctatctagaagaattaaaagttagaaaatctttgtcaagtaaactaaccaaaactaatgagaggctagcagaggtcaacaccaaacttcttgtggaaaaacagcagagcagatctttgttcaccactctcactaccaggccagtcatggagccaccttgtgtgggaaatcttaataatagtttagatctcaacagaaaacttattccaagagaaaacttagtgatctctacctcaaatccacgggcttcaaataatagcatggagaactacttgagcaagatgcagcaggagttggaaaaaaatataactagagaactcaaagaagctgctgctgaattggaatctggatcaatagcttcccctctagggtctactgatgagtcaaatctaaatcaagatctagtttggaaagcatcaagagaatatgtacaggttttaaagaaaaattatatgatctgaaagataagattttattactgggctgtttatgtgacattttgtttctcattaaatattaatatatgacatgtaaaaatattaaaggaacgtatttttgtatcatatatgtcagatcaaaatttatatagtattttaaacaatgttacttggcttctttaacttttaagtggattttgccaatgaaaaccaggaatattgagttttacatactcaaactgcccaaatgtgagctgtttaaacagccaaaccactaagttgtcattaatactttagtgcagttaattgatggcttatttgtattttgtaatttttatcactatatgtagtggtagatgtctaattggacttagacatcattttgttgtgcaggaactgtggtcattgttcatgtttggatgtattacaattgttacagtgccatcaaatttacataattttaattttaagcactgatttatatagctgttctcagggagaaacaagatttgcctgattcaccttttctgtttgtttatttatttttaattaaccttttggaaatagccttcagtttagagaaaatttcgaagttttagtacaaagactttctcctccgaacaatttgagagtaaattgctgacattatgtcatcacccctgattactttagtgggcattcctacaagtcaggacattctacataactacagtgcaaaccttgcaatcagaaagtcaacattaatacattctagtttgttacttctctgtaatgtcctttatagcaaaaggatcccattctaatccatggcttgtatttagttgttgtatctgttagatctttcagtctggaacagttcctcagtctttccttgaccttcatgaccttgaatattttgaagagtaaagtctggtaatataagaatgtccctcaattgggtttcatggtgattagatttagattatatgattttttggcaggagtatcacagaagtgacccagtgatcttctcattgcatcttacctgtgaccctacagttttgatttgccctgttactggtaatgttagcattgatcactaacagtggtatctgctgaatttctcctctgtaatgttattttttcaccttgtggttaattagtattttacagggaggtaatttgagactatgtacatatctctactccccatcgaaccctcaatttattcatttgcttgtatcaaataaaccatggattcatggtttattttattcagtgagttataattcattaatattgttattaaaaatttgtttttcttttaagaaatgttatattttgacaacttcagacttacagaaagattataagaggtagtacaaataatttttggatattattccccaaatgttaacattttactgcatttactttatcctttctcccccttctcctcctgtctttctagatgaatatgaatataggtacttaatacagattttttttctaaactgtt

SEQ ID NO: 2050 - DNA, 6591 bp, Homo sapiens
  source 1..6591: mol_type = unassigned DNA
gtctagcgggatcgcttgcttggtaacccggagggagagattggaaaccgcggagtttcctttgggaggctgcggccagccggggctgacttgttatgttgggctccggaggccgttaagagccgagagagacatgaggtgtctctgaagcccggtcgcctgggccatgaagaagatttttagtaagaagggcgagtcgcccttgggctccttcgcgcggcggcagaggagcagcgcgggaggcgggggcgagccgggggagggcgcctactcgcagcccggctaccacgtccgagaccgagatctcggcaagatccacaaagctgccagcgcgggtaatgtggcgaaagtgcagcagatccttttgctcaggaagaatggcttgaacgatagagacaagatgaacaggacggctctacatttggcctgtgccaatggtcatccagaagtagtaactctcctggtggacagaaaatgccagctcaatgtctgtgacaacgaaaacaggacagctctgatgaaggctgtacaatgccaggaagagaaatgtgcaactattctgctagaacatggtgctgatccaaatcttgcggatgtccatggcaacactgctcttcactatgctgtctataatgaggacatatcagtagcaacaaagctgcttttgtatgatgcaaatattgaagcaaaaaacaaggatgacctcacaccacttttacttgcagtaagtggaaaaaagcagcaaatggtggaatttttaataaagaaaaaagcaaatgtaaatgcagtagataagttggaaagcagtcaccaactaatttcagaatataaagaagaaaggatacctaaacattcttctcaaaatagtaattcagtggatgaaagctctgaagactccttaagcaggctttctggcaaaccgggtgttgatgattcatggcctacctcagatgacgaagacctcaattttgatactaagaatgtcccaaaaccaagcttagcaaagctaatgactgcttctcagcaatccaggaaaaatttagaagcaacatatggcactgtgagaacaggaaatagaactttgtttgaggatagagattccgatagtcaagatgaagttgtggttgaaagccttcctacaacatcaatcaaagtccagtgcttttctcatcctacctatcaatcacctgaccttcttccaaaaccttcccacaagtcgttagcaaaccctggtcttatgaaggaagaaccaacaaagccaggcattgcaaaaaaagaaaatggtattgatattattgaaagtgctccactagagcaaacaaataatgacaatttgacttatgttgatgaagtgcacaaaaataatagaagtgatatgatgtccgcattaggattaggacaagaggaagatatagaatcaccttgggattctgagagtatctctgagaattttccacagaagtatgttgatcctttagctggggctgcagacggaaaagaaaaaaatataggaaatgaacaagcagaagatgtgttttatataccttcttgcatgagtggatcaagaaactttaagatggctaaactagaggatacaagaaatgtaggcatgccagtagcccacatggagtctcctgagagatatcttcacttgaagcctaccattgaaatgaaagattctgttccaaataaagcaggaggaatgaaggatgtacaaacatccaaagcagctgaacatgacttagaagtagcatcagaagaagagcaagaaagggaagggagtgaaaataaccagccacaggttgaagaagaaaggaaaaaacacagaaataatgaaatggaagtatcagcaaacatacatgatggtgctactgatgatgctgaagatgatgatgatgatgatggattaattcaaaaaagaaagagtggagaaactgatcatcagcaatttcccaggaaggaaaataaagagtatgctagtagtggtcctgccttgcaaatgaaggaagtaaagagcactgaaaaagaaaaacggacctcgaaagaatctgtgaattcaccagtgtttgggaaggccagtttactaactggtggcctgctacaagtggatgatgacagcagtttaagtgaaatagatgaggatgaaggaaggcctactaagaaaacatctaatgaaaagaacaaggtcaaaaaccaaatacagtctatggatgatgttgatgacttaactcagtcatctgaaacagcctcagaggattgtgagctaccccactctagttacaagaattttatgttgctcattgaacaacttggaatggagtgtaaagattctgttagcctattgaaaatccaggatgcagctctttcatgtgaaagattattagaacttaaaaaaaatcactgtgaactacttacagtaaaaattaaaaaaatggaagacaaggttaatgtactacaaagggagctatctgaaacaaaagaaataaaatcacagttagagcatcaaaaagttgaatgggaacgagaactgtgctctttgagatttagcttaaaccaagaagaagagaagagaagaaatgctgatacgttgtatgaaaaaattagggaacagttaagaagaaaagaagagcaatataggaaagaagttgaagtgaaacaacagcttgaactgagtctccaaacactggagatggaattgaggactgtaaaaagtaatttgaatcaggtcgttcaagagcgaaatgacgctcagaggcaactttctcgagaacagaatgccagaatgttacaagatggaattctgaccaatcacctttccaaacaaaaggagattgaaatggctcaaaagaaaatgaattctgagaattctcatagtcatgaagaagaaaaagacctatcgcataaaaatagcatgttgcaggaagaaattgctatgctaagactagaaatagacacaataaaaaatcaaaaccaggaaaaagaaaagaaatgttttgaggaccttaaaattgtaaaagaaaagaatgaagaccttcagaagactataaaacagaatgaggaaacattaacacaaacaatatcccagtataatggacggcttagtgttctgacagctgagaatgcaatgctaaattctaaactggagaatgaaaagcaaagcaaggaaagactggaagcagaagttgaatcataccattctagattggctgctgctatacatgatcgtgatcaaagtgagacatcaaaaagagaactagaacttgctttccagagagcaagagatgaatgttctcgtttacaggacaaaatgaattttgatgtgtctaacctaaaagataacaatgagattctttctcaacaactatttaaaactgaaagtaaactcaatagcctagaaattgagttccatcacacgagagatgccctcagagaaaagactttgggtttagaacgggtacaaaaggacctaagccaaacacagtgtcaaatgaaggaaatggaacaaaagtatcaaaatgaacaagttaaagtgaataaatacattggaaagcaggagtctgtagaggagagattgtctcaactacaaagtgagaatatgttgcttcgacaacaactggatgatgcccacaacaaggctgacaataaagagaagacagtgattaatatccaagaccagtttcatgctattgtgcaaaaacttcaagctgagagtgaaaagcaaagtcttctgctagaagaaagaaataaggagttaatcagtgaatgtaatcacttaaaagaaagacagtatcaatatgaaaatgaaaaggcagaaagagaagttgttgtgagacaacttcaacaagaactagctgataccctaaaaaaacaatctatgtcagaggcttcactggaggttacgtcacgttatcgtattaatttagaagatgagacacaggatttaaagaagaaattaggtcaaatcagaaatcaattgcaagaagcacaggatcgacatacagaagctgtcagatgtgctgagaagatgcaagatcacaagcaaaagcttgaaaaagataatgccaagttaaaagttacagtcaaaaagcaaatggacaaaattgaggagcttcagaaaaacctgttaaatgcaaatttgtctgaagatgaaaaggaacaattaaagaaacttatggaattaaaacagtcactggaatgtaatttggatcaagaaatgaagaaaaatgttgaattagaaagagagataactggatttaagaacctcttaaaaatgacaagaaagaagttaaatgaatatgaaaatggagaatttagtttccatggagatttaaaaactagtcaatttgaaatggatattcagattaataagctaaaacataagattgatgatcttacagcagaactggagactgcaggttcaaaatgtctacatctggatacaaagaaccaaattcttcaagaggagttgttatctatgaaaacagtacaaaagaaatgtgaaaaactacagaagaataaaaagaagttggaacaagaagtgatcaacctgagaagtcatatagaaaggaatatggtagaacttggtcaagtcaaacagtataaacaggagattgaagaaagagcaagacaggaaatagcagaaaaattaaaagaagtcaatctatttttacaggcacaagcagcatctcaagaaaacttagagcagtttagagagaataattttgcttcaatgaaaagtcagatggaactcagaattaaagatctggaatctgaactctccaaaataaaaacttctcaagaagactttaataaaaccgaactggaaaaatataagcaactctatctagaagaattaaaagttagaaaatctttgtcaagtaaactaaccaaaactaatgagaggctagcagaggtcaacaccaaacttcttgtggaaaaacagcagagcagatctttgttcaccactctcactaccaggccagtcatggagccaccttgtgtgggaaatcttaataatagtttagatctcaacagaaaacttattccaagagaaaacttagtgatctctacctcaaatccacgggcttcaaataatagcatggagaactacttgagcaagatgcagcaggagttggaaaaaaatataactagagaactcaaagaagctgctgctgaattggaatctggatcaatagcttcccctctagggtctactgatgagtcaaatctaaatcaagatctagtttggaaagcatcaagagaatatgtacaggttttaaagaaaaattatatgatctgaaagataagattttattactgggctgtttatgtgacattttgtttctcattaaatattaatatatgacatgtaaaaatattaaaggaacgtatttttgtatcatatatgtcagatcaaaatttatatagtattttaaacaatgttacttggcttctttaacttttaagtggattttgccaatgaaaaccaggaatattgagttttacatactcaaactgcccaaatgtgagctgtttaaacagccaaaccactaagttgtcattaatactttagtgcagttaattgatggcttatttgtattttgtaatttttatcactatatgtagtggtagatgtctaattggacttagacatcattttgttgtgcaggaactgtggtcattgttcatgtttggatgtattacaattgttacagtgccatcaaatttacataattttaattttaagcactgatttatatagctgttctcagggagaaacaagatttgcctgattcaccttttctgtttgtttatttatttttaattaaccttttggaaatagccttcagtttagagaaaatttcgaagttttagtacaaagactttctcctccgaacaatttgagagtaaattgctgacattatgtcatcacccctgattactttagtgggcattcctacaagtcaggacattctacataactacagtgcaaaccttgcaatcagaaagtcaacattaatacattctagtttgttacttctctgtaatgtcctttatagcaaaaggatcccattctaatccatggcttgtatttagttgttgtatctgttagatctttcagtctggaacagttcctcagtctttccttgaccttcatgaccttgaatattttgaagagtaaagtctggtaatataagaatgtccctcaattgggtttcatggtgattagatttagattatatgattttttggcaggagtatcacagaagtgacccagtgatcttctcattgcatcttacctgtgaccctacagttttgatttgccctgttactggtaatgttagcattgatcactaacagtggtatctgctgaatttctcctctgtaatgttattttttcaccttgtggttaattagtattttacagggaggtaatttgagactatgtacatatctctactccccatcgaaccctcaatttattcatttgcttgtatcaaataaaccatggattcatggtttattttattcagtgagttataattcattaatattgttattaaaaatttgtttttcttttaagaaatgtta

SEQ ID NO: 2051 - DNA, 5287 bp, Homo sapiens
  source 1..5287: mol_type = unassigned DNA
ggctccggaggccgttaagagccgagagagacatgaggtgtctctgaagcccggtcgcctgggccatgaagaagatttttagtaagaagggcgagtcgcccttgggctccttcgcgcggcggcagaggagcagcgcgggaggcgggggcgagccgggggagggcgcctactcgcagcccggctaccacgtccgagaccgagatctcggcaagatccacaaagctgccagcgcgggtaatgtggcgaaagtgcagcagatccttttgctcaggaagaatggcttgaacgatagagacaagatgaacaggacggctctacatttggcctgtgccaatggtcatccagaagtagtaactctcctggtggacagaaaatgccagctcaatgtctgtgacaacgaaaacaggacagctctgatgaaggctgtacaatgccaggaagagaaatgtgcaactattctgctagaacatggtgctgatccaaatcttgcggatgtccatggcaacactgctcttcactatgctgtctataatgaggacatatcagtagcaacaaagctgcttttgtatgatgcaaatattgaagcaaaaaacaaggatgacctcacaccacttttacttgcagtaagtggaaaaaagcagcaaatggtggaatttttaataaagaaaaaagcaaatgtaaatgcagtagataagttggaaagcagtcaccaactaatttcagaatataaagaagaaaggatacctaaacattcttctcaaaatagtaattcagtggatgaaagctctgaagactccttaagcagtttattttattttattttttttgagacaaagtcttgcactgttgcccaggctggagtgctacagcatgatctcagctcactgcaatctctgcttcctgggttcacacaattcttctgcctccacctcccaagtagctgggaccacaggctttctggcaaaccgggtgttgatgattcatggcctacctcagatgacgaagacctcaattttgatactaagaatgtcccaaaaccaagcttagcaaagctaatgactgcttctcagcaatccaggaaaaatttagaagcaacatatggcactgtgagaacaggaaatagaactttgtttgaggatagagattccgatagtcaagatgaagttgtggttgaaagccttcctacaacatcaatcaaagtccagtgcttttctcatcctacctatcaatcacctgaccttcttccaaaaccttcccacaagtcgttagcaaaccctggtcttatgaaggaagaaccaacaaagccaggcattgcaaaaaaagaaaatggtattgatattattgaaagtgctccactagagcaaacaaataatgacaatttgacttatgttgatgaagtgcacaaaaataatagaagtgatatgatgtccgcattaggattaggacaagaggaagatatagaatcaccttgggattctgagagtatctctgagaattttccacagaagtatgttgatcctttagctggggctgcagacggaaaagaaaaaaatataggaaatgaacaagcagaagagtctcctgagagatatcttcacttgaagcctaccattgaaatgaaagattctgttccaaataaagcaggaggaatgaaggatgtacaaacatccaaagcagctgaacatgacttagaagtagcatcagaagaagagcaagaaagggaagggagtgaaaataaccagccacaggttgaagaagaaaggaaaaaacacagaaataatgaaatggaagtatcagcaaacatacatgatggtgctactgatgatgctgaagatgatgatgatgatgatggattaattcaaaaaagaaagagtggagaaactgatcatcagcaatttcccaggaaggaaaataaagagtatgctagtagtggtcctgccttgcaaatgaaggaagtaaagagcactgaaaaagaaaaacggacctcgaaagaatctgtgaattcaccagtgtttgggaaggccagtttactaactggtggcctgctacaagtggatgatgacagcagtttaagtgaaatagatgaggatgaaggaaggcctactaagaaaacatctaatgaaaagaacaaggtcaaaaaccaaatacagtctatggatgatgttgatgacttaactcagtcatctgaaacagcctcagaggattgtgagctaccccactctagttacaagaattttatgttgctcattgaacaacttggaatggagtgtaaagattctgttagcctattgaaaatccaggatgcagctctttcatgtgaaagattattagaacttaaaaaaaatcactgtgaactacttacagtaaaaattaaaaaaatggaagacaaggttaatgtactacaaagggagctatctgaaacaaaagaaataaaatcacagttagagcatcaaaaagttgaatgggaacgagaactgtgctctttgagatttagcttaaaccaagaagaagagaagagaagaaatgctgatacgttgtatgaaaaaattagggaacagttaagaagaaaagaagagcaatataggaaagaagttgaagtgaaacaacagcttgaactgagtctccaaacactggagatggaattgaggactgtaaaaagtaatttgaatcaggtcgttcaagagcgaaatgacgctcagaggcaactttctcgagaacagaatgccagaatgttacaagatggaattctgaccaatcacctttccaaacaaaaggagattgaaatggctcaaaagaaaatgaattctgagaattctcatagtcatgaagaagaaaaagacctatcgcataaaaatagcatgttgcaggaagaaattgctatgctaagactagaaatagacacaataaaaaatcaaaaccaggaaaaagaaaagaaatgttttgaggaccttaaaattgtaaaagaaaagaatgaagaccttcagaagactataaaacagaatgaggaaacattaacacaaacaatatcccagtataatggacggcttagtgttctgacagctgagaatgcaatgctaaattctaaactggagaatgaaaagcaaagcaaggaaagactggaagcagaagttgaatcataccattctagattggctgctgctatacatgatcgtgatcaaagtgagacatcaaaaagagaactagaacttgctttccagagagcaagagatgaatgttctcgtttacaggacaaaatgaattttgatgtgtctaacctaaaagataacaatgagattctttctcaacaactatttaaaactgaaagtaaactcaatagcctagaaattgagttccatcacacgagagatgccctcagagaaaagactttgggtttagaacgggtacaaaaggacctaagccaaacacagtgtcaaatgaaggaaatggaacaaaagtatcaaaatgaacaagttaaagtgaataaatacattggaaagcaggagtctgtagaggagagattgtctcaactacaaagtgagaatatgttgcttcgacaacaactggatgatgcccacaacaaggctgacaataaagagaagacagtgattaatatccaagaccagtttcatgctattgtgcaaaaacttcaagctgagagtgaaaagcaaagtcttctgctagaagaaagaaataaggagttaatcagtgaatgtaatcacttaaaagaaagacagtatcaatatgaaaatgaaaaggcagaaagagaagttgttgtgagacaacttcaacaagaactagctgataccctaaaaaaacaatctatgtcagaggcttcactggaggttacgtcacgttatcgtattaatttagaagatgagacacaggatttaaagaagaaattaggtcaaatcagaaatcaattgcaagaagcacaggatcgacatacagaagctgtcagatgtgctgagaagatgcaagatcacaagcaaaagcttgaaaaagataatgccaagttaaaagttacagtcaaaaagcaaatggacaaaattgaggagcttcagaaaaacctgttaaatgcaaatttgtctgaagatgaaaaggaacaattaaagaaacttatggaattaaaacagtcactggaatgtaatttggatcaagaaatgaagaaaaatgttgaattagaaagagagataactggatttaagaacctcttaaaaatgacaagaaagaagttaaatgaatatgaaaatggagaatttagtttccatggagatttaaaaactagtcaatttgaaatggatattcagattaataagctaaaacataagattgatgatcttacagcagaactggagactgcaggttcaaaatgtctacatctggatacaaagaaccaaattcttcaagaggagttgttatctatgaaaacagtacaaaagaaatgtgaaaaactacagaagaataaaaagaagttggaacaagaagtgatcaacctgagaagtcatatagaaaggaatatggtagaacttggtcaagtcaaacagtataaacaggagattgaagaaagagcaagacaggaaatagcagaaaaattaaaagaagtcaatctatttttacaggcacaagcagcatctcaagaaaacttagagcagtttagagagaataattttgcttcaatgaaaagtcagatggaactcagaattaaagatctggaatctgaactctccaaaataaaaacttctcaagaagactttaataaaaccgaactggaaaaatataagcaactctatctagaagaattaaaagttagaaaatctttgtcaagtaaactaaccaaaactaatgagaggctagcagaggtcaacaccaaacttcttgtggaaaaacagcagagcagatctttgttcaccactctcactaccaggccagtcatggagccaccttgtgtgggaaatcttaataatagtttagatctcaacagaaaacttattccaagagaaaacttagtgatctctacctcaaatccacgggcttcaaataatagcatggagaactacttgagcaagatgcagcaggagttggaaaaaaatataactagagaactcaaagaagctgctgctgaattggaatctggatcaatagcttcccctctagggtctactgatgagtcaaatctaaatcaagatctagtttggaaagcatcaagagaatatgtacaggttttaaagaaaaattatatgatctgaaagataagattttattactgggctgtttatgtgacattttg

SEQ ID NO: 2052 - DNA, 761 bp, Homo sapiens
  source 1..761: mol_type = unassigned DNA
gtttagagagaataattttgcttcaatgaaaagtcagatggaactcagaattaaagatctggaatctgaactctccaaaataaaaacttctcaagaagactttaataaaaccgaactggaaaaatataagcaactctatctagaagaattaaaagttagaaaatctttgtcaagtaaactaaccaaaactaatgagaggctagcagaggtcaacaccaaacttcttgtggaaaaacagcagagcagatctttgttcaccactctcactaccaggccagtcatggagccaccttgtgtgggaaatcttaataatagtttagatctcaacagaaaacttattccaagagaaaacttagtgatctctacctcaaatccacgggcttcaaataatagcatggagaactacttgagcaagatgcagcaggagttggaaaaaaatataactagagaactcaaagaagctgctgctgaattggaatctggatcaatagcttcccctctagggtctactgatgagtcaaatctaaatcaagatctagtttggaaagcatcaagagaatatggaccttctgatgaaacccctcatgactatgttctgatgactgaccaatgtctcacttccaggacagacctgcaatagatgccactggataatgctgagatagactggtgcaggacaaaggacagaactcaaagtcatccctctgctgacctgagacaaatgtgtatctgagtgcttcctccgccctattgtctatgtc

SEQ ID NO: 2053 - DNA, 6295 bp, Homo sapiens
  source 1..6295: mol_type = unassigned DNA
atgagtcgagtgtgtattgttgttttggaggaggtagaagatgaatctcctgcattcatttctaaattgccacaggaaaataaatccctacattctccaccttctggaaatgtattggtaagatatccatcactggtgcaagctatatttaacggagatcctgatgaagttcgagcactaatatttaagaaagaagatgttaactttcaggacaatgaaaagcgaaccccattgcacgccgcagcttaccttggagatgcagaaatcattgaacttcttattttatctggagctagagttaatgccaaagacagcaaatggttgacacctttacacagagcagttgcatcttgtagtgaggaagcagttcaggtacttttgaagcattctgcagatgttaatgctcgagacaaaaattggcaaacccctttacatatagctgctgctaataaagctgtaaagtgtgctgaagctttggtacctcttctgagtaatgtaaacgtatctgatcgagcagggaggactgcattacatcatgcagctttcagtggacatggtgagatggtcaaactactcttgtctagaggtgccaatattaatgcttttgacaagaaagataggcgtgctatccattgggcagcatatatgggtcacattgaagtagtgaaattgcttgtgtcgcatggagctgaagtgacatgcaaggataaaaagtcttatacacctcttcatgcagcagcctctagtggaatgatcagcgtagtcaagtaccttctagatcttggagttgatatgaatgaaccaaatgcctatggaaatacacctcttcatgtagcctgctataatggacaagatgttgtagtgaatgaacttatagactgtggtgctattgtgaatcaaaagaatgaaaaaggatttactcctttgcactttgctgctgcatcaacacatggagcattgtgtttagagcttctagttggcaatggggccgatgtcaatatgaagagtaaagatgggaaaaccccactacacatgactgctctccacggtagattctcccgatcacaaaccattatccagagtggagctgtaatcgactgtgaggataagaatggaaatacccctttgcacatagcagcacggtatggccatgagctgctgatcaacactcttattacaagtggtgctgacactgcaaagcgtggcatacatggaatgttccccctccatttggcagccttaagcggcttttcagattgctgcagaaaacttctttcttcaggatttgatatagataccccagatgattttggcaggacttgtctacatgcagctgcagctggagggaatttggagtgcctaaaccttctgctgaatactggtgcagactttaataaaaaggacaaatttgggagatctccactgcactacgctgctgccaactgcaattaccagtgcctgtttgctcttgtgggatcaggagcaagtgtgaatgaccttgatgaaagaggctgcacacccctgcactatgcagctacatcagacacagatggcaagtgcctggaatacttattaagaaacgatgcaaatccagggatccgtgataagcaaggatacaacgcagttcattattcagctgcttatggtcaccgtctatgtcttcagctgattgcaagtgaaactcctctagatgttttaatggaaacctcaggaacagacatgctgagtgattcagataatagagcaacaataagccctttacacttggctgcctatcatggtcaccatcaagcactggaagtgttggtacagtctttgttagatcttgatgtcagaaatagtagtggaagaacacccctagatcttgcagcttttaagggccatgttgaatgtgtggatgtactcattaatcagggagcctcaatcttagtaaaagattacattttgaagaggacacctattcatgcagcagcaacaaatggtcattcagaatgcttacggctattaataggaaatgcagaaccacagaatgcagtggatattcaagatggaaatggacagacgcctctgatgctatctgttctcaacgggcacacagactgtgtttactcattgctgaacaaaggagcaaatgtagatgccaaagataagtggggaaggacagcgttgcatagaggggcagttacaggccatgaagaatgtgtagatgcattacttcaacatggtgctaagtgcttacttcgggatagcaggggccggacgcctatacacctgtctgctgcctgtggacacattggtgttcttggagcccttttgcagtcagcagcatctatggatgcaaatccagccacagcagacaatcatggatatacggcacttcactgggcttgctacaatggtcacgagacatgtgtagaactgcttttagaacaggaagttttccagaaaacggaaggaaatgcttttagtccattgcattgtgccgtgataaatgacaacgaaggtgctgctgagatgttaattgatacattaggtgccagcattgtgaacgccacagattcaaaaggaagaactcctctccatgcagccgccttcacagaccatgtagagtgtttacagctgctgctcagccataatgctcaagtcaattctgtggactctacagggaaaacacctcttatgatggctgcagaaaatggacaaacaaatacagttgagatgctggttagcagtgctagtgcagaactgactttacaagataacagtaaaaatactgccctccatttggcttgtagcaagggtcatgaaactagtgccttgttaatactggaaaagataacagatagaaacctcatcaatgcaaccaacgcagccttgcaaacacctctgcatgttgctgcccgaaatgggctaacaatggtggttcaggaacttttgggaaaaggagcaagtgtgcttgcagtagatgaaaatggctataccccagctttggcctgtgctcccaataaggatgtggctgattgcctggctctcattttggccaccatgatgcctgtctcatcaagtagtcctttatcatccttaacattcaatgccattaaccgttataccaacacctcaaaaacagtcagctttgaagctttgcccatcatgaggaatgaacctagctcctattgcagtttcaataacattggaggggaacaggagtacttatacactgacgtggatgagctcaacgactccgattctgagacctactgagaggctgaggaggagggagttctcacagtaaagcttcaaactgtgctttttcaggaaaaaggcactttgatattcacgtagaaattcaacctaagaggaaagatcccacagtgagccaatgttaagagatctgatggcattaggaggaagagttttaaaggcaagttttacaaaaggaacttctagaatcttgaaatagacctgactgaggaaaacacattgatgtcagaattctttgtggaattgtttaatttggttttgcagtgccaggaacaattggggacactgtgcactctaacctgcttacacaagcaacactattgtaacagaagaaataaagacactagatttaaattttatcaataaaattacaactaaatttaaaggcaataaaagtttggtacagtaggcattatgtgcacagcaaattgcaaaaggaccaaataactgaaaggtttttttaataaaatgccattttgtggaaactggagtagattaaatgaaacattacctaaaccaaactgcaatatttctggaaatgaagctgagatttggttttaaatgttgagtttttttgggttttgttttttttttaagaaaacatctgaaagccttccaatgctgtattaaaccatgagagaaagcagatgtatttttacatttttttcttttacagaactatttcaaatttccaatttttatactattagaattaaaaaccagctgactgggtgcaatacgggtgaaaatacttgtgacatagacattgagatggattggggtcaggctgttgccctgttttgaatggtttgggtttaaaatagtactatttttgtttgaaaatgtaaagaatttcctagaaaaaaattcatgaaatcaaaaagtagactatttcaccctattgcagctaagtggtcctggggcatggagtcttcaacctctctatgaatggcacaccttagtcacttatgttacttttgtgtccccaccatgggttgggggattttttgtttattctgatctatgagttttgaaaaagtgaataatcaaaaggaaaataattccttgttgttcataaattaagcatcactaaagtctcttgaaaggcatttctgtattgggcaagatttaaaatactaaagccttaggtcctattcatatttaaagtagcatgtttgtaacctgttactatttggagagagaagcagttgcctgccaaattgaagactacctttcaaatagcaaaagagagagagaaggctgatatttcggcttttaaataaagatttgtgtggttctgcttttactgtaactgtcactttcccagtgaaaatgatttcatatacattgagggtcttacaggtatgggtaaagttctataaattgcaacaaaatgatacccaatttcattttatcctttttgtattgtgaaactggaaactttatgacattgtaaattatcagctggtttttctgaatataaagtgtgaaaacacagaacagtattttgatctatttgataattttgtgggttttttgaagaattaatgagcatgtacatagaaatagtgactgcttgaatactgtatttacttgcactctttcagtacatcaagattcctgtatattttagagtataataaaacacagatgtgagttgtatttaatgaataatgtatttgtatctgtgcatattatctacaaatctataaagtttctagggcattgactactagattttaagcattttttctaaaatatttacagaaattataaatctaatcccccatcttttctttataatataaagaagtcataatgaacccttcctaattattagtagtaggaaggtgaatatgcattttaatgacagtggactacattttctattgtaccttttgaaaaaaaaaaaaatcaagcagattctaaaagtatacatatgtgtgctttctctttccttttaggaattctcttctgaattccctgagggaattttctagaatctcagaattgaaagagacctgaggttcatccagtctctaacctcttaacaaatgcaggagtcccttctacaagggtgatctttccaccttgaacacttccaagtgactctacctcaccaagcagtccattcagttgttgagcagctctaactgttagaaaggtcttccttagatggagttgaagcctccctcccggtaacttctgtctttgggcctgggtctgtcctccaagagaaccctgagaatgttggaaggatgaatctcgcacattctgccatgtcttctcttttacaggctgtttgacttctctgctgaagtgatttccagaaggactcatttgacacactattagatttaccacatctaatgaaatccaaggtgtagctataaagtgacaagctgtttttaatttatcacatacaccagaacttctatcctgcatcacttatatgtaaatgatgctgttaccaaaaacattaaggtagttcttgcgaatgccaccccactaagaaaactatttcattacttttgtaatccatctgtgagagtctgccccccagcttaaccacttcctttggtctgcacccaatgaagggaaaccccaaagtactgtctcaaatggtatttgaactacgccagtattgttggaataagtacattaattacttgaatgaatgaacacagcaccgtagaaatttcctttatggttacaccttgtatgtctaaagcattcaggccctgttctgtagtgtttcttatcctcacacagagtagaaaagcctgtttgctttatttaacttatacataaaagatgacatctgaaatatctgatgtgtattataataccagcttctgctctagaactactttgggtgaaatggtggtaatagcaaatgacctcctttaacaagacactcatctcaaacaatgccatttagttcaggagatctctaagtgtagctgtaaattttggggttaatttggcttatattggaccttttaaaagaaataaagttttttaatgcaataaa

SEQ ID NO: 2054 - DNA, 6564 bp, Homo sapiens
  source 1..6564: mol_type = unassigned DNA
gcggccgcgggggctgccagggtatttcgggaagggggcgtgaggaggcggcggcggcagcggcgggtagggcaggcagcagagggaaggagaaagaaaggaaggaagagggcggggagtcctcagaggaggaggcgggaccggccgggcacctcacctctcggcggcggcggcggcggcggcggcggcgggcggccggggaggcggcgccgccccctgcccgcaggtcttctcagcgcagtcggccgcggacccgctggtcccgggcagcggccaaggctactggggcgggagcagtgggccggtcggcggcggcagcggcagcggcggaggaggaggaggctggagtgggcgcggaggcgaccgccatggcgttcctcaaactccgtgaccagccatcactggtgcaagctatatttaacggagatcctgatgaagttcgagcactaatatttaagaaagaagatgttaactttcaggacaatgaaaagcgaaccccattgcacgccgcagcttaccttggagatgcagaaatcattgaacttcttattttatctggagctagagttaatgccaaagacagcaaatggttgacacctttacacagagcagttgcatcttgtagtgaggaagcagttcaggtacttttgaagcattctgcagatgttaatgctcgagacaaaaattggcaaacccctttacatatagctgctgctaataaagctgtaaagtgtgctgaagctttggtacctcttctgagtaatgtaaacgtatctgatcgagcagggaggactgcattacatcatgcagctttcagtggacatggtgagatggtcaaactactcttgtctagaggtgccaatattaatgcttttgacaagaaagataggcgtgctatccattgggcagcatatatgggtcacattgaagtagtgaaattgcttgtgtcgcatggagctgaagtgacatgcaaggataaaaagtcttatacacctcttcatgcagcagcctctagtggaatgatcagcgtagtcaagtaccttctagatcttggagttgatatgaatgaaccaaatgcctatggaaatacacctcttcatgtagcctgctataatggacaagatgttgtagtgaatgaacttatagactgtggtgctattgtgaatcaaaagaatgaaaaaggatttactcctttgcactttgctgctgcatcaacacatggagcattgtgtttagagcttctagttggcaatggggccgatgtcaatatgaagagtaaagatgggaaaaccccactacacatgactgctctccacggtagattctcccgatcacaaaccattatccagagtggagctgtaatcgactgtgaggataagaatggaaatacccctttgcacatagcagcacggtatggccatgagctgctgatcaacactcttattacaagtggtgctgacactgcaaagcgtggcatacatggaatgttccccctccatttggcagccttaagcggcttttcagattgctgcagaaaacttctttcttcaggatttgatatagataccccagatgattttggcaggacttgtctacatgcagctgcagctggagggaatttggagtgcctaaaccttctgctgaatactggtgcagactttaataaaaaggacaaatttgggagatctccactgcactacgctgctgccaactgcaattaccagtgcctgtttgctcttgtgggatcaggagcaagtgtgaatgaccttgatgaaagaggctgcacacccctgcactatgcagctacatcagacacagatggcaagtgcctggaatacttattaagaaacgatgcaaatccagggatccgtgataagcaaggatacaacgcagttcattattcagctgcttatggtcaccgtctatgtcttcagctgattgcaagtgaaactcctctagatgttttaatggaaacctcaggaacagacatgctgagtgattcagataatagagcaacaataagccctttacacttggctgcctatcatggtcaccatcaagcactggaagtgttggtacagtctttgttagatcttgatgtcagaaatagtagtggaagaacacccctagatcttgcagcttttaagggccatgttgaatgtgtggatgtactcattaatcagggagcctcaatcttagtaaaagattacattttgaagaggacacctattcatgcagcagcaacaaatggtcattcagaatgcttacggctattaataggaaatgcagaaccacagaatgcagtggatattcaagatggaaatggacagacgcctctgatgctatctgttctcaacgggcacacagactgtgtttactcattgctgaacaaaggagcaaatgtagatgccaaagataagtggggaaggacagcgttgcatagaggggcagttacaggccatgaagaatgtgtagatgcattacttcaacatggtgctaagtgcttacttcgggatagcaggggccggacgcctatacacctgtctgctgcctgtggacacattggtgttcttggagcccttttgcagtcagcagcatctatggatgcaaatccagccacagcagacaatcatggatatacggcacttcactgggcttgctacaatggtcacgagacatgtgtagaactgcttttagaacaggaagttttccagaaaacggaaggaaatgcttttagtccattgcattgtgccgtgataaatgacaacgaaggtgctgctgagatgttaattgatacattaggtgccagcattgtgaacgccacagattcaaaaggaagaactcctctccatgcagccgccttcacagaccatgtagagtgtttacagctgctgctcagccataatgctcaagtcaattctgtggactctacagggaaaacacctcttatgatggctgcagaaaatggacaaacaaatacagttgagatgctggttagcagtgctagtgcagaactgactttacaagataacagtaaaaatactgccctccatttggcttgtagcaagggtcatgaaactagtgccttgttaatactggaaaagataacagatagaaacctcatcaatgcaaccaacgcagccttgcaaacacctctgcatgttgctgcccgaaatgggctaacaatggtggttcaggaacttttgggaaaaggagcaagtgtgcttgcagtagatgaaaatggctataccccagctttggcctgtgctcccaataaggatgtggctgattgcctggctctcattttggccaccatgatgcctgtctcatcaagtagtcctttatcatccttaacattcaatgccattaaccgttataccaacacctcaaaaacagtcagctttgaagctttgcccatcatgaggaatgaacctagctcctattgcagtttcaataacattggaggggaacaggagtacttatacactgacgtggatgagctcaacgactccgattctgagacctactgagaggctgaggaggagggagttctcacagtaaagcttcaaactgtgctttttcaggaaaaaggcactttgatattcacgtagaaattcaacctaagaggaaagatcccacagtgagccaatgttaagagatctgatggcattaggaggaagagttttaaaggcaagttttacaaaaggaacttctagaatcttgaaatagacctgactgaggaaaacacattgatgtcagaattctttgtggaattgtttaatttggttttgcagtgccaggaacaattggggacactgtgcactctaacctgcttacacaagcaacactattgtaacagaagaaataaagacactagatttaaattttatcaataaaattacaactaaatttaaaggcaataaaagtttggtacagtaggcattatgtgcacagcaaattgcaaaaggaccaaataactgaaaggtttttttaataaaatgccattttgtggaaactggagtagattaaatgaaacattacctaaaccaaactgcaatatttctggaaatgaagctgagatttggttttaaatgttgagtttttttgggttttgttttttttttaagaaaacatctgaaagccttccaatgctgtattaaaccatgagagaaagcagatgtatttttacatttttttcttttacagaactatttcaaatttccaatttttatactattagaattaaaaaccagctgactgggtgcaatacgggtgaaaatacttgtgacatagacattgagatggattggggtcaggctgttgccctgttttgaatggtttgggtttaaaatagtactatttttgtttgaaaatgtaaagaatttcctagaaaaaaattcatgaaatcaaaaagtagactatttcaccctattgcagctaagtggtcctggggcatggagtcttcaacctctctatgaatggcacaccttagtcacttatgttacttttgtgtccccaccatgggttgggggattttttgtttattctgatctatgagttttgaaaaagtgaataatcaaaaggaaaataattccttgttgttcataaattaagcatcactaaagtctcttgaaaggcatttctgtattgggcaagatttaaaatactaaagccttaggtcctattcatatttaaagtagcatgtttgtaacctgttactatttggagagagaagcagttgcctgccaaattgaagactacctttcaaatagcaaaagagagagagaaggctgatatttcggcttttaaataaagatttgtgtggttctgcttttactgtaactgtcactttcccagtgaaaatgatttcatatacattgagggtcttacaggtatgggtaaagttctataaattgcaacaaaatgatacccaatttcattttatcctttttgtattgtgaaactggaaactttatgacattgtaaattatcagctggtttttctgaatataaagtgtgaaaacacagaacagtattttgatctatttgataattttgtgggttttttgaagaattaatgagcatgtacatagaaatagtgactgcttgaatactgtatttacttgcactctttcagtacatcaagattcctgtatattttagagtataataaaacacagatgtgagttgtatttaatgaataatgtatttgtatctgtgcatattatctacaaatctataaagtttctagggcattgactactagattttaagcattttttctaaaatatttacagaaattataaatctaatcccccatcttttctttataatataaagaagtcataatgaacccttcctaattattagtagtaggaaggtgaatatgcattttaatgacagtggactacattttctattgtaccttttgaaaaaaaaaaaaatcaagcagattctaaaagtatacatatgtgtgctttctctttccttttaggaattctcttctgaattccctgagggaattttctagaatctcagaattgaaagagacctgaggttcatccagtctctaacctcttaacaaatgcaggagtcccttctacaagggtgatctttccaccttgaacacttccaagtgactctacctcaccaagcagtccattcagttgttgagcagctctaactgttagaaaggtcttccttagatggagttgaagcctccctcccggtaacttctgtctttgggcctgggtctgtcctccaagagaaccctgagaatgttggaaggatgaatctcgcacattctgccatgtcttctcttttacaggctgtttgacttctctgctgaagtgatttccagaaggactcatttgacacactattagatttaccacatctaatgaaatccaaggtgtagctataaagtgacaagctgtttttaatttatcacatacaccagaacttctatcctgcatcacttatatgtaaatgatgctgttaccaaaaacattaaggtagttcttgcgaatgccaccccactaagaaaactatttcattacttttgtaatccatctgtgagagtctgccccccagcttaaccacttcctttggtctgcacccaatgaagggaaaccccaaagtactgtctcaaatggtatttgaactacgccagtattgttggaataagtacattaattacttgaatgaatgaacacagcaccgtagaaatttcctttatggttacaccttgtatgtctaaagcattcaggccctgttctgtagtgtttcttatcctcacacagagtagaaaagcctgtttgctttatttaacttatacataaaagatgacatctgaaatatctgatgtgtattataataccagcttctgctctagaactactttgggtgaaatggtggtaatagcaaatgacctcctttaacaagacactcatctcaaacaatgccatttagttcaggagatctctaagtgtagctgtaaattttggggttaatttggcttatattggaccttttaaaagaaataaagttttttaatgcaataaa

SEQ ID NO: 2055 - DNA, 4408 bp, Homo sapiens
  source 1..4408: mol_type = unassigned DNA
gggcgcggaggcgaccgccatggcgttcctcaaactccgtgaccagccatcactggtgcaagctatatttaacggagatcctgatgaagttcgagcactaatatttaagaaagaagatgttaactttcaggacaatgaaaagcgaaccccattgcacgccgcagcttaccttggagatgcagaaatcattgaacttcttattttatctggagctagagttaatgccaaagacagcaaatggttgacacctttacacagagcagttgcatcttgtagtgaggaagcagttcaggtacttttgaagcattctgcagatgttaatgctcgagacaaaaattggcaaacccctttacatatagctgctgctaataaagctgtaaagtgtgctgaagctttggtacctcttctgagtaatgtaaacgtatctgatcgagcagggaggactgcattacatcatgcagctttcagtggacatggtgagatggtcaaactactcttgtctagaggtgccaatattaatgcttttgacaagaaagataggcgtgctatccattgggcagcatatatgggtcacattgaagtagtgaaattgcttgtgtcgcatggagctgaagtgacatgcaaggataaaaagtcttatacacctcttcatgcagcagcctctagtggaatgatcagcgtagtcaagtaccttctagatcttggagttgatatgaatgaaccaaatgcctatggaaatacacctcttcatgtagcctgctataatggacaagatgttgtagtgaatgaacttatagactgtggtgctattgtgaatcaaaagaatgaaaaaggatttactcctttgcactttgctgctgcatcaacacatggagcattgtgtttagagcttctagttggcaatggggccgatgtcaatatgaagagtaaagatgggaaaaccccactacacatgactgctctccacggtagattctcccgatcacaaaccattatccagagtggagctgtaatcgactgtgaggataagaatggaaatacccctttgcacatagcagcacggtatggccatgagctgctgatcaacactcttattacaagtggtgctgacactgcaaagcgtggcatacatggaatgttccccctccatttggcagccttaagcggcttttcagattgctgcagaaaacttctttcttcaggatttgatatagataccccagatgattttggcaggacttgtctacatgcagctgcagctggagggaatttggagtgcctaaaccttctgctgaatactggtgcagactttaataaaaaggacaaatttgggagatctccactgcactacgctgctgccaactgcaattaccagtgcctgtttgctcttgtgggatcaggagcaagtgtgaatgaccttgatgaaagaggctgcacacccctgcactatgcagctacatcagacacagatggcaagtgcctggaatacttattaagaaacgatgcaaatccagggatccgtgataagcaaggatacaacgcagttcattattcagctgcttatggtcaccgtctatgtcttcagctgattgcaagtgaaactcctctagatgttttaatggaaacctcaggaacagacatgctgagtgattcagataatagagcaacaataagccctttacacttggctgcctatcatggtcaccatcaagcactggaagtgttggtacagtctttgttagatcttgatgtcagaaatagtagtggaagaacacccctagatcttgcagcttttaagggccatgttgaatgtgtggatgtactcattaatcagggagcctcaatcttagtaaaagattacattttgaagaggacacctattcatgcagcagcaacaaatggtcattcagaatgcttacggctattaataggaaatgcagaaccacagaatgcagtggatattcaagatggaaatggacagacgcctctgatgctatctgttctcaacgggcacacagactgtgtttactcattgctgaacaaaggagcaaatgtagatgccaaagataagtggggaaggacagcgttgcatagaggggcagttacaggccatgaagaatgtgtagatgcattacttcaacatggtgctaagtgcttacttcgggatagcaggggccggacgcctatacacctgtctgctgcctgtggacacattggtgttcttggagcccttttgcagtcagcagcatctatggatgcaaatccagccacagcagacaatcatggatatacggcacttcactgggcttgctacaatggtcacgagacatgtgtagaactgcttttagaacaggaagttttccagaaaacggaaggaaatgcttttagtccattgcattgtgccgtgataaatgacaacgaaggtgctgctgagatgttaattgatacattaggtgccagcattgtgaacgccacagattcaaaaggaagaactcctctccatgcagccgccttcacagaccatgtagagtgtttacagctgctgctcagccataatgctcaagtcaattctgtggactctacagggaaaacacctcttatgatggctgcagaaaatggacaaacaaatacagttgagatgctggttagcagtgctagtgcagaactgactttacaagataacagtaaaaatactgccctccatttggcttgtagcaagggtcatgaaactagtgccttgttaatactggaaaagataacagatagaaacctcatcaatgcaaccaacgcagccttgcaaacacctctgcatgttgctgcccgaaatgggctaacaatggtggttcaggaacttttgggaaaaggagcaagtgtgcttgcagtagatgaaaatggctataccccagctttggcctgtgctcccaataaggatgtggctgattgcctggctctcattttggccaccatgatgcctgtctcatcaagtagtcctttatcatccttaacattcaatgccattaaccgttataccaacacctcaaaaacagtcagctttgaagctttgcccatcatgaggaatgaacctagctcctattgcagtttcaataacattggaggggaacaggagtacttatacactgacgtggatgagctcaacgactccgattctgagacctactgagaggctgaggaggagggagttctcacagtaaagcttcaaactgtgctttttcaggaaaaaggcactttgatattcacgtagaaattcaacctaagaggaaagatcccacagtgagccaatgttaagagatctgatggcattaggaggaagagttttaaaggaattctcttctgaattccctgagggaattttctagaatctcagaattgaaagagacctgaggttcatccagtctctaacctcttaacaaatgcaggagtcccttctacaagggtgatctttccaccttgaacacttccaagtgactctacctcaccaagcagtccattcagttgttgagcagctctaactgttagaaaggtcttccttagatggagttgaagcctccctcccggtaacttctgtctttgggcctgggtctgtcctccaagagaaccctgagaatgttggaaggatgaatctcgcacattctgccatgtcttctcttttacaggctgtttgacttctctgctgaagtgatttccagaaggactcatttgacacactattagatttaccacatctaatgaaatccaaggtgtagctataaagtgacaagctgtttttaatttatcacatacaccagaacttctatcctgcatcacttatatgtaaatgatgctgttaccaaaaacattaaggtagttcttgcgaatgccaccccactaagaaaactatttcattacttttgtaatccatctgtgagagtctgccccccagcttaaccacttcctttggtctgcacccaatgaagggaaaccccaaagtactgtctcaaatggtatttgaactacgccagtattgttggaataagtacattaattacttgaatgaatgaacacagcaccgtagaaatttcctttatggttacaccttgtatgtctaaagcattcaggccctgttctgtagtgtttcttatcctcacacagagtagaaaagcctgtttgctttatttaacttatacataaaagatgacatctgaaatatctgatgtgtattataataccagcttctgctctagaactactttgggtgaaatggtggtaatagcaaatgacctcctttaacaagacactcatctcaaacaatgccatttagttcaggagatctctaagtgtagctgtaaattttggggttaatttggcttatattggaccttttaaaagaaataaagttttttaatgcaat

SEQ ID NO: 2056 - DNA, 4405 bp, Homo sapiens
  source 1..4405: mol_type = unassigned DNA
ctagtctataccagcaacgactcctacatcgtccactctggggatcttagaaagatccataaagctgcctcccggggacaagtccggaagctggagaagatgacaaagaggaagaagaccatcaaccttaatatacaagacgcccagaagaggactgctctacactgggcctgtgtcaatggccatgaggaagtagtaacatttctggtagacagaaagtgccagcttgacgtccttgatggcgaacacaggacacctctgatgaaggctctacaatgccatcaggaggcttgtgcaaatattctgatagattctggtgccgatataaatctcgtagatgtgtatggcaacacggctctccattatgctgtttatagtgagattttgtcagtggtggcaaaactgctgtcccatggtgcagtcatcgaagtgcacaacaaggctagcctcacaccacttttactatccataacgaaaagaagtgagcaaattgtggaatttttgctgataaaaaatgcaaatgcgaatgcagttaataagtataaatgcacagccctcatgcttgctgtatgtcatggatcatcagagatagttggcatgcttcttcagcaaaatgttgacgtctttgctgcagatatatgtggagtaactgcagaacattatgctgttacttgtggatttcatcacattcatgaacaaattatggaatatatacgaaaattatctaaaaatcatcaaaataccaatccagaaggaacatctgcaggaacacctgatgaggctgcacccttggcggaaagaacacctgacacagctgaaagcttggtggaaaaaacacctgatgaggctgcacccttggtggaaagaacacctgacacggctgaaagcttggtggaaaaaacacctgatgaggctgcatccttggtggagggaacatctgacaaaattcaatgtttggagaaagcgacatctggaaagttcgaacagtcagcagaagaaacacctagggaaattacgagtcctgcaaaagaaacatctgagaaatttacgtggccagcaaaaggaagacctaggaagatcgcatgggagaaaaaagaagacacacctagggaaattatgagtcccgcaaaagaaacatctgagaaatttacgtgggcagcaaaaggaagacctaggaagatcgcatgggagaaaaaagaaacacctgtaaagactggatgcgtggcaagagtaacatctaataaaactaaagttttggaaaaaggaagatctaagatgattgcatgtcctacaaaagaatcatctacaaaagcaagtgccaatgatcagaggttcccatcagaatccaaacaagaggaagatgaagaatattcttgtgattctcggagtctctttgagagttctgcaaagattcaagtgtgtatacctgagtctatatatcaaaaagtaatggagataaatagagaagtagaagagcctcctaagaagccatctgccttcaagcctgccattgaaatgcaaaactctgttccaaataaagcctttgaattgaagaatgaacaaacattgagagcagatccgatgttcccaccagaatccaaacaaaaggactatgaagaaaattcttgggattctgagagtctctgtgagactgtttcacagaaggatgtgtgtttacccaaggctacacatcaaaaagaaatagataaaataaatggaaaattagaagagtctcctaataaagatggtcttctgaaggctacctgcggaatgaaagtttctattccaactaaagccttagaattgaaggacatgcaaactttcaaagcagagcctccggggaagccatctgccttcgagcctgccactgaaatgcaaaagtctgtcccaaataaagccttggaattgaaaaatgaacaaacattgagagcagatgagatactcccatcagaatccaaacaaaaggactatgaagaaaattcttgggatactgagagtctctgtgagactgtttcacagaaggatgtgtgtttacccaaggctgcgcatcaaaaagaaatagataaaataaatggaaaattagaagggtctcctgttaaagatggtcttctgaaggctaactgcggaatgaaagtttctattccaactaaagccttagaattgatggacatgcaaactttcaaagcagagcctcccgagaagccatctgccttcgagcctgccattgaaatgcaaaagtctgttccaaataaagccttggaattgaagaatgaacaaacattgagagcagatgagatactcccatcagaatccaaacaaaaggactatgaagaaagttcttgggattctgagagtctctgtgagactgtttcacagaaggatgtgtgtttacccaaggctacgcatcaaaaagaaatagataaaataaatggaaaattagaagagtctcctgataatgatggttttctgaaggctccctgcagaatgaaagtttctattccaactaaagccttagaattgatggacatgcaaactttcaaagcagagcctcccgagaagccatctgccttcgagcctgccattgaaatgcaaaagtctgttccaaataaagccttggaattgaagaatgaacaaacattgagagcagatcagatgttcccttcagaatcaaaacaaaagaaggttgaagaaaattcttgggattctgagagtctccgtgagactgtttcacagaaggatgtgtgtgtacccaaggctacacatcaaaaagaaatggataaaataagtggaaaattagaagattcaactagcctatcaaaaatcttggatacagttcattcttgtgaaagagcaagggaacttcaaaaagatcactgtgaacaacgtacaggaaaaatggaacaaatgaaaaagaagttttgtgtactgaaaaagaaactgtcagaagcaaaagaaataaaatcacagttagagaaccaaaaagttaaatgggaacaagagctctgcagtgtgagattgactttaaaccaagaagaagagaagagaagaaatgccgatatattaaatgaaaaaattagggaagaattaggaagaatcgaagagcagcataggaaagagttagaagtgaaacaacaacttgaacaggctctcagaatacaagatatagaattgaagagtgtagaaagtaatttgaatcaggtttctcacactcatgaaaatgaaaattatctcttacatgaaaattgcatgttgaaaaaggaaattgccatgctaaaactggaaatagccacactgaaacaccaataccaggaaaaggaaaataaatactttgaggacattaagattttaaaagaaaagaatgctgaacttcagatgaccctaaaactgaaagaggaatcattaactaaaagggcatctcaatatagtgggcagcttaaagttctgatagctgagaacacaatgctcacttctaaattgaaggaaaaacaagacaaagaaatactagaggcagaaattgaatcacaccatcctagactggcttctgctgtacaagaccatgatcaaattgtgacatcaagaaaaagtcaagaacctgctttccacattgcaggagatgcttgtttgcaaagaaaaatgaatgttgatgtgagtagtacgatatataacaatgaggtgctccatcaaccactttctgaagctcaaaggaaatccaaaagcctaaaaattaatctcaattatgcaggagatgctctaagagaaaatacattggtttcagaacatgcacaaagagaccaacgtgaaacacagtgtcaaatgaaggaagctgaacacatgtatcaaaacgaacaagataatgtgaacaaacacactgaacagcaggagtctctagatcagaaattatttcaactacaaagcaaaaatatgtggcttcaacagcaattagttcatgcacataagaaagctgacaacaaaagcaagataacaattgatattcattttcttgagaggaaaatgcaacatcatctcctaaaagagaaaaatgaggagatatttaattacaataaccatttaaaaaaccgtatatatcaatatgaaaaagagaaagcagaaacagaaaactcatgagagacaagcagtaagaaacttcttttggagaaacaacagaccagatctttactcacaactcatgctaggaggccagtcctagcatcaccttatgttgaaaatcttaccaatagtctgtgtcaacagaatacttattttagaagaaaaattcatgatttcttcctgaagcctacagacataaaataacagtgtgaagaattacttgttcacgaattgcataaagctgcacaggattcccatctaccctgatgatgcagcagacatcattcaatccaaccag

SEQ ID NO: 2057 - DNA, 1779 bp, Homo sapiens
  source 1..1779: mol_type = unassigned DNA
cctgtccgggggtgggggctaggggagggataacattacatgtatacctatgtaacaaacccgcatgttctgcacatgtaccccagaacttaaagtataatttaaaaaaagaagtatttccagaatctcatataaaaaaagaaaattaaaaatgcagtttatttatgtaaaagatcagtggaacttaaagataatcactgagtgacttacagtaaaaattaaaaaatgaaaaagactagtgtactacaaaagagactatctgaaaaaaaagaaatatcacagaatatcaaaaacttgaatgggaacaagaactctgcagtttgagatttctgatagtcatgaaaaagaagaagacctgttgcataaaaaccatttgatgcaagatgaaattgccaggctcaggctggaaatacacacaataaaaaatcaaatcctggaaaagaaatacttaaaagacattgaaattataaaaagaaagcatgaagaccttcaaaaggctctaaaacagaatggggaaaaatcaacaaaaacgatagcccattatagtggacagcttactgctctgacagatgagaacacaatgctccgttctaaactggagaaggaaaaacaaagcaggcaaagactgacgaaatggaatcataccatcgtagactgaatgttgctctacatgatcatgatcaaagtcactcaacagaaagagaccaagagcttgatttccagggcacagtagataaattgcgtcatttacaggaaaatttgaattctcatgttctgattctttctcagcaactttctaaagctgagagtaagtccaggtgcctcaaaactgagctccataacacaagagaggctctgaaagaaaacgctttggtttttgaacacatacaaagagagctaaaccaaacggtgtcaaatgaaggacattgaaaaaatgtacacaagtggccaagataaagtagaaaaatgcacagaaaagcaagtaagattatgtcaactacgaagacaaaatatgttgcttcaacagcaactggatgatgttcacaacaaagctgacaatcaagaaaaaacagtaattgatagtcaagccaaatgtgatgctacagcacaaaatcttcaagctgagtgcataaagcaccgtcttttgctagaagaacaagaggatgatcaataaagttaatcatttgaaagaaaaacaatgtcaatatgaaagagagaaagcagaaagagaagtagttgtgagacaacttcaacaaaaacagggtgacgtcctaaacaatcaacaacaaaagctttgctggatgcttcattgcgtcactgcgtccattgagaaagtgagatgtaggattcaaggaagaaattaggtcagatgagaattcaatttcaagaaaaatggaatcaacttacagcgactataaaatgtactaaggagacgcaaggccacgtacaaaaacttgaaatagaaaattctagtgttaagaaatacaattaaaaagcaagatggccaaattgagcagcttcagaaaatcctgcgaagttcaagtttgatgcagcagttattgcaagaaaatgaaactacagaaatagatgaagcttcttctgaatttaaatctggatcctctgtagcagaggttcccaacctacaggccatggacaggtccatgacctgttaggaaccagctgcacagcaggagagttactgtggatcttctagatcatctgcatgccatgtgaatcttaaaaccagtttttaatttctacaaaaaaaaaaaaaaaaaa

SEQ ID NO: 2058 - DNA, 2184 bp, Homo sapiens
  source 1..2184: mol_type = unassigned DNA
ggtttaagctggaagggtagtcattggttcgccgctctgtctcggcctgagcccgcccccgctcggttgccgtggttgcgggccctgcccgcccgccagctcgctgacagcacgactcagggcggagggaagtaggtccgttggtcggtcgggaacgaggctcaggcggccaggcccgcgcggagccgttgccatggcagccgccgccggggacgcggacgacgagccgcgctcaggccactcgagctcggagggcgagtgcgcggtggcgccggagccgctgactgacgctgagggcctcttctccttcgctgacttcgggtctgcgctgggcggcggcggcgcgggcctctcgggccgggcgtccggcggggcccagtcgccgctgcgctacttgcacgtcctgtggcagcaggatgcggagccgcgcgacgagctgcgctgcaagatacccgctggccggctgaggcgcgctgccaggccccaccggcggctcgggcccacgggcaaggaggtgcacgctctgaagagactgagggactcggccaatgccaatgatgtggaaacagtgcagcagctgctggaagatggcgcggatccctgtgcagctgatgacaagggccgcacagctctacactttgcctcatgcaatggcaatgaccagattgtgcagctgctcctggaccatggtgctgatcctaaccagcgagatgggctggggaacacgccactgcacctggcggcctgcaccaaccacgttcctgtcatcaccacactgctacgaggaggggcccgtgtagatgccctggaccgagctggtcgcacacccctgcacctggccaagtcaaagctgaatatcctgcaggagggccatgcccagtgcctagaggctgtgcgtctggaggtgaagcagatcatccatatgctgagggagtatctggagcgcctagggcaacatgagcagcgagaacgcctggatgacctctgcacccgcctgcagatgaccagtaccaaagagcaggtggatgaagtgactgacctcctggccagcttcacctccctcagtctgcagatgcagagcatggagaagaggtagcaagagaggctccctgccttcctgccactgccccaccctgccccactgctgtctcagtaccaagaaaaagcccaacatctgggacttggagctgcacttgtctggtgaggaccttgccctcacccgcagatgccgtggggcagagatgctctctctccacggcctcagagccactcccagccacagtttccagcatctctgtggacagggaccacagctcccagcttcttccagttctcgcagcaccagaccagcctctgcagctgcacttcagctccgcagacctgcgctatctcagcagacctcacttgccccatggccttcatggcgcgctccaggcctcagacccttctctgtgttccgtcctggccatgggcttgttgcagtcagcaggtgtgggcttaggcgggcaccctgtggccaggggtactgcgtgaggccctcagttggtcctgtgcctctcaccagcacttagacagacacgtcaccagactttcaaggagatactgcagtgagtttctctggttggaaggggagggttggtgagtcccagaccttaaaaatacaaggttaagagggaccccaaagcaaaaaattccaacccttttcctcccagtcattgaaacaccaaaactattataccggagggtgtaatagttttgctgcccagttgtggtaggccagtagtggcctcccaagatgcccatgtcctaatcccaggaacctgtcaaaattaccttgtatggccaaaggggctttgcagatgtaatgaagttaaggatctttcgccaggaagattatcccagcttgttcaggagggcttgatgtcctcacccgggtctgtataacagaagagcaggtgacgggagaggaggttggaggtgtagcgatggagcaggaaactggagttgaggagggcagctcaagccacagagtccaggccacctcagagccaggaaatgcatcctcccacagagccctggaaggccccagccctgctcccacctggactggctcagtgaggctaattttataattctggctgattttagaactctaagggaataaatttgtgttgttttaagtca

SEQ ID NO: 2059 - DNA, 623 bp, Homo sapiens
  source 1..623: mol_type = unassigned DNA
cgcgcgacgagctgcgctgcaagatacccgctggccggctgaggcgcgctgccaggccccaccggcggctcgggcccacgggcaaggaggtgcacgctctgaagagactgagggactcggccaatgccaatgatgtggaaacagtgcagcagctgctggaagatggcgcggatccctgtgcagctgatgacaagggccgcacagctctacactttgcctcatgcaatggcaatgaccagattgtgcagctgctcctggaccatggtgctgatcctaaccagcgagatgggctggggaacacgccactgcacctggaatgctcacctcagctggtacctgcaggggcccgtgtagatgccctggaccgagctggtcgcacacccctgcacctggccaagtcaaagctgaatatcctgcaggagggccatgcccagtgcctagaggctgtgcgtctggaggtgaagcagatcatccatatgctgagggagtatctggagcgcctagggcaacatgagcagcgagaacgcctggatgacctctgcacccgcctgcagatgaccagtaccaaagagcaggtggatgaagtgactgacctcctggccagcttcacctccctcagtctg

SEQ ID NO: 2060 - DNA, 3073 bp, Homo sapiens
  source 1..3073: mol_type = unassigned DNA
gagagcgctgcctggcgcgcgggcggctggaggcacggcgctgggcggcgccgaggccctggggccgccggagccagcgggagccagtccccgtcttcgcccctcgccccccaccgtgtcgccggccttggtccctgcggcgcggacgtccggcgcgggagagaaaggtcccgaagatggcatattcataaagacatcttctgatgattgtgaacatctttacctctgggtgccaggccgggccagtgacttcgtgttgagctgaaggaacttgtctaccgcttccctgaaaacctttctttcctaattcatgagccagcaagatgcggtcgctgcactttcagagcgccttctcgtagctgcgtacaaaggccaaacagagaatgtggttcagctcatcaacaagggcgccagggtagcggttaccaagcatggccggactcccctgcatcttgctgccaataagggccatcttcctgtggtccagatcttgctgaaggctggctgcgaccttgatgtccaggatgatggggaccagaccgccttgcaccgggccacagtggtggggaacacggagatcatcgcggcgctcatccacgaagggtgtgccctggacagacaagacaaggatgggaatacagccttgcatgaagcatcctggcatggtttcagccagtcagccaagctgctcattaaagcaggagccaacgtgcttgccaagaacaaggcggggaacacagctctgcacctggcctgccagaacagccactcccagagcacgcgcgtcctcctgctggccgggtcccgcgctgacctcaaaaataatgcaggagacacctgtttgcacgttgctgcgcgctataatcacttgtccatcattaggctcctcctcactgctttctgttctgtccatgaaaagaaccaggctggagacacagcacttcacgttgctgctgccctaaatcacaagaaggtggccaaaatcttactggaagccggagcagatacgaccattgttaacaatgcaggccagactccgctggagactgcccgctaccacaataacccggaagttgctcttctccttactaaagctccccaggtcttgcgcttcagtcgtgggcgaagcctgaggaaaaagagagagaggctcaaggaagagaggagagcccagtctgtgccaagagatgaggtggcccaaagcaagggcagtgtctcagcaggagacacccccagcagtgaacaggctgtggccagaaaagaagaagccagagaagagttcctgtcagcctccccagaacccagagcaaaggatgacaggaggagaaagtcaaggcccaaggtgtcagcattttctgaccccaccccaccagccgaccaacagcctggacaccagaagaacctgcatgctcataatcaccctaaaaagaggaacaggcatcggtgttcatccccacccccaccccatgagttcagggcgtatcagctctacacattgtaccggggcaaggatgggaaagtgatgcaggcaccaataaatggttgtcgatgtgaacctctaatcaacaagctggagaatcagttggaggctactgtggaggagataaaagcagagctgggatcggttcaggacaaaatgaatacaaagctggggcagatggagaataagacccagcaccaaatgcgtgttttggacaagctgatggttgagcgactttctgcagagaggacggagtgcctgaaccgcctgcaacagcactcagacacagagaagcatgagggggagaaacgacagatatccttggtggatgaattaaaaacctggtgcatgttaaagattcagaatctggagcagaagctttctggagattctagggcctgcagagctaaatccacaccatctacttgtgagtcctctacaggtgtggaccaattagtggtgactgcaggtccagcagcagcttccgacagctcccctccagtggttaggcccaaagagaaggccctcaactccactgctacccagagactccagcaggagctgtcgtcttctgactgtacaggctcccgactgagaaacgtcaaggtccagacagccttgctacccatgaatgaggcagccagatctgatcagcaggctgggccctgcgtcaacagaggcactcaaactaagaagtctgggaagagtgggccaacaaggcatcgtgcccagcaacccgcagccagcagcacctgtgggcagccgccaccagccacaggcagcgagcagactggccctcacattcgggacacctcccaagctctggagcttacccagtatttttttgaggctgtttctacccagatggaaaagtggtatgaaaggaagattgaagaagcacgaagccaagccaatcagaaagcccagcaagataaggctacattgaaggaacacattaaaagtttagaagaggaacttgccaaactaaggactagggtgcagaaggaaaattagcaccaataaagaggaaatatgaaaggattcttgaagatttccagttttgcaactgcataatagctatgcccaaggagtcaactattgtatatattgcagatttgcctttttaaaaaaatcactaattctacaatgtgccagatacatgtttcctatgcccaggaagttatgaagacttcaacaattaaactgaaaccaggggaagcttgcttagttttgggtttcattataaactcttagcctcagtccaggttaatctgaagtttgaaagctcagattaagcaagccatgccaagaaactggacgatgtgtaagcctagactctaaaattcaagatgtgtgaaataatataagtcaaaagcaagaaaaacgtaatcccgtctgaactcaagtagtcattcatataaatttgaacacacctgctgtgcctagacaagtgtctttctgtaagagctgtaactctgagatgtgctaaataaaccctctttctcaaattcgtaattctccaactgttgacattttaatcacatgaaaagttatcagatttttgaggagaaatattttcatgatgtcacaaga

SEQ ID NO: 2061 - DNA, 5258 bp, Homo sapiens
  source 1..5258: mol_type = unassigned DNA
ggacgcggcgggctcggccacaggtaacccgcaggagccgagagcgctgcctggcgcgcgggcggctggaggcacggcgctgggcggcgccgaggccctggggccgccggagccagcgggagccagtccccgtcttcgcccctcgccccccaccgtgtcgccggccttggtccctgcggcgcggacgtccggcgcgggagagaaaggtcccgaagatggcatattcataaagacatcttctgatgattgtgaacatctttacctctgggtgccaggccgggccagtgacttcgtgttgagctgaaggaacttgtctaccgcttccctgaaaacctttctttcctaattcatgagccagcaagatgcggtcgctgcactttcagagcgccttctcgtagctgcgtacaaaggccaaacagagaatgtggttcagctcatcaacaagggcgccagggtagcggttaccaagcatggccggactcccctgcatcttgctgccaataagggccatcttcctgtggtccagatcttgctgaaggctggctgcgaccttgatgtccaggatgatggggaccagaccgccttgcaccgggccacagtggtggggaacacggagatcatcgcggcgctcatccacgaagggtgtgccctggacagacaagacaaggatgggaatacagccttgcatgaagcatcctggcatggtttcagccagtcagccaagctgctcattaaagcaggagccaacgtgcttgccaagaacaaggcggggaacacagctctgcacctggcctgccagaacagccactcccagagcacgcgcgtcctcctgctggccgggtcccgcgctgacctcaaaaataatgcaggagacacctgtttgcacgttgctgcgcgctataatcacttgtccatcattaggctcctcctcactgctttctgttctgtccatgaaaagaaccaggctggagacacagcacttcacgttgctgctgccctaaatcacaagaaggtggccaaaatcttactggaagccggagcagatacgaccattgttaacaatgcaggccagactccgctggagactgcccgctaccacaataacccggaagttgctcttctccttactaaagctccccagggcagtgtctcagcaggagacacccccagcagtgaacaggctgtggccagaaaagaagaagccagagaagagttcctgtcagcctccccagaacccagagcaaaggatgacaggaggagaaagtcaaggcccaaggtgtcagcattttctgaccccaccccaccagccgaccaacagcctggacaccagaagaacctgcatgctcataatcaccctaaaaagaggaacaggcatcggtgttcatccccacccccaccccatgagttcagggcgtatcagctctacacattgtaccggggcaaggatgggaaagtgatgcaggcaccaataaatggttgtcgatgtgaacctctaatcaacaagctggagaatcagttggaggctactgtggaggagataaaagcagagctgggatcggttcaggacaaaatgaatacaaagctggggcagatggagaataagacccagcaccaaatgcgtgttttggacaagctgatggttgagcgactttctgcagagaggacggagtgcctgaaccgcctgcaacagcactcagacacagagaagcatgagggggagaaacgacagatatccttggtggatgaattaaaaacctggtgcatgttaaagattcagaatctggagcagaagctttctggagattctagggcctgcagagctaaatccacaccatctacttgtgagtcctctacaggtgtggaccaattagtggtgactgcaggtccagcagcagcttccgacagctcccctccagtggttaggcccaaagagaaggccctcaactccactgctacccagagactccagcaggagctgtcgtcttctgactgtacaggctcccgactgagaaacgtcaaggtccagacagccttgctacccatgaatgaggcagccagatctgatcagcaggctgggccctgcgtcaacagaggcactcaaactaagaagtctgggaagagtgggccaacaaggcatcgtgcccagcaacccgcagccagcagcacctgtgggcagccgccaccagccacaggcagcgagcagactggccctcacattcgggacacctcccaagctctggagcttacccagtatttttttgaggctgtttctacccagatggaaaagtggtatgaaaggaagattgaagaagcacgaagccaagccaatcagaaagcccagcaagataaggctacattgaaggaacacattaaaagtttagaagaggaacttgccaaactaaggactagggtgcagaaggaaaattagcaccaataaagaggaaatatgaaaggattcttgaagatttccagttttgcaactgcataatagctatgcccaaggagtcaactattgtatatattgcagatttgcctttttaaaaaaatcactaattctacaatgtgccagatacatgtttcctatgcccaggaagttatgaagacttcaacaattaaactgaaaccaggggaagcttgcttagttttgggtttcattataaactcttagcctcagtccaggttaatctgaagtttgaaagctcagattaagcaagccatgccaagaaactggacgatgtgtaagcctagactctaaaattcaagatgtgtgaaataatataagtcaaaagcaagaaaaacgtaatcccgtctgaactcaagtagtcattcatataaatttgaacacacctgctgtgcctagacaagtgtctttctgtaagagctgtaactctgagatgtgctaaataaaccctctttctcaaattcgtaattctccaactgttgacattttaatcacatgaaaagttatcagatttttgaggagaaatattttcatgatgtcacaagatccaatatatcttatgataaaatttattgaaaagtcagtttatttaaataatgaataattggctaacagctctggaaacaatgagatcaaatgagaaagattcaaattgtttgttattttctgtattttcagtcaaaaaatcagttatatagtgattttaaagcagattaatggaaaaaaattcatgtaacaattacctgaaaatttataacctattcctaatcaaacccaattatatcagaatacctttctgaatttgagatttttgctctacattttataatgaataaggctattttttgaaagtatttcattttgaattctgtcattaacctcaaaagctttctactgctttgcggtgaaggcaaaatattcgataactcaacttaggccccactgttccccaacttcatggaggccagaagactttactttgttccataatgaaatataaacacagaacaaagttgtaaaagtagcatggatatgttgaaactttggacaagcttcttgtcctttggaatatgggatttatattcatctcctcaatatcccatgtatgcacagaaacttcagttctatttctatagacacaggaacctagtgactattgaacgtaattgtaataaaatgctgctcattgagccaaagagaagaaatgatttattaacatggggacaccaagaaaaacaaagtatgcttttattccctttgtcaagctcagttttagggttttttcttttttttatagtgacaatccatagatatagacattcctaaaagaaaaataattcagtagatatatgtcactgttacctgaatatggaatgaatttgatgttttttattttgttgagacagggtcttgctctgtcacccagactggagtgcagtggcatgatcacacctcactgcagccttggcctctcaggctcgtgatcctcctgcctcaacctcgcaagtagcttgggactacaggcgtgtgccaccagtcctggctaattttttgtagatataaggtctcatgatattgcccaggctgaatttgatgttatttcaagttgattttcatgtgtttgggagcttgtcttgttctcaactactacgcaggtagacagtcttcccccagagactcattagattgcaatatagaggcactttctcatttccctattgttcctaatacagaattgtagagctggagagtaccttcagttttctaaatctattctcaaacaggatatcactaacctctttagaatcattcctcagtatacatcaatttattgagaactgcctaatactcaagaaattaaatcctgagttcagtaggctgtgttccaagcaggaattattttcacttaccaaaatatctcctattacctcaaggtatccttgttgaggaatgctgaaaactaaattttaagtatcaagtctagaccatagagtgctttggtgggagtattttgattacctcctacccatcagaagcaggcagctaatattgtgaactgagtatttttgtcaaaagtcacagggaagagactacagaagaatgagaagggtcaaaaggacctagtgtggcttactacatggatcttgtctcttggaggtctgtcgtagaagaagaaacaaatagaggtgatgaagacacagaacaggctcagtcagcatcctcacccagagatggcaacatctattaagaccaatgcaataccttttcatcttcagcaaatgttgtttcatctgtttttgatccttggcattgtcaaaaacttaactgcaggtccagtgtatatttttccttatttttcccttttagctatctgctaaagtgagtaaatgccacaactgtacttttccaaagaaaaagaactattgacaacttatagcctgtcatgcaggtcatgtttcaaatcaaggctgaaattttcaacagctgtgggaaaaactaaaacacagaaatactgtacagtattagtgtttttttaaagaaattgttagtgcattattgagtatactaaatatctgtgattaaataaattagttctaacttttgattttgggagcccaaaataaagggagtgttgttttcatggttatgccttgtttgtggagtcaagtgttgatatacttgaggcatgttatgtgtcttctaattaatatttttatcaccttgaatttgtgtctcttccaagcattaaagatactatggatcttaaattccttattaaaaaaatgcaagtgtgaat

SEQ ID NO: 2062 - DNA, 2968 bp, Homo sapiens
  source 1..2968: mol_type = unassigned DNA
gcgctgcctggcgcgcgggcggctggaggcacggcgctgggcggcgccgaggccctggggccgccggagccagcgggagccagtccccgtcttcgcccctcgccccccaccgtgtcgccggccttggtccctgcggcgcggacgtccggcgcgggagagaaaggtcccgaagatggcatattcataaagacatcttctgatgattgtgaacatctttacctctgggtgccaggccgggccagtgacttcgtgttgagctgaaggaacttgtctaccgcttccctgaaaacctttctttcctaattcatgagccagcaagatgcggtcgctgcactttcagagcgccttctcgtagctgcgtacaaaggccaaacagagaatgtggttcagctcatcaacaagggcgccagggtagcggttaccaagcatggccggactcccctgcatcttgctgccaataagggccatcttcctgtggtccagatcttgctgaaggctggctgcgaccttgatgtccaggatgatggggaccagaccgccttgcaccgggccacagtggtggggaacacggagatcatcgcggcgctcatccacgaagggtgtgccctggacagacaagacaaggatgggaatacagccttgcatgaagcatcctggcatggtttcagccagtcagccaagctgctcattaaagcaggagccaacgtgcttgccaagaacaaggcggggaacacagctctgcacctggcctgccagaacagccactcccagagcacgcgcgtcctcctgctggccgggtcccgcgctgacctcaaaaataatgcaggagacacctgtttgcacgttgctgcgcgctataatcacttgtccatcattaggctcctcctcactgctttctgttctgtccatgaaaagaaccaggctggagacacagcacttcacgttgctgctgccctaaatcacaagaaggtggccaaaatcttactggaagccggagcagatacgaccattgttaacaatgcaggccagactccgctggagactgcccgctaccacaataacccggaagttgctcttctccttactaaagctccccaggtcttgcgcttcagtcgtgggcgaagcctgaggaaaaagagagagaggctcaaggaagagaggagagcccagtctgtgccaagagatgaggtggcccaaagcaagggcagtgtctcagcaggagacacccccagcagtgaacaggctgtggccagaaaagaagaagccagagaagagttcctgtcagcctccccagaacccagagcaaaggatgacaggaggagaaagtcaaggcccaaggtgtcagcattttctgaccccaccccaccagccgaccaacagcctggacaccagaagaacctgcatgctcataatcaccctaaaaagaggaacaggcatcggtgttcatccccacccccaccccatgagttcagggcgtatcagctctacacattgtaccggggcaaggatgggaaagtgatgcaggcaccaataaatggttgtcgatgtgaacctctaatcaacaagctggagaatcagttggaggctactgtggaggagataaaagcagagctgggatcggttcaggacaaaatgaatacaaagctggggcagatggagaataagacccagcaccaaatgcgtgttttggacaagctgatggttgagcgactttctgcagagaggacggagtgcctgaaccgcctgcaacagcactcagacacagagaagcatgagggggagaaacgacagatatccttggtggatgaattaaaaacctggtgcatgttaaagattcagaatctggagcagaagctttctggagattctagggcctgcagagctaaatccacaccatctacttgtgtggaccaattagtggtgactgcaggtccagcagcagcttccgacagctcccctccagtggttaggcccaaagagaaggccctcaactccactgctacccagagactccagcaggagctgtcgtcttctgactgtacaggctcccgactgagaaacgtcaaggtccagacagccttgctacccatgaatgaggcagccagatctgatcagcaggctgggccctgcgtcaacagaggcactcaaactaagaagtctgggaagagtgggccaacaaggcatcgtgcccagcaacccgcagccagcagcacctgtgggcagccgccaccagccacaggcagcgagcagactggccctcacattcgggacacctcccaagctctggagcttacccagtatttttttgaggctgtttctacccagatggaaaagtggtatgaaaggaagattgaagaagcacgaagccaagccaatcagaaagcccagcaagataaggctacattgaaggaacacattaaaagtttagaagaggaacttgccaaactaaggactagggtgcagaaggaaaattagcaccaataaagaggaaatatgaaaggattcttgaagatttccagttttgcaactgcataatagctatgcccaaggagtcaactattgtatatattgcagatttgcctttttaaaaaaatcactaattctacaatgtgccagatacatgtttcctatgcccaggaagttatgaagacttcaacaattaaactgaaaccaggggaagcttgcttagttttgggtttcattataaactcttagcctcagtccaggttaatctgaagtttgaaagctcagattaagcaagccatgccaagaaactggacgatgtgtaagcctagactctaaaattcaagatgtgtgaaataatataagtcaaaagcaagaaaaacgtaatcccgtctgaactcaagtagtcattcatataaatttgaacacacctgctgtgcctagacaagtgtctttctgtaagagctgtaactctgagatgtgctaaataaaccctctttctcaa

SEQ ID NO: 2063 - DNA, 829 bp, Homo sapiens
  source 1..829: mol_type = unassigned DNA
aactgtaagtagcgagcttggtttccatgagtcacatgtgtccacagaataggcccaactagacaacagatctgtgggaatgtttggctctccatgaaccacaaagactcctccaacacagaggtgcagtacccacctgggccaaggagggaagatgcaggtcccgaagatggcatattcataaagacatcttctgatgattgtgaacatctttacctctgggtgccaggccgggccagtgacttcgtgttgagctgaaggaacttgtctaccgcttccctgaaaacctttctttcctaattcatgagccagcaagatgcggtcgctgcactttcagagcgccttctcgtagctgcgtacaaaggccaaacagagaatgtggttcagctcatcaacaagggcgccagggtagcggttaccaagcatggccggactcccctgcatcttgctgccaataagggccatcttcctgtggtccagatcttgctgaaggctggctgcgaccttgatgtccaggatgatggggaccagaccgccttgcaccgggccacagtggtggggaacacggagatcatcgcggcgctcatccacgaagggtgtgccctggacagacaagacaaggatgggaatacagccttgcatgaagcatcctggcatggtttcagccagtcagccaagctgctcattaaagcaggagccaacgtgcttgccaagaacaaggcggggaacacagctctgcacctggcctgccagaacagccactcccagagcacgcgcgtcctcctgctggccgggtcccgcgctgacctcaaaaataatgcaggagaca

SEQ ID NO: 2064 - DNA, 539 bp, Homo sapiens
  source 1..539: mol_type = unassigned DNA
agttttggtttggccattgacatgtaaatgtcagagaggcctgaggctgttccccagtggaccctcccgccttcccacacaaagccctggctctgtgagggccatggctttgcctttgtgaggcctgggccatcccagctgcagagggaagtccccgtcccgaagatggcatattcataaagacatcttctgatgattgtgaacatctttacctctgggtgccaggccgggccagtgacttcgtgttgagctgaaggaacttgtctaccgcttccctgaaaacctttctttcctaattcatgagccagcaagatgcggtcgctgcactttcagagcgccttctcgtagctgcgtacaaaggccaaacagagaatgtggttcagctcatcaacaagggcgccagggtagcggttaccaagcatggccggactcccctgcatcttgctgccaataagggccatcttcctgtggtccagatcttgctgaaggctggctgcgaccttgatgtccaggatgatggggaccagaccgccttgcac

SEQ ID NO: 2065 - DNA, 3157 bp, Homo sapiens
  source 1..3157: mol_type = unassigned DNA
gaggcagtttattacagatttcaaccctttctgcatccctccctcccttacaacacgcacactcatcttttcttgcattactgctgaaattatgcaaacttcgtttctctgtcatctgagcgtcattcagaaatgttcctccgatctgtgaattgttccctgacttcaatcggggcagtgttacaggtcctctgctggcaggagggagcagtccgtgaaaatctgcagacacaagactttcagaagctgtgacgagcagactagcaagccacaaaacattgcaagctgaatggatgtcttaataagcttttagatgtgatttggccagcatcagcagaggaggctaacgggaaaaggcagcgaacattgtaacgtaaatcactgcagatttgctgggagtgacagccctaggaagctaatgatctctccaggaaagaattgaccacagttatccagaaactgaacacgatgtagaacagagaggacagcccctcggatgtcccgaagatggcatattcataaagacatcttctgatgattgtgaacatctttacctctgggtgccaggccgggccagtgacttcgtgttgagctgaaggaacttgtctaccgcttccctgaaaacctttctttcctaattcatgagccagcaagatgcggtcgctgcactttcagagcgccttctcgtagctgcgtacaaaggccaaacagagaatgtggttcagctcatcaacaagggcgccagggtagcggttaccaagcatggccggactcccctgcatcttgctgccaataagggccatcttcctgtggtccagatcttgctgaaggctggctgcgaccttgatgtccaggatgatggggaccagaccgccttgcaccgggccacagtggtggggaacacggagatcatcgcggcgctcatccacgaagggtgtgccctggacagacaagacaaggatgggaatacagccttgcatgaagcatcctggcatggtttcagccagtcagccaagctgctcattaaagcaggagccaacgtgcttgccaagaacaaggcggggaacacagctctgcacctggcctgccagaacagccactcccagagcacgcgcgtcctcctgctggccgggtcccgcgctgacctcaaaaataatgcaggagacacctgtttgcacgttgctgcgcgctataatcacttgtccatcattaggctcctcctcactgctttctgttctgtccatgaaaagaaccaggctggagacacagcacttcacgttgctgctgccctaaatcacaagaaggtggccaaaatcttactggaagccggagcagatacgaccattgttaacaatgcaggccagactccgctggagactgcccgctaccacaataacccggaagttgctcttctccttactaaagctccccaggtcttgcgcttcagtcgtgggcgaagcctgaggaaaaagagagagaggctcaaggaagagaggagagcccagtctgtgccaagagatgaggtggcccaaagcaagggcagtgtctcagcaggagacacccccagcagtgaacaggctgtggccagaaaagaagaagccagagaagagttcctgtcagcctccccagaacccagagcaaaggatgacaggaggagaaagtcaaggcccaaggtgtcagcattttctgaccccaccccaccagccgaccaacagcctggacaccagaagaacctgcatgctcataatcaccctaaaaagaggaacaggcatcggtgttcatccccacccccaccccatgagttcagggcgtatcagctctacacattgtaccggggcaaggatgggaaagtgatgcaggcaccaataaatggttgtcgatgtgaacctctaatcaacaagctggagaatcagttggaggctactgtggaggagataaaagcagagctgggatcggttcaggacaaaatgaatacaaagctggggcagatggagaataagacccagcaccaaatgcgtgttttggacaagctgatggttgagcgactttctgcagagaggacggagtgcctgaaccgcctgcaacagcactcagacacagagaagcatgagggggagaaacgacagatatccttggtggatgaattaaaaacctggtgcatgttaaagattcagaatctggagcagaagctttctggagattctagggcctgcagagctaaatccacaccatctacttgtgagtcctctacaggtgtggaccaattagtggtgactgcaggtccagcagcagcttccgacagctcccctccagtggttaggcccaaagagaaggccctcaactccactgctacccagagactccagcaggagctgtcgtcttctgactgtacaggctcccgactgagaaacgtcaaggtccagacagccttgctacccatgaatgaggcagccagatctgatcagcaggctgggccctgcgtcaacagaggcactcaaactaagaagtctgggaagagtgggccaacaaggcatcgtgcccagcaacccgcagccagcagcacctgtgggcagccgccaccagccacaggcagcgagcagactggccctcacattcgggacacctcccaagctctggagcttacccagtatttttttgaggctgtttctacccagatggaaaagtggtatgaaaggaagattgaagaagcacgaagccaagccaatcagaaagcccagcaagataaggctacattgaaggaacacattaaaagtttagaagaggaacttgccaaactaaggactagggtgcagaaggaaaattagcaccaataaagaggaaatatgaaaggattcttgaagatttccagttttgcaactgcataatagctatgcccaaggagtcaactattgtatatattgcagatttgcctttttaaaaaaatcactaattctacaatgtgccagatacatgtttcctatgcccaggaagttatgaagacttcaacaattaaactgaaaccaggggaagcttgcttagttttgggtttcattataaactcttagcctcagtccaggttaatctgaagtttgaaagctcagattaagcaagccatgccaagaaactggacgatgtgtaagcctagactctaaaattc

SEQ ID NO: 2066 - DNA, 576 bp, Homo sapiens
  source 1..576: mol_type = unassigned DNA
acagttatccagaaactgaacacgatgtagaacagagaggacagcccctcggatgtgagtaccatctcttcaacacaaggtcccgaagatggcatattcataaagacatcttctgatgattgtgaacatctttacctctgggtgccaggccgggccagtgacttcgtgttgagctgaaggaacttgtctaccgcttccctgaaaacctttctttcctaattcatgagccagcaagatgcggtcgctgcactttcagagcgccttctcgtagctgcgtacaaaggccaaacagagaatgtggttcagctcatcaacaagggcgccagggtagcggttaccaagcatggccggactcccctgcatcttgctgccaataagggccatcttcctgtggtccagatcttgctgaaggctggctgcgaccttgatgtccaggatgatggggaccagaccgccttgcaccgggccacagtggtggggaacacggagatcatcgcggcgctcatccacgaagggtgtgccctggacagacaagacaaggatgggaatacagccttgcatgaagcatcctggcat

SEQ ID NO: 2067 - DNA, 546 bp, Homo sapiens
  source 1..546: mol_type = unassigned DNA
ctcctggctgcttcctgatgtcttgctggcagcaagtgggctagggtcggcttgcccagaggggcgcatccaggtggggttcacctttctgaaccaggtcccgaagatggcatattcataaagacatcttctgatgattgtgaacatctttacctctgggtgccaggccgggccagtgacttcgtgttgagctgaaggaacttgtctaccgcttccctgaaaacctttctttcctaattcatgagccagcaagatgcggtcgctgcactttcagagcgccttctcgtagctgcgtacaaaggccaaacagagaatgtggttcagctcatcaacaagggcgccagggtagcggttaccaagcatggccggactcccctgcatcttgctgccaataagggccatcttcctgtggtccagatcttgctgaaggctggctgcgaccttgatgtccaggatgatggggaccagaccgccttgcaccgggccacagtggtggggaacacggagatcatcgcggcgctcatccacgaagggtgtgccctggac

SEQ ID NO: 2068 - DNA, 2489 bp, Homo sapiens
  source 1..2489: mol_type = unassigned DNA
catgagccagcaagatgcggtcgctgcactttcagagcgccttctcgtagctgcgtacaaaggccaaacagagaatgtggttcagctcatcaacaagggcgccagggtagcggttaccaagcatggccggactcccctgcatcttgctgccaataagggccatcttcctgtggtccagatcttgctgaaggctggctgcgaccttgatgtccaggatgatggggaccagaccgccttgcaccgggccacagtggtggggaacacggagatcatcgcggcgctcatccacgaagggtgtgccctggacagacaagacaaggcggggaacacagctctgcacctggcctgccagaacagccactcccagagcacgcgcgtcctcctgctggccgggtcccgcgctgacctcaaaaataatgcaggagacacctgtttgcacgttgctgcgcgctataatcacttgtccatcattaggctcctcctcactgctttctgttctgtccatgaaaagaaccaggctggagacacagcacttcacgttgctgctgccctaaatcacaagaaggtggccaaaatcttactggaagccggagcagatacgaccattgttaacaatgtcttgcgcttcagtcgtgggcgaagcctgaggaaaaagagagagaggctcaaggaagagaggagagcccagtctgtgccaagagatgaggtggcccaaagcaagggcagtgtctcagcaggagacacccccagcagtgaacaggctgtggccagaaaagaagaagccagagaagagttcctgtcagcctccccagaacccagagcaaaggatgacaggaggagaaagtcaaggcccaaggtgtcagcattttctgaccccaccccaccagccgaccaacagcctggacaccagaagaacctgcatgctcataatcaccctaaaaagaggaacaggcatcggtgttcatccccacccccaccccatgagttcagggcgtatcagctctacacattgtaccggggcaaggatgggaaagtgatgcaggcaccaataaatggttgtcgatgtgaacctctaatcaacaagctggagaatcagttggaggctactgtggaggagataaaagcagagctgggatcggttcaggacaaaatgaatacaaagctggggcagatggagaataagacccagcaccaaatgcgtgttttggacaagctgatggttgagcgactttctgcagagaggacggagtgcctgaaccgcctgcaacagcactcagacacagagaagcatgagggggagaaacgacagatatccttggtggatgaattaaaaacctggtgcatgttaaagattcagaatctggagcagaagctttctggagattctagggcctgcagagctaaatccacaccatctacttgtgtggaccaattagtggtgactgcaggtccagcagcagcttccgacagctcccctccagtggttaggcccaaagagaaggccctcaactccactgctacccagagactccagcaggagctgtcgtcttctgactgtacaggctcccgactgagaaacgtcaaggtccagacagccttgctacccatgaatgaggcagccagatctgatcagcaggctgggccctgcgtcaacagaggcactcaaactaagaagtctgggaagagtgggccaacaaggcatcgtgcccagcaacccgcagccagcagcacctgtgggcagccgccaccagccacaggcagcgagcagactggccctcacattcgggacacctcccaagctctggagcttacccagtatttttttgaggctgtttctacccagatggaaaagtggtatgaaaggaagattgaagaagcacgaagccaagccaatcagaaagcccagcaagataaggctacattgaaggaacacattaaaagtttagaagaggaacttgccaaactaaggactagggtgcagaaggaaaattagcaccaataaagaggaaatatgaaaggattcttgaagatttccagttttgcaactgcataatagctatgcccaaggagtcaactattgtatatattgcagatttgcctttttaaaaaaatcactaattctacaatgtgccagatacatgtttcctatgcccaggaagttatgaagacttcaacaattaaactgaaaccaggggaagcttgcttagttttgggtttcattataaactcttagcctcagtccaggttaatctgaagtttgaaagctcagattaagcaagccatgccaagaaactggacgatgtgtaagcctagactctaaaattcaagatgtgtgaaataatataagtcaaaagcaagaaaaacgtaatcccgtctgaactcaagtagtcattcatataaatttgaacacacctgctgtgcctagacaagtgtctttctgtaagagctgtaactctgagatgtgctaaataaaccctctttctcaaatt

SEQ ID NO: 2069 - DNA, 1298 bp, Homo sapiens
  source 1..1298: mol_type = unassigned DNA
ataacggccggctgcgcgaggcccttccagcatttccactttcgtcaggtactggagagggctgccggccggatgccagggcagaggggcagggcggacggctaggagttcaagaaacatcctggtctgagggaaaggctgcagcctgcaccgccatgaataagcttttcagcttctggaagaggaagaatgagacccgcagccagggctacaaccttcgagaaaaggatttaaagaaacttcacagagctgcttcagtcggggatttgaagaagctgaaggaataccttcagatcaagaaatatgatgtaaatatgcaggacaaaaaatacagaacacctttgcacctagcctgtgctaatggacatacagatgttgtacttttcctaattgagcaacaatgcaaaataaatgtccgggatagtgaaaacaaatccccattgattaaggcagtacagtgtcaaaatgaggattgtgctactattcttctaaactttggtgcagacccagatctgagggatattcgttataatactgttcttcactatgctgtttgtggtcaaagtttgtcattagttgaaaaactgcttgaatacgaagctgatcttgaagcgaaaaataaggatgggtatactccactattagttgccgttattaacaataatccaaaaatggtaaaatttcttctggagaaaggggctgatgtgaatgcttcagataattatcaaagaacagcccttattcttgctgtcagtggtgaaccaccatgtttagtaaagcttcttcttcagcaaggtgtggaattatgttacgaaggtattgtggattcacagctgaggaatatgtttatttccatggttttactgcatagatacccacaattcactgcgagccatggaaagaagaaacatgctaaatagacaccttattcttggcactacatgtgactaaaggaagatatggaacccatttctacaatttctttgccgcttccttgaattggaaaaatgtactttgaaagaaccgttaagtgaactattataatatttttgctgactacccagttgaagaaaagtttgttaattggatgggattttttttttttcacgttagaagacatgaagaaattttaaaagataaacatctatattgtgaaccatcagctgaaaagataaatttgtgttcaatatataggcagaaaaaaatttgtgtcaaaatgttgaatggaataataatgaggaaactgtgttaggcatgtattaaaacatttaaataaaataaaaatacatttcagctac

SEQ ID NO: 2070 - DNA, 1418 bp, Homo sapiens
  source 1..1418: mol_type = unassigned DNA
ataacggccgtaactgccataacggccggctgcgcgaggcccttccagcatttccactttcgtcaggtactggagagggctgccggccggatgccagggcagaggggcagggcggacggctaggagttcaagaaacatcctggtctgagggaaaggctgcagcctgcaccgccatgaataagcttttcagcttctggaagaggaagaatgagacccgcagccagggctacaaccttcgagaaaaggatttaaagaaacttcacagagctgcttcagtcggggatttgaagaagctgaaggaataccttcagatcaagaaatatgatgtaaatatgcaggacaaaaaatacagtgttgtccaatcttctagatggcttttatcctacaccactccgctgaatgactttataagaacacctttgcacctagcctgtgctaatggacatacagatgttgtacttttcctaattgagcaacaatgcaaaataaatgtccgggatagtgaaaacaaatccccattgattaaggcagtacagtgtcaaaatgaggattgtgctactattcttctaaactttggtgcagacccagatctgagggatattcgttataatactgttcttcactatgctgtttgtggtcaaagtttgtcattagttgaaaaactgcttgaatacgaagctgatcttgaagcgaaaaataaggatgggtatactccactattagttgccgttattaacaataatccaaaaatggtaaaatttcttctggagaaaggggctgatgtgaatgcttcagataattatcaaagaacagcccttattcttgctgtcagtggtgaaccaccatgtttagtaaagcttcttcttcagcaaggtgtggaattatgttacgaaggtattgtggattcacagctgaggaatatgtttatttccatggttttactgcatagatacccacaattcactgcgagccatggaaagaagaaacatgctaaatagacaccttattcttggcactacatgtgactaaaggaagatatggaacccatttctacaatttctttgccgcttccttgaattggaaaaatgtactttgaaagaaccgttaagtgaactattataatatttttgctgactacccagttgaagaaaagtttgttaattggatgggattttttttttttcacgttagaagacatgaagaaattttaaaagataaacatctatattgtgaaccatcagctgaaaagataaatttgtgttcaatatataggcagaaaaaaatttgtgtcaaaatgttgaatggaataataatgaggaaactgtgttaggcatgtattaaaacatttaaataaaataaaaatacatttcagctacaaagtgaaggaaaacattataaataatcctgtataaatcaaa

SEQ ID NO: 2071 - DNA, 1103 bp, Homo sapiens
  source 1..1103: mol_type = unassigned DNA
gaaaaggatttaaagaaacttcacagagctgcttcagtcggggatttgaagaagctgaaggaataccttcagatcaagaaatatgatgtaaatatgcaggacaaaaaatacagaacacctttgcacctagcctgtgctaatggacatacagatgttgtacttttcctaattgagcaacaatgcaaaataaatgtccgggatagtgaaaacaaatccccattgattaaggcagtacagtgtcaaaatgaggattgtgctactattcttctaaactttggtgcagacccagatctgagggatattcgttataatactgttcttcactatgctgtttgtggtcaaagtttgtcattagttgaaaaactgcttgaatacgaagctgatcttgaagcgaaaaataaggatgggtatactccactattagttgccgttattaacaataatccaaaaatggtaaaatttcttctggagaaaggggctgatgtgaatgcttcagataattatcaaagaacagcccttattcttgctgtcagtggtgaaccaccatgtttagtaaagcttcttcttcagcaaggtgtggaattatgttacgaaggtattgtggattcacagctgaggaatatgtttatttccatggttttactgcatagatacccacaattcactgcgagccatggaaagaagaaacatgctaaatagacaccttattcttggcactacatgtgactaaaggaagatatggaacccatttctacaatttctttgccgcttccttgaattggaaaaatgtactttgaaagaaccgttaagtgaactattataatatttttgctgactacccagttgaagaaaagtttgttaattggatgggattttttttttttcacgttagaagacatgaagaaattttaaaagataaacatctatattgtgaaccatcagctgaaaagataaatttgtgttcaatatataggcagaaaaaaatttgtgtcaaaatgttgaatggaataataatgaggaaactgtgttaggcatgtattaaaacatttaaataaaataaaaatacatttcagctacaaagtgaaggaaaacattataaataa

SEQ ID NO: 2072 - DNA, 2063 bp, Homo sapiens
  source 1..2063: mol_type = unassigned DNA
ggcggggcgatctggagtaggaggtgtgaccggagggcgaaattggggcttcctctgctctggtgacccagaaccgtcaactgaaatgaccctgtctgtgtagtactccggcaggatgggcctcggagcgtaaaggcggcaaaaacaaaaatattaaaaaaaaggagagagggacaaaaaaaagaaaacccgaaagtttcagctgcattgctgcggaacgttttttagccagaaggcgaaagaagaaatcggaagtgacgtcgcggccaaaacaagcccgggcttggaggcctgtactgaagctggcctcagatgggaaggcccgactcgctgtctgctgtcgtcggtggtcgcgagaccttgcactctcaccgggtcggcctccagcccctgtgcccgggatccgctcgccgcggatgagcgagagtttcttcctgggacttttcgggcacagctggccggtggcgacagaacggactttctttcctgcaagagtctcccctccagcgggagacagcgggctcctgtctcgggacgctgggacacctgtcgcctatttttaaatatccagattccaagaacacactggatactgctcttacaaaaccaagaggaaatcatgaagaaatgttttagttattgaaactacagttgaaatcatggatacatcaacaaatctggatattggagcccagcttatcgtggaagagtgtcccagcacttatagcctaactggcatgccagacattaaaatagaacatccactggacccaaattcagaagaagggtcagctcagggtgttgccatgggaatgaaattcatattgcctaaccgatttgatatgaatgtgtgttctcgatttgtgaagtccttaaatgaagaagatagtaaaaatattcaagatcaggttaactctgacctggaggtggcatctgtcctatttaaagctgaatgcaatatccatacatctccttctccgggaattcaagtaaggcatgtctacaccccctctacaacaaagcatttctcacccataaaacagtcaaccactttaaccaacaaacacagaggaaatgaggtctctaccacacctctgttagcaaattctttgtctgttcaccagttggctgctcagggagagatgctctatctggctactcgtatcgaacaagaaaatgttatcaatcacacggatgaagaaggatttactcctctgatgtgggctgcagcacacgggcaaatagctgtggtagagttcctacttcagaatggtgctgatccccaacttttaggaaaaggtcgagaaagtgcactgtcgttggcctgtagtaaaggctacacagatattgtcaaaatgctgcttgattgtggagttgatgtaaatgaatatgattggaatggaggaacacctctgctttatgctgtacatggaaatcatgtgaaatgtgtaaagatgctcttagaaagtggggctgatccaacaattgaaactgactctggatataattctatggatctagctgtagccctaggctatagaagtgttcaacaggttattgagtcacatttgttgaagctgcttcaaaatatcaaggagtagacacagtcatcagaaaatgtctgcccttttgtttacttcttggtccttataaatgatagttttgtttacttataaatttttacctcagttgcaatatttactggtttttagtaggttttaataaatatttctctgagtaattcactggtttataataaatgtaatactctttttataactatgttttactgtatatttaaaattataaattaatgttttcgtggcatgtaaatttttatggtacagatagttatcatcagtctttgtatcaagtgctgtaatttgacattttcagaaattattctaccctagtcatcttcactcgtgtattaagtcattcactttatatagggtttgctataaatccctagaaaaaaattgttcttattgttgaataaaaaagtgcacagtgtgattgtttacaaaatgatattataaataaataaaatacttcttctgtca

SEQ ID NO: 2073 - DNA, 1865 bp, Homo sapiens
  source 1..1865: mol_type = unassigned DNA
ggtgcgcatgcgcccggagagctgaagggcgcgcggtgccgacagggagcttccttggctggcatggcggcgagcgcgctgcgaggcctgccagtggctggcggaggcgagagtagcgagagcgaggatgatggctgggagattgggtatctcgaccggacgtctcagaaattgaaaaggctattacccattgaagaaaagaaagaaaaatttaagaaagcaatgaccatcggagatgtttcattggtccaggagctcctagattctggcattagtgtagattccaactttcagtatggatggactccccttatgtatgctgctagtgttgccaatgcagagctggttcgggtccttttggacagaggtgctaatgcaagctttgagaaggataagcaaagtattttgataactgcatgttctgctcatggctcagaggaacagatcttgaagtgtgtagaactactactttcaagaaatgctgatccaaatgttgcttgtaggagacttatgaccccaatcatgtatgctgctcgagatggtcacacccaggttgttgctctccttgttgctcatggagcagaagttaatacccaggatgagaatggttacactgctttaacgtgggcagcacgtcagggtcataaaaatatagttttgaagttgcttgaacttggagctaataaaatgctacaaaccaaagatggaaagatgccaagtgagattgcaaaaagaaacaaacatcatgagatcttcaacttactttcttttactttaaatccattggaaggaaaacttcaacagctaactaaagaagacactatttgtaaaatattgacaacagattctgatagagaaaaagatcacatttttagttcatatacagcatttggagatctggaagtatttttacatggtcttggacttgaacatatgacagatttactaaaggaaagggatataacgttaagacatcttttgaccatgagggaagatgaatttacaaagaatggaattaccagtaaagaccagcagaaaattctggctgctcttaaagaactacaggtagaagagatacaatttggagagctatctgaagagacaaagttggaaatcagtggtgatgagttcctcaactttcttctcaaattaaataaacagtgtggccatttaataacagctgtacagaatgttattactgagttacctgtaaattctcaaaagataacactggaatgggcttctccccagaattttacttcagtttgtgaagaattggttaataatgttgaagatttgagtgaaaaggtctgcaaactaaaagacctaattcaaaagttgcaaaatgaacgggaaaatgatccaactcatatacaattaagggaagaagtatctacatggaatagtagaattttgaagaggacagctattaccatatgcggattcggttttcttcttttcatttgcaagctaactttccagaggaaataatccaaatatttgttttaagttatatatacacatcttattgaaccatccaaaaatcattgcttttaactgtttgcagcacaatataactttacattctttgccaatattccataggaaaaattttgacaatgtggagtttttttttaaaaagtggtttgttactttgacttataaatacaatttgttatgtttatgttaattgtgattaggtagtaaagtataagtaattttttggtttgatcgtatctaaatcacattcaaaattaaagttatatctaatatctttgacattttttaaagtgtgttcatttgtcagtgaatcgtacaggatttgtaaagtgttcataaattgagctttcttttgtttctttttt

SEQ ID NO: 2074 - DNA, 1509 bp, Homo sapiens
  source 1..1509: mol_type = unassigned DNA
agctgagccatgtacttcaaacagaaggcagccaattactaacttctggttgctaggtgtggcttcctttaaaatcctataaaatcagaagcccaagtctccactgccagtgtgaaatcttcagagaagaatttctctttagttctttgcaagaaggtagagataaagacactttttcaaaaatggcaatggtatcagaattcctcaagcaggcctggtttattgaaaatgaagagcaggaatatgttcaaactgtgaagtcatccaaaggtggtcccggatcagcggtgagcccctatcctaccttcaatccatcctcggatgtcgctgccttgcataaggccataatggttaaaggtgtggatgaagcaaccatcattgacattctaactaagcgaaacaatgcacagcgtcaacagatcaaagcagcatatctccaggaaacaggaaagcccctggatgaaacactgaagaaagcccttacaggtcaccttgaggaggttgttttagctctgctaaaaactccagcgcaatttgatgctgatgaacttcgtgctgccatgaagggccttggaactgatgaagatactctaattgagattttggcatcaagaactaacaaagaaatcagagacattaacagggtctacagagaggaactgaagagagatctggccaaagacataacctcagacacatctggagattttcggaacgctttgctttctcttgctaagggtgaccgatctgaggactttggtgtgaatgaagacttggctgattcagatgccagggccttgtatgaagcaggagaaaggagaaaggggacagacgtaaacgtgttcaataccatccttaccaccagaagctatccacaacttcgcagagtgtttcagaaatacaccaagtacagtaagcatgacatgaacaaagttctggacctggagttgaaaggtgacattgagaaatgcctcacagctatcgtgaagtgcgccacaagcaaaccagctttctttgcagagaagcttcatcaagccatgaaaggtgttggaactcgccataaggcattgatcaggattatggtttcccgttctgaaattgacatgaatgatatcaaagcattctatcagaagatgtatggtatctccctttgccaagccatcctggatgaaaccaaaggagattatgagaaaatcctggtggctctttgtggaggaaactaaacattcccttgatggtctcaagctatgatcagaagactttaattatatattttcatcctataagcttaaataggaaagtttcttcaacaggattacagtgtagctacctacatgctgaaaaatatagcctttaaatcatttttatattataactctgtataatagagataagtccattttttaaaaatgttttccccaaaccataaaaccctatacaagttgttctagtaacaatacatgagaaagatgtctatgtagctgaaaataaaatgacgtcacaagacaa

SEQ ID NO: 2075 - DNA, 2209 bp, Homo sapiens
  source 1..2209: mol_type = unassigned DNA
aaaaaaaaaaaaaaaaaaaaaagcaatcattaagcttttcatctagccattacttttgtacaggctctcattaattccacatagatggtctaatggtctactaaatagtattctaatcctccatcttgtctatctcttagccattctccatgataaaggatgaatggtctttcggaaacataaatgaaaccatgctgctttaaaaaaacaaacaaacaaaaagaaacccattaatgttttcccaaagctttgtggacacattgaagcttcttgtttcagcttctgccaacatttctcgctccagcaaactttcttctgcttcccaaatatgacaagcttcttctttaacttttctgccaggttaatcttgactcatttcaagagaggcttgggtcagccagggcctactctaagaagtttctttagcccttatgttttcctatggagagcacacactagctttaagtcctgagggtacttaagatgatatttcaatgtttttgtactcttagtgcttggcatatggtgggtggtctacaaatttagaacaatgtagtgaaccacaaactcctctcttcagcctgtgtgcttacttgtagtagttgtctgatctctaaaatttagaactgaatatgccaagaaagagttcaatttcagagaggagggtatggtttcattttaagtataaaagcttcctttaaaaaaaattacgtcttacattttgttatgctcctaagtgtaattgatcctggaaagtaagcgcaaggctactctctaatgctaactcttatgtatgtaagaggtgaggaaggagaggttgtgtgtggtgcatttgttttgtaaaagcatctaactgttttctttccagacactttttcaaaaatggcaatggtatcagaattcctcaagcaggcctggtttattgaaaatgaagagcaggaatatgttcaaactgtgaagtcatccaaaggtggtcccggatcagcggtgagcccctatcctaccttcaatccatcctcggatgtcgctgccttgcataaggccataatggttaaaggtgtggatgaagcaaccatcattgacattctaactaagcgaaacaatgcacagcgtcaacagatcaaagcagcatatctccaggaaacaggaaagcccctggatgaaacactgaagaaagcccttacaggtcaccttgaggaggttgttttagctctgctaaaaactccagcgcaatttgatgctgatgaacttcgtgctgccatgaagggccttggaactgatgaagatactctaattgagattttggcatcaagaactaacaaagaaatcagagacattaacagggtctacagagaggaactgaagagagatctggccaaagacataacctcagacacatctggagattttcggaacgctttgctttctcttgctaagggtgaccgatctgaggactttggtgtgaatgaagacttggctgattcagatgccagggccttgtatgaagcaggagaaaggagaaaggggacagacgtaaacgtgttcaataccatccttaccaccagaagctatccacaacttcgcagagtgtttcagaaatacaccaagtacagtaagcatgacatgaacaaagttctggacctggagttgaaaggtgacattgagaaatgcctcacagctatcgtgaagtgcgccacaagcaaaccagctttctttgcagagaagcttcatcaagccatgaaaggtgttggaactcgccataaggcattgatcaggattatggtttcccgttctgaaattgacatgaatgatatcaaagcattctatcagaagatgtatggtatctccctttgccaagccatcctggatgaaaccaaaggagattatgagaaaatcctggtggctctttgtggaggaaactaaacattcccttgatggtctcaagctatgatcagaagactttaattatatattttcatcctataagcttaaataggaaagtttcttcaacaggattacagtgtagctacctacatgctgaaaaatatagcctttaaatcatttttatattataactctgtataatagagataagtccattttttaaaaatgttttccccaaaccataaaaccctatacaagttgttctagtaacaatacatgagaaagatgtctatgtagctgaaaataaaatgacgtcacaagacaa

SEQ ID NO: 2076 - DNA, 526 bp, Homo sapiens
  source 1..526: mol_type = unassigned DNA
tttgcaagaaggtagagataaagggaaggtgtgggaaggacttgtgaaatacatattcgaggaaaaactatgcacaaggccgtgcatttaaaaataaactccctaaggctggggtgaaacctgctacggtctgcgcaagttgactgttaatgaatttgattctcagacactttttcaaaaatggcaatggtatcagaattcctcaagcaggcctggtttattgaaaatgaagagcaggaatatgttcaaactgtgaagtcatccaaaggtggtcccggatcagcggtgagcccctatcctaccttcaatccatcctcggatgtcgctgccttgcataaggccataatggttaaaggtgtggatgaagcaaccatcattgacattctaactaagcgaaacaatgcacagcgtcaacagatcaaagcagcatatctccaggaaacaggaaagcccctggatgaaacactgaagaaagcccttacaggtcaccttgaggaggttgttttagctctgctaaaaactccag

SEQ ID NO: 2077 - DNA, 799 bp, Homo sapiens
  source 1..799: mol_type = unassigned DNA
agtgtgaaatcttcagagaagaatttctctttagttctttgcaagaaggtagagataaagggaaggtgtgggaaggacttgtgaaatacatattcgaggaaaaactatgcacaaggccgtgcatttaaaaataaactccctaaggctggggtgaaacctgctacggtctgcgcaagttgactgttaatgaatttgattctcaggtacactttttcaaaaatggcaatggtatcagaattcctcaagcaggcctggtttattgaaaatgaagagcaggaatatgttcaaactgtgaagtcatccaaaggtggtcccggatcagcggtgagcccctatcctaccttcaatccatcctcggatgtcgctgccttgcataaggccataatggttaaaggtgtggatgaagcaaccatcattgacattctaactaagcgaaacaatgcacagcgtcaacagatcaaagcagcatatctccaggaaacaggaaagcccctggatgaaacactgaagaaagcccttacaggtcaccttgaggaggttgttttagctctgctaaaaactccagcgcaatttgatgctgatgaacttcgtgctgccatgaagggccttggaactgatgaagatactctaattgagattttggcatcaagaactaacaaagaaatcagagacattaacagggtctacagagaggaactgaagagagatctggccaaagacataacctcagacacatctggagattttcggaacgctttgctttctcttgctaagggtgaccgatctgaggactttggtg

SEQ ID NO: 2078 - DNA, 1417 bp, Homo sapiens
  source 1..1417: mol_type = unassigned DNA
acagtatctcaagtcatgctgtatccagatttgcttttacattttcttgcctgagtctgaggtgaacagtgaacatatttacatttgatttaacagtgaaccttaattctttctggcttcacagtgaaacaagtttatgcaatcgatcaaatattttcatccctgaggttaacaattaccatcaaaatgttttgtggagactatgtgcaaggaaccatcttcccagctcccaatttcaatcccataatggatgcccaaatgctaggaggagcactccaaggatttgactgtgacaaagacatgctgatcaacattctgactcagcgctgcaatgcacaaaggatgatgattgcagaggcataccagagcatgtatggccgggacctgattggggatatgagggagcagctttcggatcacttcaaagatgtgatggctggcctcatgtacccaccaccactgtatgatgctcatgagctctggcatgccatgaagggagtaggcactgatgagaattgcctcattgaaatactagcttcaagaacaaatggagaaattttccagatgcgagaagcctactgcttgcaatacagcaataacctccaagaggacatttattcagagacctcaggacacttcagagatactctcatgaacttggtccaggggaccagagaggaaggatatacagaccctgcgatggctgctcaggatgcaatggtcctatgggaagcctgtcagcagaagacgggggagcacaaaaccatgctgcaaatgatcctgtgcaacaagagctaccagcagctgcggctggttttccaggaatttcaaaatatttctgggcaagatatggtagatgccattaatgaatgttatgatggatactttcaggagctgctggttgcaattgttctctgtgttcgagacaaaccagcctattttgcttatagattatatagtgcaattcatgactttggtttccataataaaactgtaatcaggattctcattgccagaagtgaaatagacctgctgaccataaggaaacgatacaaagagcgatatggaaaatccctatttcatgatatcagaaattttgcttcagggcattataagaaagcactgcttgccatctgtgctggtgatgctgaggactactaaaatgaagaggacttggagtactgtgcactcctctttctagacacttccaaatagagattttctcacaaatttgtactgttcatggcactattaacaaaactatacaatcatattttctcttctatctttgaaattattctaagccaaagaaaactatgaatgaaagtatatgatactgaatttgcctactatcctgaatttgcctactatctaatcagcaattaaataaattgtgcatgatggaataatagaaaaa

SEQ ID NO: 2079 - DNA, 1283 bp, Homo sapiens
  source 1..1283: mol_type = unassigned DNA
atgttttgtagtaatttagtgcaaggaaccatcttcccagctcccaatttcaatcccataatggatgcccaaatgctaggaggagcactccaaggatttgactgtgacaaagacatgctgatcaacattctgactcagcgctgcaatgcacaaaggatgatgattgcagaggcataccagagcatgtatggccgggacctgattggggatatgagggagcagctttcggatcacttcaaagatgtgatggctggcctcatgtacccaccaccactgtatgatgctcatgagctctggcatgccatgaagggagtaggcactgatgagaattgcctcattgaaatactagcttcaagaacaaatggagaaattttccagatgcgagaagcctactgcttgcaatacagcaataacctccaagaggacatttattcagagacctcaggacacttcagagatactctcatgaacttggtccaggggaccagagaggaaggatatacagaccctgcgatggctgctcaggatgcaatggtcctatgggaagcctgtcagcagaagacgggggagcacaaaaccatgctgcaaatgatcctgtgcaacaagagctaccagcagctgcggctggttttccaggaatttcaaaatatttctgggcaagatatggtagatgccattaatgaatgttatgatggatactttcaggagctgctggttgcaattgttctctgtgttcgagacaaaccagcctattttgcttatagattatatagtgcaattcatgactttggtttccataataaaactgtaatcaggattctcattgccagaagtgaaatagacctgctgaccataaggaaacgatacaaagagcgatatggaaaatccctatttcatgatatcagaaattttgcttcagggcattataagaaagcactgcttgccatctgtgctggtgatgctgaggactactaaaatgaagaggacttggagtactgtgcactcctctttctagacacttccaaatagagattttctcacaaatttgtactgttcatggcactattaacaaaactatacaatcatattttctcttctatctttgaaattattctaagccaaagaaaactatgaatgaaagtatatgatactgaatttgcctactatcctgaatttgcctactatctaatcagcaattaaataaattgtgcatgatggaataatagaaaaattgcattggaatagattttatttaaatgtgaaccatcaacaacctacaacaa

SEQ ID NO: 2080 - DNA, 2534 bp, Homo sapiens
  source 1..2534: mol_type = unassigned DNA
gcactgcctctggcacctggggcagccgcgcccgcggagttttccgcccggcgctgacggctgctgcgcccgcggctccccagtgccccgagtgccccgcgggccccgcgagcgggagtgggacccagcccctaggcagaacccaggcgccgcgcccgggacgcccgcggagagagccactcccgcccacgtcccatttcgcccctcgcgtccggagtccccgtggccaggtgagggctctcaggcagagcctgaatgtgctttcgtcttctcttccagatctaaccatgagctaccctggctatcccccgcccccaggtggctacccaccagctgcaccaggtggtggtccctggggaggtgctgcctaccctcctccgcccagcatgccccccatcgggctggataacgtggccacctatgcggggcagttcaaccaggactatctctcgggaatggcggccaacatgtctgggacatttggaggagccaacatgcccaacctgtaccctggggcccctggggctggctacccaccagtgccccctggcggctttgggcagcccccctctgcccagcagcctgttcctccctatgggatgtatccacccccaggaggaaacccaccctccaggatgccctcatatccgccatacccaggggcccctgtgccgggccagcccatgccaccccccggacagcagcccccaggggcctaccctgggcagccaccagtgacctaccctggtcagcctccagtgccactccctgggcagcagcagccagtgccgagctacccaggatacccggggtctgggactgtcacccccgctgtgcccccaacccagtttggaagccgaggcaccatcactgatgctcccggctttgaccccctgcgagatgccgaggtcctgcggaaggccatgaaaggcttcgggacggatgagcaggccatcattgactgcctggggagtcgctccaacaagcagcggcagcagatcctactttccttcaagacggcttacggcaaggatttgatcaaagatctgaaatctgaactgtcaggaaactttgagaagacaatcttggctctgatgaagaccccagtcctctttgacatttatgagataaaggaagccatcaagggggttggcactgatgaagcctgcctgattgagatcctcgcttcccgcagcaatgagcacatccgagaattaaacagagcctacaaagcagaattcaaaaagaccctggaagaggccattcgaagcgacacatcagggcacttccagcggctcctcatctctctctctcagggaaaccgtgatgaaagcacaaacgtggacatgtcactcgcccagagagatgcccaggagctgtatgcggccggggagaaccgcctgggaacagacgagtccaagttcaatgcggttctgtgctcccggagccgggcccacctggtagcagttttcaatgagtaccagagaatgacaggccgggacattgagaagagcatctgccgggagatgtccggggacctggaggagggcatgctggccgtggtgaaatgtctcaagaataccccagccttctttgcggagaggctcaacaaggccatgaggggggcaggaacaaaggaccggaccctgattcgcatcatggtgtctcgcagcgagaccgacctcctggacatcagatcagagtataagcggatgtacggcaagtcgctgtaccacgacatctcgggagatacttcaggggattaccggaagattctgctgaagatctgtggtggcaatgactgaacagtgactggtggctcacttctgcccacctgccggcaacaccagtgccaggaaaaggccaaaagaatgtctgtttctaacaaatccacaaatagccccgagattcaccgtcctagagcttaggcctgtcttccacccctcctgacccgtatagtgtgccacaggacctgggtcggtctagaactctctcaggatgccttttctaccccatccctcacagcctcttgctgctaaaatagatgtttcatttttctgactcatgcaatcattcccctttgcctgtggctaagacttggcttcatttcgtcatgtaattgtatatttttatttggaggcatattttcttttcttacagtcattgccagacagaggcatacaagtctgtttgctgcatacacatttctggtgagggcgactgggtgggtgaagcaccgtgtcctcgctgaggagagaaagggaggcgtgcctgagaaggtagcctgtgcatctggtgagtgtgtcacgagctttgttactgccaaactcactcctttttagaaaaaacaaaaaaaaagggccagaaagtcattccttccatcttccttgcagaaaccacgagaacaaagccagttccctgtcagtgacagggcttcttgtaatttgtggtatgtgccttaaacctgaatgtctgtagccaaaacttgtttccacattaagagtcagccagctctggaatggtctggaaatgtc

SEQ ID NO: 2081 - DNA, 2729 bp, Homo sapiens
  source 1..2729: mol_type = unassigned DNA
gcactgcctctggcacctggggcagccgcgcccgcggagttttccgcccggcgctgacggctgctgcgcccgcggctccccagtgccccgagtgccccgcgggccccgcgagcgggagtgggacccagcccctaggcagaacccaggcgccgcgcccgggacgcccgcggagagagccactcccgcccacgtcccatttcgcccctcgcgtccggagtccccgtggccagggattattggacctgcctggtttaaactattgtcttagttaattttgtgctgctctaacaaaatatcacagactgagtaatttataagcaatagtagcttatttggctcacagttctggaggctgagaagatcgtgaggctgcatctggcaagggccttcttgctgcttcataacatggcagaagacatcatgcggcaggggctctcaggcagagcctgaatgtgctttcgtcttctcttccagatctaaccatgagctaccctggctatcccccgcccccaggtggctacccaccagctgcaccaggtggtggtccctggggaggtgctgcctaccctcctccgcccagcatgccccccatcgggctggataacgtggccacctatgcggggcagttcaaccaggactatctctcgggaatggcggccaacatgtctgggacatttggaggagccaacatgcccaacctgtaccctggggcccctggggctggctacccaccagtgccccctggcggctttgggcagcccccctctgcccagcagcctgttcctccctatgggatgtatccacccccaggaggaaacccaccctccaggatgccctcatatccgccatacccaggggcccctgtgccgggccagcccatgccaccccccggacagcagcccccaggggcctaccctgggcagccaccagtgacctaccctggtcagcctccagtgccactccctgggcagcagcagccagtgccgagctacccaggatacccggggtctgggactgtcacccccgctgtgcccccaacccagtttggaagccgaggcaccatcactgatgctcccggctttgaccccctgcgagatgccgaggtcctgcggaaggccatgaaaggcttcgggacggatgagcaggccatcattgactgcctggggagtcgctccaacaagcagcggcagcagatcctactttccttcaagacggcttacggcaaggatttgatcaaagatctgaaatctgaactgtcaggaaactttgagaagacaatcttggctctgatgaagaccccagtcctctttgacatttatgagataaaggaagccatcaagggggttggcactgatgaagcctgcctgattgagatcctcgcttcccgcagcaatgagcacatccgagaattaaacagagcctacaaagcagaattcaaaaagaccctggaagaggccattcgaagcgacacatcagggcacttccagcggctcctcatctctctctctcagggaaaccgtgatgaaagcacaaacgtggacatgtcactcgcccagagagatgcccaggagctgtatgcggccggggagaaccgcctgggaacagacgagtccaagttcaatgcggttctgtgctcccggagccgggcccacctggtagcagttttcaatgagtaccagagaatgacaggccgggacattgagaagagcatctgccgggagatgtccggggacctggaggagggcatgctggccgtggtgaaatgtctcaagaataccccagccttctttgcggagaggctcaacaaggccatgaggggggcaggaacaaaggaccggaccctgattcgcatcatggtgtctcgcagcgagaccgacctcctggacatcagatcagagtataagcggatgtacggcaagtcgctgtaccacgacatctcgggagatacttcaggggattaccggaagattctgctgaagatctgtggtggcaatgactgaacagtgactggtggctcacttctgcccacctgccggcaacaccagtgccaggaaaaggccaaaagaatgtctgtttctaacaaatccacaaatagccccgagattcaccgtcctagagcttaggcctgtcttccacccctcctgacccgtatagtgtgccacaggacctgggtcggtctagaactctctcaggatgccttttctaccccatccctcacagcctcttgctgctaaaatagatgtttcatttttctgactcatgcaatcattcccctttgcctgtggctaagacttggcttcatttcgtcatgtaattgtatatttttatttggaggcatattttcttttcttacagtcattgccagacagaggcatacaagtctgtttgctgcatacacatttctggtgagggcgactgggtgggtgaagcaccgtgtcctcgctgaggagagaaagggaggcgtgcctgagaaggtagcctgtgcatctggtgagtgtgtcacgagctttgttactgccaaactcactcctttttagaaaaaacaaaaaaaaagggccagaaagtcattccttccatcttccttgcagaaaccacgagaacaaagccagttccctgtcagtgacagggcttcttgtaatttgtggtatgtgccttaaacctgaatgtctgtagccaaaacttgtttccacattaagagtcagccagctctggaatggtctggaaatgtc

SEQ ID NO: 2082 - DNA, 1780 bp, Homo sapiens
  source 1..1780: mol_type = unassigned DNA
gacggctgctgcgcccgcggctccccagtgccccgagtgccccgcgggccccgcgagcgggagtgggacccagcccctaggcagaacccaggcgccgcgcccgggacgcccgcggagagagccactcccgcccacgtcccatttcgcccctcgcgtccggagtccccgtggccaggtgtgtgtctggggaagagacttacagaagtggagttgctgagtcaaagatctaaccatgagctaccctggctatcccccgcccccaggtggctacccaccagctgcaccaggtggtggtccctggggaggtgctgcctaccctcctccgcccagcatgccccccatcgggctggataacgtggccacctatgcggggcagttcaaccaggactatctctcgggaatggcggccaacatgtctgggacatttggaggagccaacatgcccaacctgtaccctggggcccctggggctggctacccaccagtgccccctggcggctttgggcagcccccctctgcccagcagcctgttcctccctatgggatgtatccacccccaggaggaaacccaccctccaggatgccctcatatccgccatacccaggggcccctgtgccgggccagcccatgccaccccccggacagcagcccccaggggcctaccctgggcagccaccagtgacctaccctggtcagcctccagtgccactccctgggcagcagcagccagtgccgagctacccaggatacccggggtctgggactgtcacccccgctgtgcccccaacccagtttggaagccgaggcaccatcactgatgctcccggctttgaccccctgcgagatgccgaggtcctgcggaaggccatgaaaggcttcgggacggatgagcaggccatcattgactgcctggggagtcgctccaacaagcagcggcagcagatcctactttccttcaagacggcttacggcaaggatttgatcaaagatctgaaatctgaactgtcaggaaactttgagaagacaatcttggctctgatgaagaccccagtcctctttgacatttatgagataaaggaagccatcaagggggttggcactgatgaagcctgcctgattgagatcctcgcttcccgcagcaatgagcacatccgagaattaaacagagcctacaaagcagaattcaaaaagaccctggaagaggccattcgaagcgacacatcagggcacttccagcggctcctcatctctctctctcagggaaaccgtgatgaaagcacaaacgtggacatgtcactcgcccagagagatgcccaggagctgtatgcggccggggagaaccgcctgggaacagacgagtccaagttcaatgcggttctgtgctcccggagccgggcccacctggtagcagttttcaatgagtaccagagaatgacaggccgggacattgagaagagcatctgccgggagatgtccggggacctggaggagggcatgctggccgtggtgaaatgtctcaagaataccccagccttctttgcggagaggctcaacaaggccatgaggggggcaggaacaaaggaccggaccctgattcgcatcatggtgtctcgcagcgagaccgacctcctggacatcagatcagagtataagcggatgtacggcaagtcgctgtaccacgacatctcgagtatctcctgcatgccagcaagctatggacatctggaagaagccacatgccttgccctcaagttgcttagggtggaaggaaatgattag

SEQ ID NO: 2083 - DNA, 6720 bp, Homo sapiens
  source 1..6720: mol_type = unassigned DNA
gcactgcctctggcacctggggcagccgcgcccgcggagttttccgcccggcgctgacggctgctgcgcccgcggctccccagtgccccgagtgccccgcgggccccgcgagcgggagtgggacccagcccctaggcagaacccaggcgccgcgcccgggacgcccgcggagagagccactcccgcccacgtcccatttcgcccctcgcgtccggagtccccgtggccagatctaaccatgagctaccctggctatcccccgcccccaggtggctacccaccagctgcaccaggtggtggtccctggggaggtgctgcctaccctcctccgcccagcatgccccccatcgggctggataacgtggccacctatgcggggcagttcaaccaggactatctctcgggaatggcggccaacatgtctgggacatttggaggagccaacatgcccaacctgtaccctggggcccctggggctggctacccaccagtgccccctggcggctttgggcagcccccctctgcccagcagcctgttcctccctatgggatgtatccacccccaggaggaaacccaccctccaggatgccctcatatccgccatacccaggggcccctgtgccgggccagcccatgccaccccccggacagcagcccccaggggcctaccctgggcagccaccagtgacctaccctggtcagcctccagtgccactccctgggcagcagcagccagtgccgagctacccaggatacccggggtctgggactgtcacccccgctgtgcccccaacccagtttggaagccgaggcaccatcactgatgctcccggctttgaccccctgcgagatgccgaggtcctgcggaaggccatgaaaggcttcgggacggatgagcaggccatcattgactgcctggggagtcgctccaacaagcagcggcagcagatcctactttccttcaagacggcttacggcaaggatttgatcaaagatctgaaatctgaactgtcaggaaactttgagaagacaatcttggctctgatgaagaccccagtcctctttgacatttatgagataaaggaagccatcaagggggttggcactgatgaagcctgcctgattgagatcctcgcttcccgcagcaatgagcacatccgagaattaaacagagcctacaaagcagaattcaaaaagaccctggaagaggccattcgaagcgacacatcagggcacttccagcggctcctcatctctctctctcagggaaaccgtgatgaaagcacaaacgtggacatgtcactcgcccagagagatgcccaggagctgtatgcggccggggagaaccgcctgggaacagacgagtccaagttcaatgcggttctgtgctcccggagccgggcccacctggtagcagttttcaatgagtaccagagaatgacaggccgggacattgagaagagcatctgccgggagatgtccggggacctggaggagggcatgctggccgtggtgaaatgtctcaagaataccccagccttctttgcggagaggctcaacaaggccatgaggggggcaggaacaaaggaccggaccctgattcgcatcatggtgtctcgcagcgagaccgacctcctggacatcagatcagagtataagcggatgtacggcaagtcgctgtaccacgacatctcgggagatacttcaggggattaccggaagattctgctgaagatctgtggtggcaatgactgaacagtgactggtggctcacttctgcccacctgccggcaacaccagtgccaggaaaaggccaaaagaatgtctgtttctaacaaatccacaaatagccccgagattcaccgtcctagagcttaggcctgtcttccacccctcctgacccgtatagtgtgccacaggacctgggtcggtctagaactctctcaggatgccttttctaccccatccctcacagcctcttgctgctaaaatagatgtttcatttttctgactcatgcaatcattcccctttgcctgtggctaagacttggcttcatttcgtcatgtaattgtatatttttatttggaggcatattttcttttcttacagtcattgccagacagaggcatacaagtctgtttgctgcatacacatttctggtgagggcgactgggtgggtgaagcaccgtgtcctcgctgaggagagaaagggaggcgtgcctgagaaggtagcctgtgcatctggtgagtgtgtcacgagctttgttactgccaaactcactcctttttagaaaaaacaaaaaaaaagggccagaaagtcattccttccatcttccttgcagaaaccacgagaacaaagccagttccctgtcagtgacagggcttcttgtaatttgtggtatgtgccttaaacctgaatgtctgtagccaaaacttgtttccacattaagagtcagccagctctggaatggtctggaaatgtcttcctggtaccaacttgttttcttctgcttgattctgccctgtggctcagaggtctggccttatcagccagtgaaagttcatgtaaccttacgtagagatttgtgtgcaggaaaccctgagcatacactagtttgcagggactcgtaaggacatgggaagggaggttcccgaaatccaggcaggaggcccagacacctgaaaggcaaagggatcttggttggttgcaggtgcagtgaagtccactgaaggtgtggtgcgaagaatgcagtccttcacccaggtcccaggagggaagaagggtgtgtgctaattcctggtgcccctcggcgggggccagagagaaggatggggacaacccagagagtcacaagaccagtgcctcccctcagggtgcctccaggctgaaaggggctcctggctctggtctctggggaccctgtgcccgttggttggtggtgtgagggaagagaatccataagagagtttctgagaattatggtgtcatgtccagaagctagagcttaccttgcatcaggggtctccacccactccttttccaacctcctgcgttgaggtttagaaaagagagaatcgactaggcactatggctcacgcctgtaatccaaggactttgggaagctgaggtgagaggatcacttgagctcaggagttcaagactagcctagccaacagcgagacccctgtctctactaaaaaatttggccaggcgtggtggctcacggctgtaatcccagcactttgggaggtgaggcgggcagatcacctgaggtcaggagttcgagacccagcctggccaacatggtgaaaccccatctctactaaaaatacaaaaattagccaggcatggtggcacattcctgtaatcccagctacacaggatgctgaggcaggagaatcacttgaacccaggaggcagaggttgtagtgagctgagatcacaccattgcacttcaacctgggtggacagagtgagactctgtctcaaaaaaaaaaaaaaatttacctggcattgtagtgcattccctatagtcggctactctggaggctgaggcaggaagatccttagagcccaagaaattgaggccgtagtaagctgtgattacaccactgcactccagcctggacaacagagcgagaccttgtctcaaatgagaaaaaaacaaaaagaaatgggagaatccagagagactaggctagatcaagcctgctgggtcctggcaggagccccagggagtagctcatctgcagacatttgcttgaggactaccccctaaacataaaggaagaatgacatccgaagggtgtggagcagccatgagctgagaactagcctggtctacctgagattgatggcaggtcctggtcaacacgtcagctctgcgtcagagtccatgcctcaagcccaagctgaagccccatccctgctgctctcccaagaactcctctgctagggcaggccccttgcccttgggtgccaggtgggacctgcctgatgggatggggtgcttggcatatacaacttgccatgaactcaaggtgaccctgggggcctcctgaattgtgatggggcctagaaccaatgtgctctgatgtgaccatattctgtgacattaccttgccctgtttactccaaagttcccagcctggtgcccagcaggcaatattgcacctacagacacatttactttggtttccaaagtgtttttagacatttgaatttgttgccaacatttaaacattgagagatttcatatttttaaaaatctggaattctggcttctcttgaaaactcagaaattctggcactatggggcttgcattcctgcatggctggagctgagttgcagctgcccctttaggcctgtactccttatttgctataggctccgtcttgtattacactaagcccatgtcacccatttggctcctgcaggcctttgggtttgagaccctggtctacacacttggagaccacctgttgtaaagtacatggatgtgctttggtcaaggaatagaccaaggtggatatccaggccagagtgactcagcgagtttaggtcacaggcgtatactccacttgttatataacctgcttgtgtaagttcatacttggctcaaagccactattgtttggaaaaggtataactgccctgctgacgctgtacagatgttcttgggctcggatgggcatggctccacgtggtgtgcactagcacccagagagagtgaagctattgacccctgtaagggagagtgaccatctggcagatagatagaggggagccaggacatggctcagcttgtgcccagagggagagttaagccgctgaccctgtagccagggagtgcacctgcaagcatgggggtggcaggagccacagagctggctgctgagaggagctgcagatctggagaagacagcctaggtaaaggtggacagtgtgagagctgctgatgagatagctgctgaataaaactacattttacctgcctatggcccgccaggttttctttcagctatcgcccatccacccagtcccctcgaacctcagcatgggctggaacctgaccctgggcatgacatttggcatagttgtggacctgacacctgtgtttgtcctagtcctgtttctccctgccttcctgttcctctcgctgccctcatggtcactcccaagagatccaacccatgttaagtatgggctggaggactgcatgaatgcctcatgatcttcccagaggcaaaggcacctactgccttccaaggtcagtgggaggttgggatcaacactgtttattatgcttaggacaaaaaagatagggagaaagatgtgcaaccttacaggtcatctttctgggatagaacacaatgggtcttctcctgcctcctggatatgttagtcaaggccagtccatgctacacatctagtctgacttctaaaatagaagcaccagatgaattcagccctgagagaattttcagcagctgtgggggcgctggaggaaacactattaaatagttttgcacctgagacagatagcctcactcgcctcaccctagtcctggtggcatttgtctcaggtgcaaaatttaagaaagaaaccttggagtgctcaccctgtggctgggtagatggtcctaaagtggtggttttcaagcctgagtgtgtatcaggatcatcaggggagcttgctaaagagcagttcctgcggtcagaccctcatgcattttgagcaggtgtggggactgggaaactgcatctgtaacctgctgtaatctaacgcttatctaaatactactgtgctcacacagagaacaccgcaaaagtagaggtgttcctccagagggcaggtgagcagatggcacagtctgcttggaattcagtcaggtgatgagagatgagatgaggcactcctagctttgggaagagggagctgaaagatgaacctttgcaggtgcccacggtcaaagtggtggtttaatgccatgccatgcccattttctgttggccttggcagggagttacagccctaccttaggacctggctccttatttctgctgtaggctctttcctgccctggccgagatggagtggaatgagacctagaaacatcaagctaaatacatgtcctcagaaagataaaggtttacattttcacccccatcaaatctgaaagctctctgcctgtgtttttctaagggatagggacatcattactcagtccacaacctggactcatgtagggtcccctgtcagtaaaggagtcagtcaagcccaccaggtataccaaggactcttaccctcagcccctactccttggaaagctgccccttggcctaatattggtgtttagcttgagcctgactccttctcaacactaagagctgatgaagtcctgaagcagaaagagctctgacctgagagtcaaacatccttattctgatctcagctcagcccctgatttgttgtgtgaccctggatatgtcacttcctgtctttttgactttttaaaatgaagggtagactagaggagagcttctaaaactttaatgtggtcaacgaaatggaataggaaattccacaagtctgtccttccacaaaagcagcaaataaggtggcaaaaactcaaatttatgggaactctggaaacgaattgaaagtttacagcaatcaggtgaatacctaagaataaaagctggatttagtaaga

SEQ ID NO: 2084 - DNA, 6699 bp, Homo sapiens
  source 1..6699: mol_type = unassigned DNA
ttcctggagcagctccgcagccggaaggctgctgctcctcgcgggcccgccgtgcccacccctaggcagaacccaggcgccgcgcccgggacgcccgcggagagagccactcccgcccacgtcccatttcgcccctcgcgtccggagtccccgtggccaggtgtgtgtctggggaagagacttacagaagtggagttgctgagtcaaagatctaaccatgagctaccctggctatcccccgcccccaggtggctacccaccagctgcaccaggtggtggtccctggggaggtgctgcctaccctcctccgcccagcatgccccccatcgggctggataacgtggccacctatgcggggcagttcaaccaggactatctctcgggaatggcggccaacatgtctgggacatttggaggagccaacatgcccaacctgtaccctggggcccctggggctggctacccaccagtgccccctggcggctttgggcagcccccctctgcccagcagcctgttcctccctatgggatgtatccacccccaggaggaaacccaccctccaggatgccctcatatccgccatacccaggggcccctgtgccgggccagcccatgccaccccccggacagcagcccccaggggcctaccctgggcagccaccagtgacctaccctggtcagcctccagtgccactccctgggcagcagcagccagtgccgagctacccaggatacccggggtctgggactgtcacccccgctgtgcccccaacccagtttggaagccgaggcaccatcactgatgctcccggctttgaccccctgcgagatgccgaggtcctgcggaaggccatgaaaggcttcgggacggatgagcaggccatcattgactgcctggggagtcgctccaacaagcagcggcagcagatcctactttccttcaagacggcttacggcaaggatttgatcaaagatctgaaatctgaactgtcaggaaactttgagaagacaatcttggctctgatgaagaccccagtcctctttgacatttatgagataaaggaagccatcaagggggttggcactgatgaagcctgcctgattgagatcctcgcttcccgcagcaatgagcacatccgagaattaaacagagcctacaaagcagaattcaaaaagaccctggaagaggccattcgaagcgacacatcagggcacttccagcggctcctcatctctctctctcagggaaaccgtgatgaaagcacaaacgtggacatgtcactcgcccagagagatgcccaggagctgtatgcggccggggagaaccgcctgggaacagacgagtccaagttcaatgcggttctgtgctcccggagccgggcccacctggtagcagttttcaatgagtaccagagaatgacaggccgggacattgagaagagcatctgccgggagatgtccggggacctggaggagggcatgctggccgtggtgaaatgtctcaagaataccccagccttctttgcggagaggctcaacaaggccatgaggggggcaggaacaaaggaccggaccctgattcgcatcatggtgtctcgcagcgagaccgacctcctggacatcagatcagagtataagcggatgtacggcaagtcgctgtaccacgacatctcgggagatacttcaggggattaccggaagattctgctgaagatctgtggtggcaatgactgaacagtgactggtggctcacttctgcccacctgccggcaacaccagtgccaggaaaaggccaaaagaatgtctgtttctaacaaatccacaaatagccccgagattcaccgtcctagagcttaggcctgtcttccacccctcctgacccgtatagtgtgccacaggacctgggtcggtctagaactctctcaggatgccttttctaccccatccctcacagcctcttgctgctaaaatagatgtttcatttttctgactcatgcaatcattcccctttgcctgtggctaagacttggcttcatttcgtcatgtaattgtatatttttatttggaggcatattttcttttcttacagtcattgccagacagaggcatacaagtctgtttgctgcatacacatttctggtgagggcgactgggtgggtgaagcaccgtgtcctcgctgaggagagaaagggaggcgtgcctgagaaggtagcctgtgcatctggtgagtgtgtcacgagctttgttactgccaaactcactcctttttagaaaaaacaaaaaaaaagggccagaaagtcattccttccatcttccttgcagaaaccacgagaacaaagccagttccctgtcagtgacagggcttcttgtaatttgtggtatgtgccttaaacctgaatgtctgtagccaaaacttgtttccacattaagagtcagccagctctggaatggtctggaaatgtcttcctggtaccaacttgttttcttctgcttgattctgccctgtggctcagaggtctggccttatcagccagtgaaagttcatgtaaccttacgtagagatttgtgtgcaggaaaccctgagcatacactagtttgcagggactcgtaaggacatgggaagggaggttcccgaaatccaggcaggaggcccagacacctgaaaggcaaagggatcttggttggttgcaggtgcagtgaagtccactgaaggtgtggtgcgaagaatgcagtccttcacccaggtcccaggagggaagaagggtgtgtgctaattcctggtgcccctcggcgggggccagagagaaggatggggacaacccagagagtcacaagaccagtgcctcccctcagggtgcctccaggctgaaaggggctcctggctctggtctctggggaccctgtgcccgttggttggtggtgtgagggaagagaatccataagagagtttctgagaattatggtgtcatgtccagaagctagagcttaccttgcatcaggggtctccacccactccttttccaacctcctgcgttgaggtttagaaaagagagaatcgactaggcactatggctcacgcctgtaatccaaggactttgggaagctgaggtgagaggatcacttgagctcaggagttcaagactagcctagccaacagcgagacccctgtctctactaaaaaatttggccaggcgtggtggctcacggctgtaatcccagcactttgggaggtgaggcgggcagatcacctgaggtcaggagttcgagacccagcctggccaacatggtgaaaccccatctctactaaaaatacaaaaattagccaggcatggtggcacattcctgtaatcccagctacacaggatgctgaggcaggagaatcacttgaacccaggaggcagaggttgtagtgagctgagatcacaccattgcacttcaacctgggtggacagagtgagactctgtctcaaaaaaaaaaaaaaatttacctggcattgtagtgcattccctatagtcggctactctggaggctgaggcaggaagatccttagagcccaagaaattgaggccgtagtaagctgtgattacaccactgcactccagcctggacaacagagcgagaccttgtctcaaatgagaaaaaaacaaaaagaaatgggagaatccagagagactaggctagatcaagcctgctgggtcctggcaggagccccagggagtagctcatctgcagacatttgcttgaggactaccccctaaacataaaggaagaatgacatccgaagggtgtggagcagccatgagctgagaactagcctggtctacctgagattgatggcaggtcctggtcaacacgtcagctctgcgtcagagtccatgcctcaagcccaagctgaagccccatccctgctgctctcccaagaactcctctgctagggcaggccccttgcccttgggtgccaggtgggacctgcctgatgggatggggtgcttggcatatacaacttgccatgaactcaaggtgaccctgggggcctcctgaattgtgatggggcctagaaccaatgtgctctgatgtgaccatattctgtgacattaccttgccctgtttactccaaagttcccagcctggtgcccagcaggcaatattgcacctacagacacatttactttggtttccaaagtgtttttagacatttgaatttgttgccaacatttaaacattgagagatttcatatttttaaaaatctggaattctggcttctcttgaaaactcagaaattctggcactatggggcttgcattcctgcatggctggagctgagttgcagctgcccctttaggcctgtactccttatttgctataggctccgtcttgtattacactaagcccatgtcacccatttggctcctgcaggcctttgggtttgagaccctggtctacacacttggagaccacctgttgtaaagtacatggatgtgctttggtcaaggaatagaccaaggtggatatccaggccagagtgactcagcgagtttaggtcacaggcgtatactccacttgttatataacctgcttgtgtaagttcatacttggctcaaagccactattgtttggaaaaggtataactgccctgctgacgctgtacagatgttcttgggctcggatgggcatggctccacgtggtgtgcactagcacccagagagagtgaagctattgacccctgtaagggagagtgaccatctggcagatagatagaggggagccaggacatggctcagcttgtgcccagagggagagttaagccgctgaccctgtagccagggagtgcacctgcaagcatgggggtggcaggagccacagagctggctgctgagaggagctgcagatctggagaagacagcctaggtaaaggtggacagtgtgagagctgctgatgagatagctgctgaataaaactacattttacctgcctatggcccgccaggttttctttcagctatcgcccatccacccagtcccctcgaacctcagcatgggctggaacctgaccctgggcatgacatttggcatagttgtggacctgacacctgtgtttgtcctagtcctgtttctccctgccttcctgttcctctcgctgccctcatggtcactcccaagagatccaacccatgttaagtatgggctggaggactgcatgaatgcctcatgatcttcccagaggcaaaggcacctactgccttccaaggtcagtgggaggttgggatcaacactgtttattatgcttaggacaaaaaagatagggagaaagatgtgcaaccttacaggtcatctttctgggatagaacacaatgggtcttctcctgcctcctggatatgttagtcaaggccagtccatgctacacatctagtctgacttctaaaatagaagcaccagatgaattcagccctgagagaattttcagcagctgtgggggcgctggaggaaacactattaaatagttttgcacctgagacagatagcctcactcgcctcaccctagtcctggtggcatttgtctcaggtgcaaaatttaagaaagaaaccttggagtgctcaccctgtggctgggtagatggtcctaaagtggtggttttcaagcctgagtgtgtatcaggatcatcaggggagcttgctaaagagcagttcctgcggtcagaccctcatgcattttgagcaggtgtggggactgggaaactgcatctgtaacctgctgtaatctaacgcttatctaaatactactgtgctcacacagagaacaccgcaaaagtagaggtgttcctccagagggcaggtgagcagatggcacagtctgcttggaattcagtcaggtgatgagagatgagatgaggcactcctagctttgggaagagggagctgaaagatgaacctttgcaggtgcccacggtcaaagtggtggtttaatgccatgccatgcccattttctgttggccttggcagggagttacagccctaccttaggacctggctccttatttctgctgtaggctctttcctgccctggccgagatggagtggaatgagacctagaaacatcaagctaaatacatgtcctcagaaagataaaggtttacattttcacccccatcaaatctgaaagctctctgcctgtgtttttctaagggatagggacatcattactcagtccacaacctggactcatgtagggtcccctgtcagtaaaggagtcagtcaagcccaccaggtataccaaggactcttaccctcagcccctactccttggaaagctgccccttggcctaatattggtgtttagcttgagcctgactccttctcaacactaagagctgatgaagtcctgaagcagaaagagctctgacctgagagtcaaacatccttattctgatctcagctcagcccctgatttgttgtgtgaccctggatatgtcacttcctgtctttttgactttttaaaatgaagggtagactagaggagagcttctaaaactttaatgtggtcaacgaaatggaataggaaattccacaagtctgtccttccacaaaagcagcaaataaggtggcaaaaactcaaatttatgggaactctggaaacgaattgaaagtttacagcaatcaggtgaatacctaagaataaaagctggatttagtaaga

SEQ ID NO: 2085 - DNA, 6769 bp, Homo sapiens
  source 1..6769: mol_type = unassigned DNA
gcactgcctctggcacctggggcagccgcgcccgcggagttttccgcccggcgctgacggctgctgcgcccgcggctccccagtgccccgagtgccccgcgggccccgcgagcgggagtgggacccagcccctaggcagaacccaggcgccgcgcccgggacgcccgcggagagagccactcccgcccacgtcccatttcgcccctcgcgtccggagtccccgtggccaggtgtgtgtctggggaagagacttacagaagtggagttgctgagtcaaagatctaaccatgagctaccctggctatcccccgcccccaggtggctacccaccagctgcaccaggtggtggtccctggggaggtgctgcctaccctcctccgcccagcatgccccccatcgggctggataacgtggccacctatgcggggcagttcaaccaggactatctctcgggaatggcggccaacatgtctgggacatttggaggagccaacatgcccaacctgtaccctggggcccctggggctggctacccaccagtgccccctggcggctttgggcagcccccctctgcccagcagcctgttcctccctatgggatgtatccacccccaggaggaaacccaccctccaggatgccctcatatccgccatacccaggggcccctgtgccgggccagcccatgccaccccccggacagcagcccccaggggcctaccctgggcagccaccagtgacctaccctggtcagcctccagtgccactccctgggcagcagcagccagtgccgagctacccaggatacccggggtctgggactgtcacccccgctgtgcccccaacccagtttggaagccgaggcaccatcactgatgctcccggctttgaccccctgcgagatgccgaggtcctgcggaaggccatgaaaggcttcgggacggatgagcaggccatcattgactgcctggggagtcgctccaacaagcagcggcagcagatcctactttccttcaagacggcttacggcaaggatttgatcaaagatctgaaatctgaactgtcaggaaactttgagaagacaatcttggctctgatgaagaccccagtcctctttgacatttatgagataaaggaagccatcaagggggttggcactgatgaagcctgcctgattgagatcctcgcttcccgcagcaatgagcacatccgagaattaaacagagcctacaaagcagaattcaaaaagaccctggaagaggccattcgaagcgacacatcagggcacttccagcggctcctcatctctctctctcagggaaaccgtgatgaaagcacaaacgtggacatgtcactcgcccagagagatgcccaggagctgtatgcggccggggagaaccgcctgggaacagacgagtccaagttcaatgcggttctgtgctcccggagccgggcccacctggtagcagttttcaatgagtaccagagaatgacaggccgggacattgagaagagcatctgccgggagatgtccggggacctggaggagggcatgctggccgtggtgaaatgtctcaagaataccccagccttctttgcggagaggctcaacaaggccatgaggggggcaggaacaaaggaccggaccctgattcgcatcatggtgtctcgcagcgagaccgacctcctggacatcagatcagagtataagcggatgtacggcaagtcgctgtaccacgacatctcgggagatacttcaggggattaccggaagattctgctgaagatctgtggtggcaatgactgaacagtgactggtggctcacttctgcccacctgccggcaacaccagtgccaggaaaaggccaaaagaatgtctgtttctaacaaatccacaaatagccccgagattcaccgtcctagagcttaggcctgtcttccacccctcctgacccgtatagtgtgccacaggacctgggtcggtctagaactctctcaggatgccttttctaccccatccctcacagcctcttgctgctaaaatagatgtttcatttttctgactcatgcaatcattcccctttgcctgtggctaagacttggcttcatttcgtcatgtaattgtatatttttatttggaggcatattttcttttcttacagtcattgccagacagaggcatacaagtctgtttgctgcatacacatttctggtgagggcgactgggtgggtgaagcaccgtgtcctcgctgaggagagaaagggaggcgtgcctgagaaggtagcctgtgcatctggtgagtgtgtcacgagctttgttactgccaaactcactcctttttagaaaaaacaaaaaaaaagggccagaaagtcattccttccatcttccttgcagaaaccacgagaacaaagccagttccctgtcagtgacagggcttcttgtaatttgtggtatgtgccttaaacctgaatgtctgtagccaaaacttgtttccacattaagagtcagccagctctggaatggtctggaaatgtcttcctggtaccaacttgttttcttctgcttgattctgccctgtggctcagaggtctggccttatcagccagtgaaagttcatgtaaccttacgtagagatttgtgtgcaggaaaccctgagcatacactagtttgcagggactcgtaaggacatgggaagggaggttcccgaaatccaggcaggaggcccagacacctgaaaggcaaagggatcttggttggttgcaggtgcagtgaagtccactgaaggtgtggtgcgaagaatgcagtccttcacccaggtcccaggagggaagaagggtgtgtgctaattcctggtgcccctcggcgggggccagagagaaggatggggacaacccagagagtcacaagaccagtgcctcccctcagggtgcctccaggctgaaaggggctcctggctctggtctctggggaccctgtgcccgttggttggtggtgtgagggaagagaatccataagagagtttctgagaattatggtgtcatgtccagaagctagagcttaccttgcatcaggggtctccacccactccttttccaacctcctgcgttgaggtttagaaaagagagaatcgactaggcactatggctcacgcctgtaatccaaggactttgggaagctgaggtgagaggatcacttgagctcaggagttcaagactagcctagccaacagcgagacccctgtctctactaaaaaatttggccaggcgtggtggctcacggctgtaatcccagcactttgggaggtgaggcgggcagatcacctgaggtcaggagttcgagacccagcctggccaacatggtgaaaccccatctctactaaaaatacaaaaattagccaggcatggtggcacattcctgtaatcccagctacacaggatgctgaggcaggagaatcacttgaacccaggaggcagaggttgtagtgagctgagatcacaccattgcacttcaacctgggtggacagagtgagactctgtctcaaaaaaaaaaaaaaatttacctggcattgtagtgcattccctatagtcggctactctggaggctgaggcaggaagatccttagagcccaagaaattgaggccgtagtaagctgtgattacaccactgcactccagcctggacaacagagcgagaccttgtctcaaatgagaaaaaaacaaaaagaaatgggagaatccagagagactaggctagatcaagcctgctgggtcctggcaggagccccagggagtagctcatctgcagacatttgcttgaggactaccccctaaacataaaggaagaatgacatccgaagggtgtggagcagccatgagctgagaactagcctggtctacctgagattgatggcaggtcctggtcaacacgtcagctctgcgtcagagtccatgcctcaagcccaagctgaagccccatccctgctgctctcccaagaactcctctgctagggcaggccccttgcccttgggtgccaggtgggacctgcctgatgggatggggtgcttggcatatacaacttgccatgaactcaaggtgaccctgggggcctcctgaattgtgatggggcctagaaccaatgtgctctgatgtgaccatattctgtgacattaccttgccctgtttactccaaagttcccagcctggtgcccagcaggcaatattgcacctacagacacatttactttggtttccaaagtgtttttagacatttgaatttgttgccaacatttaaacattgagagatttcatatttttaaaaatctggaattctggcttctcttgaaaactcagaaattctggcactatggggcttgcattcctgcatggctggagctgagttgcagctgcccctttaggcctgtactccttatttgctataggctccgtcttgtattacactaagcccatgtcacccatttggctcctgcaggcctttgggtttgagaccctggtctacacacttggagaccacctgttgtaaagtacatggatgtgctttggtcaaggaatagaccaaggtggatatccaggccagagtgactcagcgagtttaggtcacaggcgtatactccacttgttatataacctgcttgtgtaagttcatacttggctcaaagccactattgtttggaaaaggtataactgccctgctgacgctgtacagatgttcttgggctcggatgggcatggctccacgtggtgtgcactagcacccagagagagtgaagctattgacccctgtaagggagagtgaccatctggcagatagatagaggggagccaggacatggctcagcttgtgcccagagggagagttaagccgctgaccctgtagccagggagtgcacctgcaagcatgggggtggcaggagccacagagctggctgctgagaggagctgcagatctggagaagacagcctaggtaaaggtggacagtgtgagagctgctgatgagatagctgctgaataaaactacattttacctgcctatggcccgccaggttttctttcagctatcgcccatccacccagtcccctcgaacctcagcatgggctggaacctgaccctgggcatgacatttggcatagttgtggacctgacacctgtgtttgtcctagtcctgtttctccctgccttcctgttcctctcgctgccctcatggtcactcccaagagatccaacccatgttaagtatgggctggaggactgcatgaatgcctcatgatcttcccagaggcaaaggcacctactgccttccaaggtcagtgggaggttgggatcaacactgtttattatgcttaggacaaaaaagatagggagaaagatgtgcaaccttacaggtcatctttctgggatagaacacaatgggtcttctcctgcctcctggatatgttagtcaaggccagtccatgctacacatctagtctgacttctaaaatagaagcaccagatgaattcagccctgagagaattttcagcagctgtgggggcgctggaggaaacactattaaatagttttgcacctgagacagatagcctcactcgcctcaccctagtcctggtggcatttgtctcaggtgcaaaatttaagaaagaaaccttggagtgctcaccctgtggctgggtagatggtcctaaagtggtggttttcaagcctgagtgtgtatcaggatcatcaggggagcttgctaaagagcagttcctgcggtcagaccctcatgcattttgagcaggtgtggggactgggaaactgcatctgtaacctgctgtaatctaacgcttatctaaatactactgtgctcacacagagaacaccgcaaaagtagaggtgttcctccagagggcaggtgagcagatggcacagtctgcttggaattcagtcaggtgatgagagatgagatgaggcactcctagctttgggaagagggagctgaaagatgaacctttgcaggtgcccacggtcaaagtggtggtttaatgccatgccatgcccattttctgttggccttggcagggagttacagccctaccttaggacctggctccttatttctgctgtaggctctttcctgccctggccgagatggagtggaatgagacctagaaacatcaagctaaatacatgtcctcagaaagataaaggtttacattttcacccccatcaaatctgaaagctctctgcctgtgtttttctaagggatagggacatcattactcagtccacaacctggactcatgtagggtcccctgtcagtaaaggagtcagtcaagcccaccaggtataccaaggactcttaccctcagcccctactccttggaaagctgccccttggcctaatattggtgtttagcttgagcctgactccttctcaacactaagagctgatgaagtcctgaagcagaaagagctctgacctgagagtcaaacatccttattctgatctcagctcagcccctgatttgttgtgtgaccctggatatgtcacttcctgtctttttgactttttaaaatgaagggtagactagaggagagcttctaaaactttaatgtggtcaacgaaatggaataggaaattccacaagtctgtccttccacaaaagcagcaaataaggtggcaaaaactcaaatttatgggaactctggaaacgaattgaaagtttacagcaatcaggtgaatacctaagaataaaagctggatttagtaaga

SEQ ID NO: 2086 - DNA, 1859 bp, Homo sapiens
  source 1..1859: mol_type = unassigned DNA
gacggctgctgcgcccgcggctccccagtgccccgagtgccccgcgggccccgcgagcgggagtgggacccagcccctaggcagaacccaggcgccgcgcccgggacgcccgcggagagagccactcccgcccacgtcccatttcgcccctcgcgtccggagtccccgtggccaggtgtgtgtctggggaagagacttacagaagtggagttgctgagtcaaagatctaaccatgagctaccctggctatcccccgcccccaggtggctacccaccagctgcaccaggtggtggtccctggggaggtgctgcctaccctcctccgcccagcatgccccccatcgggctggataacgtggccacctatgcggggcagttcaaccaggactatctctcgggaatgctggcggctttgggcagcccccctctgcccagcagcctgttcctccctatgggatgtatccacccccaggaggaaacccaccctccaggatgccctcatatccgccataccctaccctgggcagccaccagtgacctaccctggtcagcctccagtgccactccctgggcagcagcagccagtgccgagctacccaggatacccggggtctgggactgtcacccccgctgtgcccccaacccagtttggaagccgaggcaccatcactgatgctcccggctttgaccccctgcgagatgccgaggtcctgcggaaggccatgaaaggcttcgggacggatgagcaggccatcattgactgcctggggagtcgctccaacaagcagcggcagcagatcctactttccttcaagacggcttacggcaaggatttgatcaaagatctgaaatctgaactgtcaggaaactttgagaagacaatcttggctctgatgaagaccccagtcctctttgacatttatgagataaaggaagccatcaagggggttggcactgatgaagcctgcctgattgagatcctcgcttcccgcagcaatgagcacatccgagaattaaacagagcctacaaagcagaattcaaaaagaccctggaagaggccattcgaagcgacacatcagggcacttccagcggctcctcatctctctctctcagggaaaccgtgatgaaagcacaaacgtggacatgtcactcgcccagagagatgcccaggagctgtatgcggccggggagaaccgcctgggaacagacgagtccaagttcaatgcggttctgtgctcccggagccgggcccacctggtagcagttttcaatgagtaccagagaatgacaggccgggacattgagaagagcatctgccgggagatgtccggggacctggaggagggcatgctggccgtggtgaaatgtctcaagaataccccagccttctttgcggagaggctcaacaaggccatgaggggggcaggaacaaaggaccggaccctgattcgcatcatggtgtctcgcagcgagaccgacctcctggacatcagatcagagtataagcggatgtacggcaagtcgctgtaccacgacatctcgggagatacttcaggggattaccggaagattctgctgaagatctgtggtggcaatgactgaacagtgactggtggctcacttctgcccacctgccggcaacaccagtgccaggaaaaggccaaaagaatgtctgtttctaacaaatccacaaatagccccgagattcaccgtcctagagcttaggcctgtcttccacccctcctgacccgtatagtgtgccacaggacctgggtcggtctagaactctctcaggatgccttttctaccccatccctcacagcctcttgctgctaaaatagatgtttcatttttctg

SEQ ID NO: 2087 - DNA, 610 bp, Homo sapiens
  source 1..610: mol_type = unassigned DNA
agtgaactggtctgcgacaagcagggcagatgcagcagtttcttctgcagggtcccagttgtggtggtggctgccctttcaagaagctgggtcccacgggccagcaggggctctcaggcagagcctgaatgtgctttcgtcttctcttccagatctaaccatgagctaccctggctatcccccgcccccaggtggctacccaccagctgcaccaggtggtggtccctggggaggtgctgcctaccctcctccgcccagcatgccccccatcgggctggataacgtggccacctatgcggggcagttcaaccaggactatctctcgggaatggcggccaacatgtctgggacatttggaggagccaacatgcccaacctgtaccctggggcccctggggctggctacccaccagtgccccctggcggctttgggcagcccccctctgcccagcagcctgttcctccctatgggatgtatccacccccaggaggaaacccaccctccaggatgccctcatatccgccatacccaggggcccctgtgccgggccagcccatgccaccccccggacagcagcccccaggggcctaccctgggcagccaccagtg

SEQ ID NO: 2088 - DNA, 6965 bp, Homo sapiens
  source 1..6965: mol_type = unassigned DNA
gcactgcctctggcacctggggcagccgcgcccgcggagttttccgcccggcgctgacggctgctgcgcccgcggctccccagtgccccgagtgccccgcgggccccgcgagcgggagtgggacccagcccctaggcagaacccaggcgccgcgcccgggacgcccgcggagagagccactcccgcccacgtcccatttcgcccctcgcgtccggagtccccgtggccagggattattggacctgcctggtttaaactattgtcttagttaattttgtgctgctctaacaaaatatcacagactgagtaatttataagcaatagtagcttatttggctcacagttctggaggctgagaagatcgtgaggctgcatctggcaagggccttcttgctgcttcataacatggcagaagacatcatgcgggtgtgtgtctggggaagagacttacagaagtggagttgctgagtcaaagatctaaccatgagctaccctggctatcccccgcccccaggtggctacccaccagctgcaccaggtggtggtccctggggaggtgctgcctaccctcctccgcccagcatgccccccatcgggctggataacgtggccacctatgcggggcagttcaaccaggactatctctcgggaatggcggccaacatgtctgggacatttggaggagccaacatgcccaacctgtaccctggggcccctggggctggctacccaccagtgccccctggcggctttgggcagcccccctctgcccagcagcctgttcctccctatgggatgtatccacccccaggaggaaacccaccctccaggatgccctcatatccgccatacccaggggcccctgtgccgggccagcccatgccaccccccggacagcagcccccaggggcctaccctgggcagccaccagtgacctaccctggtcagcctccagtgccactccctgggcagcagcagccagtgccgagctacccaggatacccggggtctgggactgtcacccccgctgtgcccccaacccagtttggaagccgaggcaccatcactgatgctcccggctttgaccccctgcgagatgccgaggtcctgcggaaggccatgaaaggcttcgggacggatgagcaggccatcattgactgcctggggagtcgctccaacaagcagcggcagcagatcctactttccttcaagacggcttacggcaaggatttgatcaaagatctgaaatctgaactgtcaggaaactttgagaagacaatcttggctctgatgaagaccccagtcctctttgacatttatgagataaaggaagccatcaagggggttggcactgatgaagcctgcctgattgagatcctcgcttcccgcagcaatgagcacatccgagaattaaacagagcctacaaagcagaattcaaaaagaccctggaagaggccattcgaagcgacacatcagggcacttccagcggctcctcatctctctctctcagggaaaccgtgatgaaagcacaaacgtggacatgtcactcgcccagagagatgcccaggagctgtatgcggccggggagaaccgcctgggaacagacgagtccaagttcaatgcggttctgtgctcccggagccgggcccacctggtagcagttttcaatgagtaccagagaatgacaggccgggacattgagaagagcatctgccgggagatgtccggggacctggaggagggcatgctggccgtggtgaaatgtctcaagaataccccagccttctttgcggagaggctcaacaaggccatgaggggggcaggaacaaaggaccggaccctgattcgcatcatggtgtctcgcagcgagaccgacctcctggacatcagatcagagtataagcggatgtacggcaagtcgctgtaccacgacatctcgggagatacttcaggggattaccggaagattctgctgaagatctgtggtggcaatgactgaacagtgactggtggctcacttctgcccacctgccggcaacaccagtgccaggaaaaggccaaaagaatgtctgtttctaacaaatccacaaatagccccgagattcaccgtcctagagcttaggcctgtcttccacccctcctgacccgtatagtgtgccacaggacctgggtcggtctagaactctctcaggatgccttttctaccccatccctcacagcctcttgctgctaaaatagatgtttcatttttctgactcatgcaatcattcccctttgcctgtggctaagacttggcttcatttcgtcatgtaattgtatatttttatttggaggcatattttcttttcttacagtcattgccagacagaggcatacaagtctgtttgctgcatacacatttctggtgagggcgactgggtgggtgaagcaccgtgtcctcgctgaggagagaaagggaggcgtgcctgagaaggtagcctgtgcatctggtgagtgtgtcacgagctttgttactgccaaactcactcctttttagaaaaaacaaaaaaaaagggccagaaagtcattccttccatcttccttgcagaaaccacgagaacaaagccagttccctgtcagtgacagggcttcttgtaatttgtggtatgtgccttaaacctgaatgtctgtagccaaaacttgtttccacattaagagtcagccagctctggaatggtctggaaatgtcttcctggtaccaacttgttttcttctgcttgattctgccctgtggctcagaggtctggccttatcagccagtgaaagttcatgtaaccttacgtagagatttgtgtgcaggaaaccctgagcatacactagtttgcagggactcgtaaggacatgggaagggaggttcccgaaatccaggcaggaggcccagacacctgaaaggcaaagggatcttggttggttgcaggtgcagtgaagtccactgaaggtgtggtgcgaagaatgcagtccttcacccaggtcccaggagggaagaagggtgtgtgctaattcctggtgcccctcggcgggggccagagagaaggatggggacaacccagagagtcacaagaccagtgcctcccctcagggtgcctccaggctgaaaggggctcctggctctggtctctggggaccctgtgcccgttggttggtggtgtgagggaagagaatccataagagagtttctgagaattatggtgtcatgtccagaagctagagcttaccttgcatcaggggtctccacccactccttttccaacctcctgcgttgaggtttagaaaagagagaatcgactaggcactatggctcacgcctgtaatccaaggactttgggaagctgaggtgagaggatcacttgagctcaggagttcaagactagcctagccaacagcgagacccctgtctctactaaaaaatttggccaggcgtggtggctcacggctgtaatcccagcactttgggaggtgaggcgggcagatcacctgaggtcaggagttcgagacccagcctggccaacatggtgaaaccccatctctactaaaaatacaaaaattagccaggcatggtggcacattcctgtaatcccagctacacaggatgctgaggcaggagaatcacttgaacccaggaggcagaggttgtagtgagctgagatcacaccattgcacttcaacctgggtggacagagtgagactctgtctcaaaaaaaaaaaaaaatttacctggcattgtagtgcattccctatagtcggctactctggaggctgaggcaggaagatccttagagcccaagaaattgaggccgtagtaagctgtgattacaccactgcactccagcctggacaacagagcgagaccttgtctcaaatgagaaaaaaacaaaaagaaatgggagaatccagagagactaggctagatcaagcctgctgggtcctggcaggagccccagggagtagctcatctgcagacatttgcttgaggactaccccctaaacataaaggaagaatgacatccgaagggtgtggagcagccatgagctgagaactagcctggtctacctgagattgatggcaggtcctggtcaacacgtcagctctgcgtcagagtccatgcctcaagcccaagctgaagccccatccctgctgctctcccaagaactcctctgctagggcaggccccttgcccttgggtgccaggtgggacctgcctgatgggatggggtgcttggcatatacaacttgccatgaactcaaggtgaccctgggggcctcctgaattgtgatggggcctagaaccaatgtgctctgatgtgaccatattctgtgacattaccttgccctgtttactccaaagttcccagcctggtgcccagcaggcaatattgcacctacagacacatttactttggtttccaaagtgtttttagacatttgaatttgttgccaacatttaaacattgagagatttcatatttttaaaaatctggaattctggcttctcttgaaaactcagaaattctggcactatggggcttgcattcctgcatggctggagctgagttgcagctgcccctttaggcctgtactccttatttgctataggctccgtcttgtattacactaagcccatgtcacccatttggctcctgcaggcctttgggtttgagaccctggtctacacacttggagaccacctgttgtaaagtacatggatgtgctttggtcaaggaatagaccaaggtggatatccaggccagagtgactcagcgagtttaggtcacaggcgtatactccacttgttatataacctgcttgtgtaagttcatacttggctcaaagccactattgtttggaaaaggtataactgccctgctgacgctgtacagatgttcttgggctcggatgggcatggctccacgtggtgtgcactagcacccagagagagtgaagctattgacccctgtaagggagagtgaccatctggcagatagatagaggggagccaggacatggctcagcttgtgcccagagggagagttaagccgctgaccctgtagccagggagtgcacctgcaagcatgggggtggcaggagccacagagctggctgctgagaggagctgcagatctggagaagacagcctaggtaaaggtggacagtgtgagagctgctgatgagatagctgctgaataaaactacattttacctgcctatggcccgccaggttttctttcagctatcgcccatccacccagtcccctcgaacctcagcatgggctggaacctgaccctgggcatgacatttggcatagttgtggacctgacacctgtgtttgtcctagtcctgtttctccctgccttcctgttcctctcgctgccctcatggtcactcccaagagatccaacccatgttaagtatgggctggaggactgcatgaatgcctcatgatcttcccagaggcaaaggcacctactgccttccaaggtcagtgggaggttgggatcaacactgtttattatgcttaggacaaaaaagatagggagaaagatgtgcaaccttacaggtcatctttctgggatagaacacaatgggtcttctcctgcctcctggatatgttagtcaaggccagtccatgctacacatctagtctgacttctaaaatagaagcaccagatgaattcagccctgagagaattttcagcagctgtgggggcgctggaggaaacactattaaatagttttgcacctgagacagatagcctcactcgcctcaccctagtcctggtggcatttgtctcaggtgcaaaatttaagaaagaaaccttggagtgctcaccctgtggctgggtagatggtcctaaagtggtggttttcaagcctgagtgtgtatcaggatcatcaggggagcttgctaaagagcagttcctgcggtcagaccctcatgcattttgagcaggtgtggggactgggaaactgcatctgtaacctgctgtaatctaacgcttatctaaatactactgtgctcacacagagaacaccgcaaaagtagaggtgttcctccagagggcaggtgagcagatggcacagtctgcttggaattcagtcaggtgatgagagatgagatgaggcactcctagctttgggaagagggagctgaaagatgaacctttgcaggtgcccacggtcaaagtggtggtttaatgccatgccatgcccattttctgttggccttggcagggagttacagccctaccttaggacctggctccttatttctgctgtaggctctttcctgccctggccgagatggagtggaatgagacctagaaacatcaagctaaatacatgtcctcagaaagataaaggtttacattttcacccccatcaaatctgaaagctctctgcctgtgtttttctaagggatagggacatcattactcagtccacaacctggactcatgtagggtcccctgtcagtaaaggagtcagtcaagcccaccaggtataccaaggactcttaccctcagcccctactccttggaaagctgccccttggcctaatattggtgtttagcttgagcctgactccttctcaacactaagagctgatgaagtcctgaagcagaaagagctctgacctgagagtcaaacatccttattctgatctcagctcagcccctgatttgttgtgtgaccctggatatgtcacttcctgtctttttgactttttaaaatgaagggtagactagaggagagcttctaaaactttaatgtggtcaacgaaatggaataggaaattccacaagtctgtccttccacaaaagcagcaaataaggtggcaaaaactcaaatttatgggaactctggaaacgaattgaaagtttacagcaatcaggtgaatacctaagaataaaagctggatttagtaaga

SEQ ID NO: 2089 - DNA, 1051 bp, Homo sapiens
  source 1..1051: mol_type = unassigned DNA
cgcgcccgcggagttttccgcccggcgctgacggctgctgcgcccgcggctccccagtgccccgagtgccccgcgggccccgcgagcgggagtgggacccagcccctaggcagaacccaggcgccgcgcccgggacgcccgcggagagagccactcccgcccacgtcccatttcgcccctcgcgtccggagtccccgtggccaggtgtgtgtctggggaagagacttacagaagtggagttgctgagtcaaaggaacgatgattccataccttaccaggtccccttgcctgatgaaccagaggttggagaatgaagagagacaggggcctctgacttcccctgttgctggagggatggcaataaggacacaggaagataaatagacagacctggagtcctgagaatgaggcagtgcgtctctacctctgagatctaaccatgagctaccctggctatcccccgcccccaggtggctacccaccagctgcaccaggtggtggtccctggggaggtgctgcctaccctcctccgcccagcatgccccccatcgggctggataacgtggccacctatgcggggcagttcaaccaggactatctctcgggaatggcggccaacatgtctgggacatttggaggagccaacatgcccaacctgtaccctggggcccctggggctggctacccaccagtgccccctggcggctttgggcagcccccctctgcccagcagcctgttcctccctatgggatgtatccacccccaggaggaaacccaccctccaggatgccctcatatccgccatacccaggggcccctgtgccgggccagcccatgccaccccccggacagcagcccccaggggcctaccctgggcagccaccagtgacctaccctggtcagcctccagtgccactccctgggcagcagcagccagtgccgagctacccaggatacccggggtctgggactgtcacccccgctgtgcccccaacccagtttggaagccgaggcaccatcactgatgctcccggctttgaccccctgcga

SEQ ID NO: 2090 - DNA, 750 bp, Homo sapiens
  source 1..750: mol_type = unassigned DNA
gggagaaccgcctgggaacagacgagtccaagttcaatgcggttctgtgctcccggagccgggcccacctggtagcagttttcaatgagtaccagagaatgacaggccgggacattgagaagagcatctgccgggagatgtccggggacctggaggagggcatgctggccgtggtgaaatgtctcaagaataccccagccttctttgcggagaggctcaacaaggccatgaggggggcaggaacaaaggaccggaccctgattcgcatcatggtgtctcgcagcgagaccgacctcctggacatcagatcagagtataagcggatgtacggcaagtcgctgtaccacgacatctcgagtatctcctgcatgccagcaagctatggacatctggaagaagccacatgccttgccctcaagttgcttagggtggaaggaaatgattagaaatgagccaagccgagcctgcactcttagaggagatacttcaggggattaccggaagattctgctgaagatctgtggtggcaatgactgaacagtgactggtggctcacttctgcccacctgccggcaacaccagtgccaggaaaaggccaaaagaatgtctgtttctaacaaatccacaaatagccccgagattcaccgtcctagagcttaggcctgtcttccacccctcctgacccgtatagtgtgccacaggacctgggtcggtctagaactctctcaggatgccttttctaccccatcc

SEQ ID NO: 2091 - DNA, 2602 bp, Homo sapiens
  source 1..2602: mol_type = unassigned DNA
ctctgttctctgcgctgggcatggagtggagctgtgaggccgagcccctgccctgccctgccctgccctgcccacgcaacagggactaggtttgcagggcagggcctggtatgctcacccttcactggctctcattgctttcctcattccttttatgcggcagtcaattgttggggattccaggggattaacagggcccctttcctcaaggcattctttgtgctgcaaggtgttccctgataagagaggccagggtttcacttccatcgcccaggctggagtgcaatggcgtgatctgggctcactgcaacctccacctcccaggctcaaatgattctcctgcctcagcctcctgagtagagtagctgggaccacagtcgcatgccatggtgctcggctaatttttttgtattttatttttgtaacgacagggtctcattatgttgcccaggctggtgtcaaacttctgagctcaaatgatctgcctgcgtcagcctcccaaagtgctgggattataggcatgggccactgtgcctggcctcatcttgtcattttaaagaatatatcagcagggattattggacctgcctggtttaaactattgtcttagttaattttgtgctgctctaacaaaatatcacagactgagtaatttataagcaatagtagcttatttggctcacagttctggaggctgagaagatcgtgaggctgcatctggcaagggccttcttgctgcttcataacatggcagaagacatcatgcgggtgtgtgtctggggaagagacttacagaagtggagttgctgagtcaaagatctaaccatgagctaccctggctatcccccgcccccaggtggctacccaccagctgcaccaggtggtggtccctggggaggtgctgcctaccctcctccgcccagcatgccccccatcgggctggataacgtggccacctatgcggggcagttcaaccaggactatctctcgggaatggcggccaacatgtctgggacatttggaggagccaacatgcccaacctgtaccctggggcccctggggctggctacccaccagtgccccctggcggctttgggcagcccccctctgcccagcagcctgttcctccctatgggatgtatccacccccaggaggaaacccaccctccaggatgccctcatatccgccatacccaggggcccctgtgccgggccagcccatgccaccccccggacagcagcccccaggggcctaccctgggcagccaccagtgacctaccctggtcagcctccagtgccactccctgggcagcagcagccagtgccgagctacccaggatacccggggtctgggactgtcacccccgctgtgcccccaacccagtttggaagccgaggcaccatcactgatgctcccggctttgaccccctgcgagatgccgaggtcctgcggaaggccatgaaaggcttcgggacggatgagcaggccatcattgactgcctggggagtcgctccaacaagcagcggcagcagatcctactttccttcaagacggcttacggcaaggatttgatcaaagatctgaaatctgaactgtcaggaaactttgagaagacaatcttggctctgatgaagaccccagtcctctttgacatttatgagataaaggaagccatcaagggggttggcactgatgaagcctgcctgattgagatcctcgcttcccgcagcaatgagcacatccgagaattaaacagagcctacaaagcagaattcaaaaagaccctggaagaggccattcgaagcgacacatcagggcacttccagcggctcctcatctctctctctcagggaaaccgtgatgaaagcacaaacgtggacatgtcactcgcccagagagatgcccaggagctgtatgcggccggggagaaccgcctgggaacagacgagtccaagttcaatgcggttctgtgctcccggagccgggcccacctggtagcagttttcaatgagtaccagagaatgacaggccgggacattgagaagagcatctgccgggagatgtccggggacctggaggagggcatgctggccgtggtgaaatgtctcaagaataccccagccttctttgcggagaggctcaacaaggccatgaggggggcaggaacaaaggaccggaccctgattcgcatcatggtgtctcgcagcgagaccgacctcctggacatcagatcagagtataagcggatgtacggcaagtcgctgtaccacgacatctcgggagatacttcaggggattaccggaagattctgctgaagatctgtggtggcaatgactgaacagtgactggtggctcacttctgcccacctgccggcaacaccagtgccaggaaaaggccaaaagaatgtctgtttctaacaaatccacaaatagccccgagattcaccgtcctagagcttaggcctgtcttccacccctcctgacccgtatagtgtgccacaggacctgggtcggtctagaactctctcaggatgccttttctaccccatccctcacagcctcttgctgctaaaatagatgtttcatttttctgactc

SEQ ID NO: 2092 - DNA, 2155 bp, Homo sapiens
  source 1..2155: mol_type = unassigned DNA
acctggggcagccgcgcccgcggagttttccgcccggcgctgacggctgctgcgcccgcggctccccagtgccccgagtgccccgcgggccccgcgagcgggagtgggacccagcccctaggcagaacccaggcgccgcgcccgggacgcccgcggagagagccactcccgcccacgtcccatttcgcccctcgcgtccggagtccccgtggccaggtgtgtgtctggggaagagacttacagaagtggagttgctgagtcaaagatctaaccatgagctaccctggctatcccccgcccccaggtggctacccaccagctgcaccaggttggctggcactggcctgggttctctctctatagtagaaatcctgccatccagatcctgccactgccacctttgctagcacagctgagcagcctctgagcagcaagagaggaggaggcaggaaatttagggaaggttcttcctggagggtctggagccctggagatgaagagccgatccgaagctgccatgtagaggaaagcatctaacaggccagaggccccatgatgatgtcgaatgcccatcgggcacccagctgagccctgcaggtggtggtccctggggaggtgctgcctaccctcctccgcccagcatgccccccatcgggctggataacgtggccacctatgcggggcagttcaaccaggactatctctcgggaatggcggccaacatgtctgggacatttggaggagccaacatgcccaacctgtaccctggggcccctggggctggctacccaccagtgccccctggcggctttgggcagcccccctctgcccagcagcctgttcctccctatgggatgtatccacccccaggaggaaacccaccctccaggatgccctcatatccgccatacccaggggcccctgtgccgggccagcccatgccaccccccggacagcagcccccaggggcctaccctgggcagccaccagtgacctaccctggtcagcctccagtgccactccctgggcagcagcagccagtgccgagctacccaggatacccggggtctgggactgtcacccccgctgtgcccccaacccagtttggaagccgaggcaccatcactgatgctcccggctttgaccccctgcgagatgccgaggtcctgcggaaggccatgaaaggcttcgggacggatgagcaggccatcattgactgcctggggagtcgctccaacaagcagcggcagcagatcctactttccttcaagacggcttacggcaaggatttgatcaaagatctgaaatctgaactgtcaggaaactttgagaagacaatcttggctctgatgaagaccccagtcctctttgacatttatgagataaaggaagccatcaagggggttggcactgatgaagcctgcctgattgagatcctcgcttcccgcagcaatgagcacatccgagaattaaacagagcctacaaagcagaattcaaaaagaccctggaagaggccattcgaagcgacacatcagggcacttccagcggctcctcatctctctctctcagggaaaccgtgatgaaagcacaaacgtggacatgtcactcgcccagagagatgcccaggagctgtatgcggccggggagaaccgcctgggaacagacgagtccaagttcaatgcggttctgtgctcccggagccgggcccacctggtagcagttttcaatgagtaccagagaatgacaggccgggacattgagaagagcatctgccgggagatgtccggggacctggaggagggcatgctggccgtggtgaaatgtctcaagaataccccagccttctttgcggagaggctcaacaaggccatgaggggggcaggaacaaaggaccggaccctgattcgcatcatggtgtctcgcagcgagaccgacctcctggacatcagatcagagtataagcggatgtacggcaagtcgctgtaccacgacatctcgggagatacttcaggggattaccggaagattctgctgaagatctgtggtggcaatgactgaacagtgactggtggctcacttctgcccacctgccggcaacaccagtgccaggaaaaggccaaaagaatgtctgtttctaacaaatccacaaatag

SEQ ID NO: 2093 - DNA, 1444 bp, Homo sapiens
  source 1..1444: mol_type = unassigned DNA
ctcagcatttggggacgctctcagctctcggcgcacggcccaggtaagcggggcgcgccctgcccgcccgcgatgggccgccagctagcggggtgtggagacgctgggaagaaggcttccttcaaaatgtctactgttcacgaaatcctgtgcaagctcagcttggagggtgatcactctacacccccaagtgcatatgggtctgtcaaagcctatactaactttgatgctgagcgggatgctttgaacattgaaacagccatcaagaccaaaggtgtggatgaggtcaccattgtcaacattttgaccaaccgcagcaatgcacagagacaggatattgccttcgcctaccagagaaggaccaaaaaggaacttgcatcagcactgaagtcagccttatctggccacctggagacggtgattttgggcctattgaagacacctgctcagtatgacgcttctgagctaaaagcttccatgaaggggctgggaaccgacgaggactctctcattgagatcatctgctccagaaccaaccaggagctgcaggaaattaacagagtctacaaggaaatgtacaagactgatctggagaaggacattatttcggacacatctggtgacttccgcaagctgatggttgccctggcaaagggtagaagagcagaggatggctctgtcattgattatgaactgattgaccaagatgctcgggatctctatgacgctggagtgaagaggaaaggaactgatgttcccaagtggatcagcatcatgaccgagcggagcgtgccccacctccagaaagtatttgataggtacaagagttacagcccttatgacatgttggaaagcatcaggaaagaggttaaaggagacctggaaaatgctttcctgaacctggttcagtgcattcagaacaagcccctgtattttgctgatcggctgtatgactccatgaagggcaaggggacgcgagataaggtcctgatcagaatcatggtctcccgcagtgaagtggacatgttgaaaattaggtctgaattcaagagaaagtacggcaagtccctgtactattatatccagcaagacactaagggcgactaccagaaagcgctgctgtacctgtgtggtggagatgactgaagcccgacacggcctgagcgtccagaaatggtgctcaccatgcttccagctaacaggtctagaaaaccagcttgcgaataacagtccccgtggccatccctgtgagggtgacgttagcattacccccaacctcattttagttgcctaagcattgcctggccttcctgtctagtctctcctgtaagccaaagaaatgaacattccaaggagttggaagtgaagtctatgatgtgaaacactttgcctcctgtgtactgtgtcataaacagatgaataaactgaatttgtactttagaaa

SEQ ID NO: 2094 - DNA, 1676 bp, Homo sapiens
  source 1..1676: mol_type = unassigned DNA
gctcagcatttggggacgctctcagctctcggcgcacggcccagggtgaaaatgtttgccattaaactcacatgaagtaggaaatatttatatggatacaaaaggcacctgcatgggataatgtcaaatttcatagatactgctttgtgcttccttcaaaatgtctactgttcacgaaatcctgtgcaagctcagcttggagggtgatcactctacacccccaagtgcatatgggtctgtcaaagcctatactaactttgatgctgagcgggatgctttgaacattgaaacagccatcaagaccaaaggtgtggatgaggtcaccattgtcaacattttgaccaaccgcagcaatgcacagagacaggatattgccttcgcctaccagagaaggaccaaaaaggaacttgcatcagcactgaagtcagccttatctggccacctggagacggtgattttgggcctattgaagacacctgctcagtatgacgcttctgagctaaaagcttccatgaaggggctgggaaccgacgaggactctctcattgagatcatctgctccagaaccaaccaggagctgcaggaaattaacagagtctacaaggaaatgtacaagactgatctggagaaggacattatttcggacacatctggtgacttccgcaagctgatggttgccctggcaaagggtagaagagcagaggatggctctgtcattgattatgaactgattgaccaagatgctcgggatctctatgacgctggagtgaagaggaaaggaactgatgttcccaagtggatcagcatcatgaccgagcggagcgtgccccacctccagaaagtatttgataggtacaagagttacagcccttatgacatgttggaaagcatcaggaaagaggttaaaggagacctggaaaatgctttcctgaacctggttcagtgcattcagaacaagcccctgtattttgctgatcggctgtatgactccatgaagggcaaggggacgcgagataaggtcctgatcagaatcatggtctcccgcagtgaagtggacatgttgaaaattaggtctgaattcaagagaaagtacggcaagtccctgtactattatatccagcaagacactaagggcgactaccagaaagcgctgctgtacctgtgtggtggagatgactgaagcccgacacggcctgagcgtccagaaatggtgctcaccatgcttccagctaacaggtctagaaaaccagcttgcgaataacagtccccgtggccatccctgtgagggtgacgttagcattacccccaacctcattttagttgcctaagcattgcctggccttcctgtctagtctctcctgtaagccaaagaaatgaacattccaaggagttggaagtgaagtctatgatgtgaaacactttgcctcctgtgtactgtgtcataaacagatgaataaactgaatttgtactttagaaacacgtactttgtggccctgctttcaactgaattgtttgaaaattaaacgtgcttggggttcagctggtgaggctgtccctgtaggaagaaagctctgggactgagctgtacagtatggttgcccctatccaagtgtcgctatttaagttaaatttaaatgaaataaaataaaataaaatcagttcctgagtcacacaa

SEQ ID NO: 2095 - DNA, 1444 bp, Homo sapiens
  source 1..1444: mol_type = unassigned DNA
gctcagcatttggggacgctctcagctctcggcgcacggcccaggttatcttgtagcatagcaacttcggatttcactctacccggagagtttcccgcttggttgaacacattggcctcaggaagcttccttcaaaatgtctactgttcacgaaatcctgtgcaagctcagcttggagggtgatcactctacacccccaagtgcatatgggtctgtcaaagcctatactaactttgatgctgagcgggatgctttgaacattgaaacagccatcaagaccaaaggtgtggatgaggtcaccattgtcaacattttgaccaaccgcagcaatgcacagagacaggatattgccttcgcctaccagagaaggaccaaaaaggaacttgcatcagcactgaagtcagccttatctggccacctggagacggtgattttgggcctattgaagacacctgctcagtatgacgcttctgagctaaaagcttccatgaaggggctgggaaccgacgaggactctctcattgagatcatctgctccagaaccaaccaggagctgcaggaaattaacagagtctacaaggaaatgtacaagactgatctggagaaggacattatttcggacacatctggtgacttccgcaagctgatggttgccctggcaaagggtagaagagcagaggatggctctgtcattgattatgaactgattgaccaagatgctcgggatctctatgacgctggagtgaagaggaaaggaactgatgttcccaagtggatcagcatcatgaccgagcggagcgtgccccacctccagaaagtatttgataggtacaagagttacagcccttatgacatgttggaaagcatcaggaaagaggttaaaggagacctggaaaatgctttcctgaacctggttcagtgcattcagaacaagcccctgtattttgctgatcggctgtatgactccatgaagggcaaggggacgcgagataaggtcctgatcagaatcatggtctcccgcagtgaagtggacatgttgaaaattaggtctgaattcaagagaaagtacggcaagtccctgtactattatatccagcaagacactaagggcgactaccagaaagcgctgctgtacctgtgtggtggagatgactgaagcccgacacggcctgagcgtccagaaatggtgctcaccatgcttccagctaacaggtctagaaaaccagcttgcgaataacagtccccgtggccatccctgtgagggtgacgttagcattacccccaacctcattttagttgcctaagcattgcctggccttcctgtctagtctctcctgtaagccaaagaaatgaacattccaaggagttggaagtgaagtctatgatgtgaaacactttgcctcctgtgtactgtgtcataaacagatgaataaactgaatttgt

SEQ ID NO: 2096 - DNA, 1435 bp, Homo sapiens
  source 1..1435: mol_type = unassigned DNA
gcctcgcctagggaggatgtggcgggtataaaagccccacccaggccagccggctctgctcagcatttggggacgctctcagctctcggcgcacggcccagcttccttcaaaatgtctactgttcacgaaatcctgtgcaagctcagcttggagggtgatcactctacacccccaagtgcatatgggtctgtcaaagcctatactaactttgatgctgagcgggatgctttgaacattgaaacagccatcaagaccaaaggtgtggatgaggtcaccattgtcaacattttgaccaaccgcagcaatgcacagagacaggatattgccttcgcctaccagagaaggaccaaaaaggaacttgcatcagcactgaagtcagccttatctggccacctggagacggtgattttgggcctattgaagacacctgctcagtatgacgcttctgagctaaaagcttccatgaaggggctgggaaccgacgaggactctctcattgagatcatctgctccagaaccaaccaggagctgcaggaaattaacagagtctacaaggaaatgtacaagactgatctggagaaggacattatttcggacacatctggtgacttccgcaagctgatggttgccctggcaaagggtagaagagcagaggatggctctgtcattgattatgaactgattgaccaagatgctcgggatctctatgacgctggagtgaagaggaaaggaactgatgttcccaagtggatcagcatcatgaccgagcggagcgtgccccacctccagaaagtatttgataggtacaagagttacagcccttatgacatgttggaaagcatcaggaaagaggttaaaggagacctggaaaatgctttcctgaacctggttcagtgcattcagaacaagcccctgtattttgctgatcggctgtatgactccatgaagggcaaggggacgcgagataaggtcctgatcagaatcatggtctcccgcagtgaagtggacatgttgaaaattaggtctgaattcaagagaaagtacggcaagtccctgtactattatatccagcaagacactaagggcgactaccagaaagcgctgctgtacctgtgtggtggagatgactgaagcccgacacggcctgagcgtccagaaatggtgctcaccatgcttccagctaacaggtctagaaaaccagcttgcgaataacagtccccgtggccatccctgtgagggtgacgttagcattacccccaacctcattttagttgcctaagcattgcctggccttcctgtctagtctctcctgtaagccaaagaaatgaacattccaaggagttggaagtgaagtctatgatgtgaaacactttgcctcctgtgtactgtgtcataaacagatgaataaactgaatttgtactttagaaacacgt

SEQ ID NO: 2097 - DNA, 369 bp, Homo sapiens
  source 1..369: mol_type = unassigned DNA
attccagcaggaaaacaggatggaggaaggtacaaagcatgaatgagcctggcctgtccagcagtggcacatggagcggtgaagagtgaagatgtgggggaatgaggctgcccagcttccttcaaaatgtctactgttcacgaaatcctgtgcaagctcagcttggagggtgatcactctacacccccaagtgcatatgggtctgtcaaagcctatactaactttgatgctgagcgggatgctttgaacattgaaacagccatcaagaccaaaggtgtggatgaggtcaccattgtcaacattttgaccaaccgcagcaatgcacagagacaggatattgccttcgcctaccagagaaggaccaaaaag

SEQ ID NO: 2098 - DNA, 812 bp, Homo sapiens
  source 1..812: mol_type = unassigned DNA
gctcagcatttggggacgctctcagctctcggcgcacggcccaggttatcttgtagcatagcaacttcggatttcactctacccggagagtttcccgcttggttgaacacattggcctcaggaagagacgctcttctggctcttccgtgacgcattacaacagccatccaggccggtccagttacgctgcattccttcctccttcccatttcggcggacctgcatccagctagagactagcagattgaatcgatattcattaagttaggaatgcttccttcaaaatgtctactgttcacgaaatcctgtgcaagctcagcttggagggtgatcactctacacccccaagtgcatatgggtctgtcaaagcctatactaactttgatgctgagcgggatgctttgaacattgaaacagccatcaagaccaaaggtgtggatgaggtcaccattgtcaacattttgaccaaccgcagcaatgcacagagacaggatattgccttcgcctaccagagaaggaccaaaaaggaacttgcatcagcactgaagtcagccttatctggccacctggagacggtgattttgggcctattgaagacacctgctcagtatgacgcttctgagctaaaagcttccatgaaggggctgggaaccgacgaggactctctcattgagatcatctgctccagaaccaaccaggagctgcaggaaattaacagagtctacaaggaaatgtacaagactgatctggagaaggacattatttcggacacatctggtgacttccgcaagctgatggttgccctggcaaag

SEQ ID NO: 2099 - DNA, 557 bp, Homo sapiens
  source 1..557: mol_type = unassigned DNA
ctgctcagcatttggggacgctctcagctctcggcgcacggcccaggttatcttgtagcatagcaacttcggatttcactctacccggagagtttcccgcttggttgaacacattggcctcaggaagagacgctcttctggctcttccgtgacgcattacaacagccatccaggccggtccagttacgctgcattccttcctccttcccatttcggcggacctgcatccagctagagactagcagattgaatcgatattcattaagttaggaatggttggtggtcctaagagcctcagcaaccgagaggagtcttgttatttaaaaaacaacgatactgggcgtggtcgtgggcctgtagtcccagctgctcaagctagtggatctcttgagtccaaggccaatcttccttcaaaatgtctactgttcacgaaatcctgtgcaagctcagcttggagggtgatcactctacacccccaagtgcatatgggtctgtcaaagcctatactaactttgatgctgagcgggatgctttgaacattgaaacagccatcaaga

SEQ ID NO: 2100 - DNA, 513 bp, Homo sapiens
  source 1..513: mol_type = unassigned DNA
gctcagcatttggggacgctctcagctctcggcgcacggcccagagacgctcttctggctcttccgtgacgcattacaacagccatccaggccggtccacttccttcaaaatgtctactgttcacgaaatcctgtgcaagctcagcttggagggtgatcactctacacccccaagtgcatatgggtctgtcaaagcctatactaactttgatgctgagcgggatgctttgaacattgaaacagccatcaagaccaaaggtgtggatgaggtcaccattgtcaacattttgaccaaccgcagcaatgcacagagacaggatattgccttcgcctaccagagaaggaccaaaaaggaacttgcatcagcactgaagtcagccttatctggccacctggagacggtgattttgggcctattgaagacacctgctcagtatgacgcttctgagctaaaagcttccatgaaggggctgggaaccgacgaggactctctcattgagatcatctgctcca

SEQ ID NO: 2101 - DNA, 560 bp, Homo sapiens
  source 1..560: mol_type = unassigned DNA
actctcagtgtgtcacagaggcacgaagggaagagagctcaaagggtgaaaatgtttgccattaaactcacatgaagtaggaaatatttatatggatacaaaaggcacctgcatgggataatgtcaaatttcatagatactgctttgtgcttccttcaaaatgtctactgttcacgaaatcctgtgcaagctcagcttggagggtgatcactctacacccccaagtgcatatgggtctgtcaaagcctatactaactttgatgctgagcgggatgctttgaacattgaaacagccatcaagaccaaaggtgtggatgaggtcaccattgtcaacattttgaccaaccgcagcaatgcacagagacaggatattgccttcgcctaccagagaaggaccaaaaaggaacttgcatcagcactgaagtcagccttatctggccacctggagacggtgattttgggcctattgaagacacctgctcagtatgacgcttctgagctaaaagcttccatgaaggggctgggaaccgacgaggactctctcattgagatcatctgct

SEQ ID NO: 2102 - DNA, 669 bp, Homo sapiens
  source 1..669: mol_type = unassigned DNA
gaagggaagagagctcaaaggtcctgcagggtggaagtctgcatttcacagttttataagtgtcttttgtatcctttaatatagtgcaggctcagcgtatgcttgggtgaaaatgtttgccattaaactcacatgaagtaggaaatatttatatggatacaaaaggcacctgcatgggataatgtcaaatttcatagatactgctttgtgcttccttcaaaatgtctactgttcacgaaatcctgtgcaagctcagcttggagggtgatcactctacacccccaagtgcatatgggtctgtcaaagcctatactaactttgatgctgagcgggatgctttgaacattgaaacagccatcaagaccaaaggtgtggatgaggtcaccattgtcaacattttgaccaaccgcagcaatgcacagagacaggatattgccttcgcctaccagagaaggaccaaaaaggaacttgcatcagcactgaagtcagccttatctggccacctggagacggtgattttgggcctattgaagacacctgctcagtatgacgcttctgagctaaaagcttccatgaaggggctgggaaccgacgaggactctctcattgagatcatctgctccagaaccaaccaggagctgcaggaaattaacagagtctacaaggaaa

SEQ ID NO: 2103 - DNA, 521 bp, Homo sapiens
  source 1..521: mol_type = unassigned DNA
gctcagcatttggggacgctctcagctctcggcgcacggcccagagacgctcttctggctcttccgtgacgcattacaacagccatccaggccggtccagttacgctgcattccttcctccttcccatttcggcggacctgcatccagctagagactagcagattgaatcgatattcattaagttaggaatgatggagcctggctctgtcacccagcctggagtgtagtcgcacgatctctcctcactgtagcctccgcctcccaggttcaagtgattctccagcctcaccctcccgagtagctgggattacagcttccttcaaaatgtctactgttcacgaaatcctgtgcaagctcagcttggagggtgatcactctacacccccaagtgcatatgggtctgtcaaagcctatactaactttgatgctgagcgggatgctttgaacattgaaacagccatcaagaccaaaggtgtggatgaggtcaccattgtcaacattttgaccaaccgcagcaatg

SEQ ID NO: 2104 - DNA, 755 bp, Homo sapiens
  source 1..755: mol_type = unassigned DNA
tttggggacgctctcagctctcggcgcacggcccaggttatcttgtagcatagcaacttcggatttcactctacccggagagtttcccgcttggttgaacacattggcctcaggaagagacgctcttctggctcttccgtgacgcattacaacagccatccaggccggtccagttacgctgcattccttcctccttcccatttcggcggacctgcatccagctagagactagcagattgaatcgatattcattaagttaggaatgatggagcctggctctgtcacccagcctggagtgtagtcgcacgatctctcctcactgtagcctccgcctcccaggttcaagtgattctccagcctcaccctcccgagtagctgggattacagcttccttcaaaatgtctactgttcacgaaatcctgtgcaagctcagcttggagggtgatcactctacacccccaagtgcatatgggtctgtcaaagcctatactaactttgatgctgagcgggatgctttgaacattgaaacagccatcaagaccaaaggtgtggatgaggtcaccattgtcaacattttgaccaaccgcagcaatgcacagagacaggatattgccttcgcctaccagagaaggaccaaaaaggaacttgcatcagcactgaagtcagccttatctggccacctggagacggtgattttgggcctattgaagacacctgctcagtatgacgcttctgagctaaaagcttccatgaag

SEQ ID NO: 2105 - DNA, 878 bp, Homo sapiens
  source 1..878: mol_type = unassigned DNA
actgcctgctacgaggccgcgcagagatgccccaggcgcggagagaagcggagcacagccgtgctagggacaggggcgccaccctgggcgggactgagcttccttcaaaatgtctactgttcacgaaatcctgtgcaagctcagcttggagggtgatcactctacacccccaagtgcatatgggtctgtcaaagcctatactaactttgatgctgagcgggatgctttgaacattgaaacagccatcaagaccaaaggtgtggatgaggtcaccattgtcaacattttgaccaaccgcagcaatgcacagagacaggatattgccttcgcctaccagagaaggaccaaaaaggaacttgcatcagcactgaagtcagccttatctggccacctggagacggtgattttgggcctattgaagacacctgctcagtatgacgcttctgagctaaaagcttccatgaaggggctgggaaccgacgaggactctctcattgagatcatctgctccagaaccaaccaggagctgcaggaaattaacagagtctacaaggaaatgtacaagactgatctggagaaggacattatttcggacacatctggtgacttccgcaagctgatggttgccctggcaaagggtagaagagcagaggatggctctgtcattgattatgaactgattgaccaagatgctcgggatctctatgacgctggagtgaagaggaaaggaactgatgttcccaagtggatcagcatcatgaccgagcggagcgtgccccacctccagaaagtatttgataggtacaagagttacagcccttatgacatgttggaaagcatcaggaaagaggttaaaggagacctggaaaatgctttcc

SEQ ID NO: 2106 - DNA, 558 bp, Homo sapiens
  source 1..558: mol_type = unassigned DNA
tcagcatttggggacgctctcagctctcggcgcacggcccagagacgctcttctggctcttccgtgacgcattacaacagccatccaggccggtccagttacgctgcattccttcctccttcccatttcggcggacctgcatccagctagagactagcagattgaatcgatattcattaagttaggaatgcttccttcaaaatgtctactgttcacgaaatcctgtgcaagctcagcttggagggtgatcactctacacccccaagtgcatatgggtctgtcaaagcctatactaactttgatgctgagcgggatgctttgaacattgaaacagccatcaagaccaaaggtgtggatgaggtcaccattgtcaacattttgaccaaccgcagcaatgcacagagacaggatattgccttcgcctaccagagaaggaccaaaaaggaacttgcatcagcactgaagtcagccttatctggccacctggagacggtgattttgggcctattgaagacacctgctcagtatgacgcttctgagctaaaagcttccatgaag

SEQ ID NO: 2107 - DNA, 718 bp, Homo sapiens
  source 1..718: mol_type = unassigned DNA
ctctcagctctcggcgcacggcccaggtaagcggggcgcgccctgcccgcccgcgatgggccgccagctagcggggtgtggagacgctgggaagaagggttatcttgtagcatagcaacttcggatttcactctacccggagagtttcccgcttggttgaacacattggcctcaggaagcttccttcaaaatgtctactgttcacgaaatcctgtgcaagctcagcttggagggtgatcactctacacccccaagtgcatatgggtctgtcaaagcctatactaactttgatgctgagcgggatgctttgaacattgaaacagccatcaagaccaaaggtgtggatgaggtcaccattgtcaacattttgaccaaccgcagcaatgcacagagacaggatattgccttcgcctaccagagaaggaccaaaaaggaacttgcatcagcactgaagtcagccttatctggccacctggagacggtgattttgggcctattgaagacacctgctcagtatgacgcttctgagctaaaagcttccatgaaggggctgggaaccgacgaggactctctcattgagatcatctgctccagaaccaaccaggagctgcaggaaattaacagagtctacaaggaaatgtacaagactgatctggagaaggacattatttcggacacatctggtgacttccgcaagctgatggttgccctggcaaag

SEQ ID NO: 2108 - DNA, 779 bp, Homo sapiens
  source 1..779: mol_type = unassigned DNA
aggttatcttgtagcatagcaacttcggatttcactctacccggagagtttcccgcttggttgaacacattggcctcaggaaggtacttccttcaaaatgtctactgttcacgaaatcctgtgcaagctcagcttggagggtgatcactctacacccccaagtgcatatgggtctgtcaaagcctatactaactttgatgctgagcgggatgctttgaacattgaaacagccatcaagaccaaaggtgtggatgaggtcaccattgtcaacattttgaccaaccgcagcaatgcacagagacaggatattgccttcgcctaccagagaaggaccaaaaaggaacttgcatcagcactgaagtcagccttatctggccacctggagacggtgattttgggcctattgaagacacctgctcagtatgacgcttctgagctaaaagcttccatgaaggggctgggaaccgacgaggactctctcattgagatcatctgctccagaaccaaccaggagctgcaggaaattaacagagtctacaaggaaatgtacaagactgatctggagaaggacattatttcggacacatctggtgacttccgcaagctgatggttgccctggcaaagggtagaagagcagaggatggctctgtcattgattatgaactgattgaccaagatgctcgggatctctatgacgctggagtgaagaggaaaggaactgatgttcccaagtggatcagcatcatgaccgagcggagcgtgccccacctccagaaag

SEQ ID NO: 2109 - DNA, 594 bp, Homo sapiens
  source 1..594: mol_type = unassigned DNA
atggctgtgatctttctctctgtgtcttaatcacttggaataaagaaccattgtgcttccttcaaaatgtctactgttcacgaaatcctgtgcaagctcagcttggagggtgatcactctacacccccaagtgcatatgggtctgtcaaagcctatactaactttgatgctgagcgggatgctttgaacattgaaacagccatcaagaccaaaggtgtggatgaggtcaccattgtcaacattttgaccaaccgcagcaatgcacagagacaggatattgccttcgcctaccagagaaggaccaaaaaggaacttgcatcagcactgaagtcagccttatctggccacctggagacggtgattttgggcctattgaagacacctgctcagtatgacgcttctgagctaaaagcttccatgaaggggctgggaaccgacgaggactctctcattgagatcatctgctccagaaccaaccaggagctgcaggaaattaacagagtctacaaggaaatgtacaagactgatctggagaaggacattatttcggacacatctggtgacttccgcaagctgatggttgccctggcaaag

SEQ ID NO: 2110 - DNA, 663 bp, Homo sapiens
  source 1..663: mol_type = unassigned DNA
gctcagcatttggggacgctctcagctctcggcgcacggcccagagacgctcttctggctcttccgtgacgcattacaacagccatccaggccggtccagttacgctgcattccttcctccttcccatttcggcggacctgcatccagctagagactagcagattgaatcgatattcattaagttaggaatggttggtggtcctaagagcctcagcaaccgagaggagtcttgttatttaaaaaacaacgatactgggcgtggtcgtgggcctgtagtcccagctgctcaagctagtggatctcttgagtccaaggccaatcttccttcaaaatgtctactgttcacgaaatcctgtgcaagctcagcttggagggtgatcactctacacccccaagtgcatatgggtctgtcaaagcctatactaactttgatgctgagcgggatgctttgaacattgaaacagccatcaagaccaaaggtgtggatgaggtcaccattgtcaacattttgaccaaccgcagcaatgcacagagacaggatattgccttcgcctaccagagaaggaccaaaaaggaacttgcatcagcactgaagtcagccttatctggccacctggagacggtgattttgggcctattgaagacacctgctcagtatgacg

SEQ ID NO: 2111 - DNA, 1657 bp, Homo sapiens
  source 1..1657: mol_type = unassigned DNA
attgcagtacatttgagaaagtaaaggtgtagtggaaaccgagagcgaaatgagggcgtagggagaaaagggtggggaagcttagagaccggtgagggagcagagctggggcgcctgtgtacagggatagagcccggcggcagcagggcgcggcttccctttcccggggcctggggccgcaatcaggtggagtcgagaggccggaggaggggcaggaggaaggggtgcggtcgcgatccggacccggagccagcgcggagcacctgcgcccgcggctgacaccttcgctcgcagtttgttcgcagtttactcgcacaccagtttcccccaccgcgctttggattagtgtgatctcagctcaaggcaaaggtgggatatcatggcatctatctgggttggacaccgaggaacagtaagagattatccagactttagcccatcagtggatgctgaagctattcagaaagcaatcagaggaattggaactgatgagaaaatgctcatcagcattctgactgagaggtcaaatgcacagcggcagctgattgttaaggaatatcaagcagcatatggaaaggagctgaaagatgacttgaagggtgatctctctggccactttgagcatctcatggtggccctagtgactccaccagcagtctttgatgcaaagcagctaaagaaatccatgaagggcgcgggaacaaacgaagatgccttgattgaaatcttaactaccaggacaagcaggcaaatgaaggatatctctcaagcctattatacagtatacaagaagagtcttggagatgacattagttccgaaacatctggtgacttccggaaagctctgttgactttggcagatggcagaagagatgaaagtctgaaagtggatgagcatctggccaaacaagatgcccagattctctataaagctggtgagaacagatggggcacggatgaagacaaattcactgagatcctgtgtttaaggagctttcctcaattaaaactaacatttgatgaatacagaaatatcagccaaaaggacattgtggacagcataaaaggagaattatctgggcattttgaagacttactgttggccatagttaattgtgtgaggaacacgccggcctttttagccgaaagactgcatcgagccttgaagggtattggaactgatgagtttactctgaaccgaataatggtgtccagatcagaaattgaccttttggacattcgaacagagttcaagaagcattatggctattccctatattcagcaattaaatcggatacttctggagactatgaaatcacactcttaaaaatctgtggtggagatgactgaaccaagaagataatctccaaaggtccacgatgggctttcccaacagctccaccttacttcttctcatactatttaagagaacaagcaaatataaacagcaacttgtgttcctaacaggaattttcattgttctataacaacaacaacaaaagcgattattattttagagcatctcatttataatgtagcagctcataaatgaaattgaaaatggtattaaagatctgcaactactatccaacttatatttctgctttcaaagttaagaatctttatagttctactccattaaatataaagcaagat

SEQ ID NO: 2112 - DNA, 567 bp, Homo sapiens
  source 1..567: mol_type = unassigned DNA
cctcctcaaagagcagatgtgtctttataacagactgtaggcttggagccttgtaaaatgtacatggagtttcacaatcaagcacaaggaatccaactgaaggcagctaaactttgtgttgatttgattagtgtgatctcagctcaaggcaaaggtgggatatcatggcatctatctgggttggacaccgaggaacagtaagagattatccagactttagcccatcagtggatgctgaagctattcagaaagcaatcagaggaattggaactgatgagaaaatgctcatcagcattctgactgagaggtcaaatgcacagcggcagctgattgttaaggaatatcaagcagcatatggaaaggagctgaaagatgacttgaagggtgatctctctggccactttgagcatctcatggtggccctagtgactccaccagcagtctttgatgcaaagcagctaaagaaatccatgaagggcgcgggaacaaacgaagatgccttgattgaaatcttaactaccaggacaagcaggcaaatgaaggatatctctcaagcctattatacag

SEQ ID NO: 2113 - DNA, 545 bp, Homo sapiens
  source 1..545: mol_type = unassigned DNA
actcgcacaccagtttcccccaccgcgctttggctagcagcgtaagggatccacttagccatctcggcctccccagtcctaaaggtctaggggacagaaaaaagctgggagtcggaaggttcctcgggtccccggcatggcagacggggctggctcagaggtctgctctgtggacttggaatcgcacccatcctattagtgtgatctcagctcaaggcaaaggtgggatatcatggcatctatctgggttggacaccgaggaacagtaagagattatccagactttagcccatcagtggatgctgaagctattcagaaagcaatcagaggaattggaactgatgagaaaatgctcatcagcattctgactgagaggtcaaatgcacagcggcagctgattgttaaggaatatcaagcagcatatggaaaggagctgaaagatgacttgaagggtgatctctctggccactttgagcatctcatggtggccctagtgactccaccagcagtctttgatgcaaagcagctaaagaaatccatgaagg

SEQ ID NO: 2114 - DNA, 880 bp, Homo sapiens
  source 1..880: mol_type = unassigned DNA
ctcgaccctgggcagggctggcggctggcgcccgcgcccggccccaacccagctgcgtgggtggggagctggagggacctcagtcctgcatttcagagtcgaggagactgggcccacgggggggaaagtgccgtgccatgggtgggtcacccaggtcttggtggggcccaagctgatactcagctgtcctcgctccctgaaagcttcgcttattacagctagcagcgtaagggatccacttagccatctcggcctccccagtcctaaaggtctaggggacagaaaaaagctgggagtcggaaggttcctcgggtccccggcatggcagacggggctggctcagaggtctgctctgtggacttggaatcgcacccatcctattagtgtgatctcagctcaaggcaaaggtgggatatcatggcatctatctgggttggacaccgaggaacagtaagagattatccagactttagcccatcagtggatgctgaagctattcagaaagcaatcagaggaattggaactgatgagaaaatgctcatcagcattctgactgagaggtcaaatgcacagcggcagctgattgttaaggaatatcaagcagcatatggaaaggagctgaaagatgacttgaagggtgatctctctggccactttgagcatctcatggtggccctagtgactccaccagcagtctttgatgcaaagcagctaaagaaatccatgaagggcgcgggaacaaacgaagatgccttgattgaaatcttaactaccaggacaagcaggcaaatgaaggatatctctcaagcctattatacagtatacaagaagagtcttggagatgacattagttccgaaacatctggtgacttccggaaag

SEQ ID NO: 2115 - DNA, 2163 bp, Homo sapiens
  source 1..2163: mol_type = unassigned DNA
gcgcggccgtcccggcccggggccccaggtgcgcttcccctagagagggattttccggtctcgtgggcagaggaacaaccaggaacttgggctcagtctccaccccacagtggggcggatccgtcccggataagacccgctgtctggccctgagtagggtgtgacctccgcagccgcagaggaggagcgcagcccggcctcgaagaacttctgcttgggtggctgaactctgatcttgacctagagtcatggccatggcaaccaaaggaggtactgtcaaagctgcttcaggattcaatgccatggaagatgcccagaccctgaggaaggccatgaaagggctcggcaccgatgaagacgccattattagcgtccttgcctaccgcaacaccgcccagcgccaggagatcaggacagcctacaagagcaccatcggcagggacttgatagacgacctgaagtcagaactgagtggcaacttcgagcaggtgattgtggggatgatgacgcccacggtgctgtatgacgtgcaagagctgcgaagggccatgaagggagccggcactgatgagggctgcctaattgagatcctggcctcccggacccctgaggagatccggcgcataagccaaacctaccagcagcaatatggacggagccttgaagatgacattcgctctgacacatcgttcatgttccagcgagtgctggtgtctctgtcagctggtgggagggatgaaggaaattatctggacgatgctctcgtgagacaggatgcccaggacctgtatgaggctggagagaagaaatgggggacagatgaggtgaaatttctaactgttctctgttcccggaaccgaaatcacctgttgcatgtgtttgatgaatacaaaaggatatcacagaaggatattgaacagagtattaaatctgaaacatctggtagctttgaagatgctctgctggctatagtaaagtgcatgaggaacaaatctgcatattttgctgaaaagctctataaatcgatgaagggcttgggcaccgatgataacaccctcatcagagtgatggtttctcgagcagaaattgacatgttggatatccgggcacacttcaagagactctatggaaagtctctgtactcgttcatcaagggtgacacatctggagactacaggaaagtactgcttgttctctgtggaggagatgattaaaataaaaatcccagaaggacaggaggattctcaacactttgaatttttttaacttcatttttctacactgctattatcattatctcagaatgcttatttccaattaaaacgcctacagctgcctcctagaatatagactgtctgtattattattcacctataattagtcattatgatgctttaaagctgtacttgcatttcaaagcttataagatataaatggagattttaaagtagaaataaatatgtattccatgtttttaaaagattactttctactttgtgtttcacagacattgaatatattaaattattccatattttcttttcagtgaaaaattttttaaatggaagactgttctaaaatcacttttttccctaatccaatttttagagtggctagtagtttcttcatttgaaattgtaagcatccggtcagtaagaatgcccatccagttttctatatttcatagtcaaagccttgaaagcatctacaaatctctttttttaggttttgtccatagcatcagttgatccttactaagtttttcatgggagacttccttcatcacatcttatgttgaaatcactttctgtagtcaaagtataccaaaaccaatttatctgaactaaattctaaagtatggttatacaaaccatatacatctggttaccaaacataaatgctgaacattccatattattatagttaatgtcttaatccagcttgcaagtgaatggaaaaaaaaataagcttcaaactaggtattctgggaatgatgtaatgctctgaatttagtatgatataaagaaaacttttttgtgctaaaaatactttttaaaatcaattttgttgattgtagtaatttctatttgcactgtgcctttcaactccagaaacattctgaagatgtacttggatttaattaaaaagttcactttgtaagaa

SEQ ID NO: 2116 - DNA, 1414 bp, Homo sapiens
  source 1..1414: mol_type = unassigned DNA
gcgcggccgtcccggcccggggccccaggtgcgcttcccctagagagggattttccggtctcgtgggcagaggaacaaccaggaacttgggctcagtctccaccccacagtggggcggatccgtcccggataagacccgctgtctggccctgagtagggtgtgacctccgcagccgcagaggaggagcgcagcccggcctcgaagaacttctgcttgggtggctgaactctgatcttgacctagagtcatggccatggcaaccaaaggaggtactgtcaaagctgcttcaggattcaatgccatggaagatgcccagaccctgaggaaggccatgaaagggctcggcaccgatgaagacgccattattagcgtccttgcctaccgcaacaccgcccagcgccaggagatcaggacagcctacaagagcaccatcggcagggacttgatagacgacctgaagtcagaactgagtggcaacttcgagcagggagccggcactgatgagggctgcctaattgagatcctggcctcccggacccctgaggagatccggcgcataagccaaacctaccagcagcaatatggacggagccttgaagatgacattcgctctgacacatcgttcatgttccagcgagtgctggtgtctctgtcagctggtgggagggatgaaggaaattatctggacgatgctctcgtgagacaggatgcccaggacctgtatgaggctggagagaagaaatgggggacagatgaggtgaaatttctaactgttctctgttcccggaaccgaaatcacctgttgcatgtgtttgatgaatacaaaaggatatcacagaaggatattgaacagagtattaaatctgaaacatctggtagctttgaagatgctctgctggctatagtaaagtgcatgaggaacaaatctgcatattttgctgaaaagctctataaatcgatgaagggcttgggcaccgatgataacaccctcatcagagtgatggtttctcgagcagaaattgacatgttggatatccgggcacacttcaagagactctatggaaagtctctgtactcgttcatcaagggtgacacatctggagactacaggaaagtactgcttgttctctgtggaggagatgattaaaataaaaatcccagaaggacaggaggattctcaacactttgaatttttttaacttcatttttctacactgctattatcattatctcagaatgcttatttccaattaaaacgcctacagctgcctcctagaatatagactgtctgtattattattcacctataattagtcattatgatgctttaaagctgtacttgcatttcaaagcttataagatataaatggagattttaaagtagaaataaatatgtattccatgtttttaaaa

SEQ ID NO: 2117 - DNA, 1703 bp, Homo sapiens
  source 1..1703: mol_type = unassigned DNA
taagacccgctgtctggccctgagtagggtgtgacctccgcagccgcagaggaggagcgcagcccggcctcgaagaacttctgcttgggtggctgaactctgatcttgacctagagtcatggccatgcacaaacaacgaggaaacagaagattcaccaaacatttatgaacagccagctgttataaagacaagggaccaatctgaaaaatcagaataaagtctccttgttaaagctgctgcaagaaacaggcaccgatgaagacgccattattagcgtccttgcctaccgcaacaccgcccagcgccaggagatcaggacagcctacaagagcaccatcggcagggacttgatagacgacctgaagtcagaactgagtggcaacttcgagcaggtgattgtggggatgatgacgcccacggtgctgtatgacgtgcaagagctgcgaagggccatgaagggagccggcactgatgagggctgcctaattgagatcctggcctcccggacccctgaggagatccggcgcataagccaaacctaccagcagcaatatggacggagccttgaagatgacattcgctctgacacatcgttcatgttccagcgagtgctggtgtctctgtcagctggtgggagggatgaaggaaattatctggacgatgctctcgtgagacaggatgcccaggacctgtatgaggctggagagaagaaatgggggacagatgaggtgaaatttctaactgttctctgttcccggaaccgaaatcacctgttgcatgtgtttgatgaatacaaaaggatatcacagaaggatattgaacagagtattaaatctgaaacatctggtagctttgaagatgctctgctggctatagtaaagtgcatgaggaacaaatctgcatattttgctgaaaagctctataaatcgatgaagggcttgggcaccgatgataacaccctcatcagagtgatggtttctcgagcagaaattgacatgttggatatccgggcacacttcaagagactctatggaaagtctctgtactcgttcatcaagggtgacacatctggagactacaggaaagtactgcttgttctctgtggaggagatgattaaaataaaaatcccagaaggacaggaggattctcaacactttgaatttttttaacttcatttttctacactgctattatcattatctcagaatgcttatttccaattaaaacgcctacagctgcctcctagaatatagactgtctgtattattattcacctataattagtcattatgatgctttaaagctgtacttgcatttcaaagcttataagatataaatggagattttaaagtagaaataaatatgtattccatgtttttaaaagattactttctactttgtgtttcacagacattgaatatattaaattattccatattttcttttcagtgaaaaattttttaaatggaagactgttctaaaatcacttttttccctaatccaatttttagagtggctagtagtttcttcatttgaaattgtaagcatccggtcagtaagaatgcccatccagttttctatatttcatagtcaaagccttgaaagcatctacaaatctctttttttaggttttgtccatagcatcagttgatccttactaagtttttcatgggagacttccttcatcacatcttatgttga

SEQ ID NO: 2118 - DNA, 1762 bp, Homo sapiens
  source 1..1762: mol_type = unassigned DNA
aggcgcgctgaggccggggcaggggcgggcccggctggcgcggccggcctgcggttggggccctggcgggggtgggacgggccaagccgggcagggccggggtggggccgctggcgtttccgttgcttggatcagtctaggtgcagctgccggatccttcagcgtctgcatctcggcgtcgccccgcgtaccgtcgcccggctctccgccgctctcccggggtttcggggcacttgggtcccacagtctggtcctgcttcaccttcccctgacctgagtagtcgccatggcacaggttctcagaggcactgtgactgacttccctggatttgatgagcgggctgatgcagaaactcttcggaaggctatgaaaggcttgggcacagatgaggagagcatcctgactctgttgacatcccgaagtaatgctcagcgccaggaaatctctgcagcttttaagactctgtttggcagggatcttctggatgacctgaaatcagaactaactggaaaatttgaaaaattaattgtggctctgatgaaaccctctcggctttatgatgcttatgaactgaaacatgccttgaagggagctggaacaaatgaaaaagtactgacagaaattattgcttcaaggacacctgaagaactgagagccatcaaacaagtttatgaagaagaatatggctcaagcctggaagatgacgtggtgggggacacttcagggtactaccagcggatgttggtggttctccttcaggctaacagagaccctgatgctggaattgatgaagctcaagttgaacaagatgctcaggctttatttcaggctggagaacttaaatgggggacagatgaagaaaagtttatcaccatctttggaacacgaagtgtgtctcatttgagaaaggtgtttgacaagtacatgactatatcaggatttcaaattgaggaaaccattgaccgcgagacttctggcaatttagagcaactactccttgctgttgtgaaatctattcgaagtatacctgcctaccttgcagagaccctctattatgctatgaagggagctgggacagatgatcataccctcatcagagtcatggtttccaggagtgagattgatctgtttaacatcaggaaggagtttaggaagaattttgccacctctctttattccatgattaagggagatacatctggggactataagaaagctcttctgctgctctgtggagaagatgactaacgtgtcacggggaagagctccctgctgtgtgcctgcaccaccccactgccttccttcagcacctttagctgcatttgtatgccagtgcttaacacattgccttattcatactagcatgctcatgaccaacacatacacgtcatagaagaaaatagtggtgcttctttctgatctctagtggagatctctttgactgctgtagtactaaagtgtacttaatgttactaagtttaatgcctggccattttccatttatatatattttttaagaggctagagtgcttttagccttttttaaaaactccatttatattacatttgtaaccatgatactttaatcagaagcttagccttgaaattgtgaactcttggaaatgttattagtgaagttcgcaactaaactaaacctgtaaaattatgatgattgtattcaaaagattaatgaaaaataaacatttctgtccccctgaattatgtgtacatgtgtgtttagatttattattaaatttattt

SEQ ID NO: 2119 - DNA, 2593 bp, Homo sapiens
  source 1..2593: mol_type = unassigned DNA
agaggggtggggtggaggagggaggcgggcgcgccggattggcctctgcgcgccacgtgtccggctcggagcccacggctgtcctcccggtccgccccgcgctgcggttgctgctgggctaacgggctccgatccagcgagcgctgcgtcctcgagtccctgcgcccgtgcgtccgtctgcgacccgaggcctccgctgcgcgtggattctgctgcgaaccggagaccatggccaaaccagcacagggtgccaagtaccggggctccatccatgacttcccaggctttgaccccaaccaggatgccgaggctctgtacactgccatgaagggctttggcagtgacaaggaggccatactggacataatcacctcacggagcaacaggcagaggcaggaggtctgccagagctacaagtccctctacggcaaggacctcattgctgatttaaagtatgaattgacgggcaagtttgaacggttgattgtgggcctgatgaggccacctgcctattgtgatgccaaagaaattaaagatgccatctcgggcattggcactgatgagaagtgcctcattgagatcttggcttcccggaccaatgagcagatgcaccagctggtggcagcatacaaagatgcctacgagcgggacctggaggctgacatcatcggcgacacctctggccacttccagaagatgcttgtggtcctgctccagggaaccagggaggaggatgacgtagtgagcgaggacctggtacaacaggatgtccaggacctatacgaggcaggggaactgaaatggggaacagatgaagcccagttcatttacatcttgggaaatcgcagcaagcagcatcttcggttggtgttcgatgagtatctgaagaccacagggaagccgattgaagccagcatccgaggggagctgtctggggactttgagaagctaatgctggccgtagtgaagtgtatccggagcaccccggaatattttgctgaaaggctcttcaaggctatgaagggcctggggactcgggacaacaccctgatccgcatcatggtctcccgtagtgagttggacatgctcgacattcgggagatcttccggaccaagtatgagaagtccctctacagcatgatcaagaatgacacctctggcgagtacaagaagactctgctgaagctgtctgggggagatgatgatgctgctggccagttcttcccggaggcagcgcaggtggcctatcagatgtgggaacttagtgcagtggcccgagtagagctgaagggaactgtgcgcccagccaatgacttcaaccctgacgcagatgccaaagcgctgcggaaagccatgaagggactcgggactgacgaagacacaatcatcgatatcatcacgcaccgcagcaatgtccagcggcagcagatccggcagaccttcaagtctcactttggccgggacttaatgactgacctgaagtctgagatctctggagacctggcaaggctgattctggggctcatgatgccaccggcccattacgatgccaagcagttgaagaaggccatggagggagccggcacagatgaaaaggctcttattgaaatcctggccactcggaccaatgctgaaatccgggccatcaatgaggcctataaggaggactatcacaagtccctggaggatgctctgagctcagacacatctggccacttcaggaggatcctcatttctctggccacggggcatcgtgaggagggaggagaaaacctggaccaggcacgggaagatgcccaggtggctgctgagatcttggaaatagcagacacacctagtggagacaaaacttccttggagacacgtttcatgacgatcctgtgtacccggagctatccgcacctccggagagtcttccaggagttcatcaagatgaccaactatgacgtggagcacaccatcaagaaggagatgtctggggatgtcagggatgcatttgtggccattgttcaaagtgtcaagaacaagcctctcttctttgccgacaaactttacaaatccatgaagggtgctggcacagatgagaagactctgaccaggatcatggtatcccgcagtgagattgacctgctcaacatccggagggaattcattgagaaatatgacaagtctctccaccaagccattgagggtgacacctccggagacttcctgaaggccttgctggctctctgtggtggtgaggactagggccacagctttggcgggcacttctgccaagaaatggttatcagcaccagccgccatggccaagcctgattgttccagctccagagactaaggaaggggcaggggtggggggaggggttgggttgggctcttatcttcagtggagcttaggaaacgctcccactcccacgggccatcgagggcccagcacggctgagcggctgaaaaaccgtagccatagatcctgtccacctccactcccctctgaccctcaggctttcccagcttcctccccttgctacagcctctgccctggtttgggctatgtcagatccaaaaacatcctgaacctctgtctgtaaaa

SEQ ID NO: 2120 - DNA, 2441 bp, Homo sapiens
  source 1..2441: mol_type = unassigned DNA
gatccagcgagcgctgcgtcctcgagtccctgcgcccgtgcgtccgtctgcgacccgaggcctccgctgcgcgtggattctgctgcgaaccggagaccatggccaaaccagcacagggtgccaagtaccggggctccatccatgacttcccaggctttgaccccaaccaggatgccgaggctctgtacactgccatgaagggctttggcagtgacaaggaggccatactggacataatcacctcacggagcaacaggcagaggcaggaggtctgccagagctacaagtccctctacggcaaggacctcattgctgatttaaagtatgaattgacgggcaagtttgaacggttgattgtgggcctgatgaggccacctgcctattgtgatgccaaagaaattaaagatgccatctcgggcattggcactgatgagaagtgcctcattgagatcttggcttcccggaccaatgagcagatgcaccagctggtggcagcatacaaagatgcctacgagcgggacctggaggctgacatcatcggcgacacctctggccacttccagaagatgcttgtggtcctgctccagggaaccagggaggaggatgacgtagtgagcgaggacctggtacaacaggatgtccaggacctatacgaggcaggggaactgaaatggggaacagatgaagcccagttcatttacatcttgggaaatcgcagcaagcagcatcttcggttggtgttcgatgagtatctgaagaccacagggaagccgattgaagccagcatccgaggggagctgtctggggactttgagaagctaatgctggccgtagtgaagtgtatccggagcaccccggaatattttgctgaaaggctcttcaaggctatgaagggcctggggactcgggacaacaccctgatccgcatcatggtctcccgtagtgagttggacatgctcgacattcgggagatcttccggaccaagtatgagaagtccctctacagcatgatcaagaatgacacctctggcgagtacaagaagactctgctgaagctgtctgggggagatgatgatgctgctggccagttcttcccggaggcagcgcaggtggcctatcagatgtgggaacttagtgcagtggcccgagtagagctgaagggaactgtgcgcccagccaatgacttcaaccctgacgcagatgccaaagcgctgcggaaagccatgaagggactcgggactgacgaagacacaatcatcgatatcatcacgcaccgcagcaatgtccagcggcagcagatccggcagaccttcaagtctcactttggccgggacttaatgactgacctgaagtctgagatctctggagacctggcaaggctgattctggggctcatgatgccaccggcccattacgatgccaagcagttgaagaaggccatggagggagccggcacagatgaaaaggctcttattgaaatcctggccactcggaccaatgctgaaatccgggccatcaatgaggcctataaggaggactatcacaagtccctggaggatgctctgagctcagacacatctggccacttcaggaggatcctcatttctctggccacggggcatcgtgaggagggaggagaaaacctggaccaggcacgggaagatgcccaggaaatagcagacacacctagtggagacaaaacttccttggagacacgtttcatgacgatcctgtgtacccggagctatccgcacctccggagagtcttccaggagttcatcaagatgaccaactatgacgtggagcacaccatcaagaaggagatgtctggggatgtcagggatgcatttgtggccattgttcaaagtgtcaagaacaagcctctcttctttgccgacaaactttacaaatccatgaagggtgctggcacagatgagaagactctgaccaggatcatggtatcccgcagtgagattgacctgctcaacatccggagggaattcattgagaaatatgacaagtctctccaccaagccattgagggtgacacctccggagacttcctgaaggccttgctggctctctgtggtggtgaggactagggccacagctttggcgggcacttctgccaagaaatggttatcagcaccagccgccatggccaagcctgattgttccagctccagagactaaggaaggggcaggggtggggggaggggttgggttgggctcttatcttcagtggagcttaggaaacgctcccactcccacgggccatcgagggcccagcacggctgagcggctgaaaaaccgtagccatagatcctgtccacctccactcccctctgaccctcaggctttcccagcttcctccccttgctacagcctctgccctggtttgggctatgtcagatccaaaaacatcctgaacctctgtctgt

SEQ ID NO: 2121 - DNA, 923 bp, Homo sapiens
  source 1..923: mol_type = unassigned DNA
ggacttgttatgatcgagggctgctaggcagagatgttggctgcttcctgggccctggcaagtcactttctctttctgagatgcctttaccccgtctagaaaatgagggacttggagtcatggattattaagggcccttgtgggattcagaaacactagatgtaaaatattcagccaatttgagcagtatggtctaggttgctctgggagggatcagaagccatcttaaagccagggtaaatggtgtgtttatgattagctcaggagcttcccagaaccctcagaggcggggctgtggaatcagcagggggactggccctcagaactgcagtctgaacatctagttctggaaggagcttgctttttacatatgaactgtgcactcacacaaggcacacagaaactgctctcagagctgagaatattttcccaaacagtaagaggcccctccttgaagccatctctccttggaaaggggagctcctccagatgggcctgggctgcagccagcagctgaaattgccagcaacaagcccagaggaaagtgcttcaaggctggagatgcagtggattctgctgcgaaccggagaccatggccaaaccagcacagggtgccaagtaccggggctccatccatgacttcccaggctttgaccccaaccaggatgccgaggctctgtacactgccatgaagggctttggcagtgacaaggaggccatactggacataatcacctcacggagcaacaggcagaggcaggaggtctgccagagctacaagtccctctacggcaaggacctcattgctgatttaaagtatgaattgacgggcaagtttgaacggttgattgtgggcctgatgaggccacctgcctattgtgatgccaaagaaattaaagatgccatctcgggcattggcactg

SEQ ID NO: 2122 - DNA, 2451 bp, Homo sapiens
  source 1..2451: mol_type = unassigned DNA
tccagaggcctggccggggtcctgcagtgcagacgttgggaggcacggagacggggagagggggaggcggtccaggactcactctgctccacctctgactccttgaagggtgccaagtaccggggctccatccatgacttcccaggctttgaccccaaccaggatgccgaggctctgtacactgccatgaagggctttggcagtgacaaggaggccatactggacataatcacctcacggagcaacaggcagaggcaggaggtctgccagagctacaagtccctctacggcaaggacctcattgctgatttaaagtatgaattgacgggcaagtttgaacggttgattgtgggcctgatgaggccacctgcctattgtgatgccaaagaaattaaagatgccatctcgggcattggcactgatgagaagtgcctcattgagatcttggcttcccggaccaatgagcagatgcaccagctggtggcagcatacaaagatgcctacgagcgggacctggaggctgacatcatcggcgacacctctggccacttccagaagatgcttgtggtcctgctccagggaaccagggaggaggatgacgtagtgagcgaggacctggtacaacaggatgtccaggacctatacgaggcaggggaactgaaatggggaacagatgaagcccagttcatttacatcttgggaaatcgcagcaagcagcatcttcggttggtgttcgatgagtatctgaagaccacagggaagccgattgaagccagcatccgaggggagctgtctggggactttgagaagctaatgctggccgtagtgaagtgtatccggagcaccccggaatattttgctgaaaggctcttcaaggctatgaagggcctggggactcgggacaacaccctgatccgcatcatggtctcccgtagtgagttggacatgctcgacattcgggagatcttccggaccaagtatgagaagtccctctacagcatgatcaagaatgacacctctggcgagtacaagaagactctgctgaagctgtctgggggagatgatgatgctgctggccagttcttcccggaggcagcgcaggtggcctatcagatgtgggaacttagtgcagtggcccgagtagagctgaagggaactgtgcgcccagccaatgacttcaaccctgacgcagatgccaaagcgctgcggaaagccatgaagggactcgggactgacgaagacacaatcatcgatatcatcacgcaccgcagcaatgtccagcggcagcagatccggcagaccttcaagtctcactttggccgggacttaatgactgacctgaagtctgagatctctggagacctggcaaggctgattctggggctcatgatgccaccggcccattacgatgccaagcagttgaagaaggccatggagggagccggcacagatgaaaaggctcttattgaaatcctggccactcggaccaatgctgaaatccgggccatcaatgaggcctataaggaggactatcacaagtccctggaggatgctctgagctcagacacatctggccacttcaggaggatcctcatttctctggccacggggcatcgtgaggagggaggagaaaacctggaccaggcacgggaagatgcccaggtggctgctgagatcttggaaatagcagacacacctagtggagacaaaacttccttggagacacgtttcatgacgatcctgtgtacccggagctatccgcacctccggagagtcttccaggagttcatcaagatgaccaactatgacgtggagcacaccatcaagaaggagatgtctggggatgtcagggatgcatttgtggccattgttcaaagtgtcaagaacaagcctctcttctttgccgacaaactttacaaatccatgaagggtgctggcacagatgagaagactctgaccaggatcatggtatcccgcagtgagattgacctgctcaacatccggagggaattcattgagaaatatgacaagtctctccaccaagccattgagggtgacacctccggagacttcctgaaggccttgctggctctctgtggtggtgaggactagggccacagctttggcgggcacttctgccaagaaatggttatcagcaccagccgccatggccaagcctgattgttccagctccagagactaaggaaggggcaggggtggggggaggggttgggttgggctcttatcttcagtggagcttaggaaacgctcccactcccacgggccatcgagggcccagcacggctgagcggctgaaaaaccgtagccatagatcctgtccacctccactcccctctgaccctcaggctttcccagcttcctccccttgctacagcctctgccctggtttgggctatgtcagatccaaaaacatcctgaacctctgtctgt

SEQ ID NO: 2123 - DNA, 2013 bp, Homo sapiens
  source 1..2013: mol_type = unassigned DNA
aacgggctccgatccagcgagcgctgcgtcctcgagtccctgcgcccgtgcgtccgtctgcgacccgaggcctccgctgcgcgtggattctgctgcgaaccggagaccatggccaaaccagcacagggtgccaagtaccggggctccatccatgacttcccaggctttgaccccaaccaggatgccgaggctctgtacactgccatgaagggctttggcagtgacaaggaggccatactggacataatcacctcacggagcagatgcaccagctggtggcagcatacaaagatgcctacgagcgggacctggaggctgacatcatcggcgacacctctggccacttccagaagatgcttgtggtcctgctccagggaaccagggaggaggatgacgtagtgagcgaggacctggtacaacaggatgtccaggacctatacgaggcaggggaactgaaatggggaacagatgaagcccagttcatttacatcttgggaaatcgcagcaagcagcatcttcggttggtgttcgatgagtatctgaagaccacagggaagccgattgaagccagcatccgaggggagctgtctggggactttgagaagctaatgctggccgtagtgaagtgtatccggagcaccccggaatattttgctgaaaggctcttcaaggctatgaagggcctggggactcgggacaacaccctgatccgcatcatggtctcccgtagtgagttggacatgctcgacattcgggagatcttccggaccaagtatgagaagtccctctacagcatgatcaagaatgacacctctggcgagtacaagaagactctgctgaagctgtctgggggagatgatgatgctgctggccagttcttcccggaggcagcgcaggtggcctatcagatgtgggaacttagtgcagtggcccgagtagagctgaagggaactgtgcgcccagccaatgacttcaaccctgacgcagatgccaaagcgctgcggaaagccatgaagggactcgggactgacgaagacacaatcatcgatatcatcacgcaccgcagcaatgtccagcggcagcagatccggcagaccttcaagtctcactttggccgggacttaatgactgacctgaagtctgagatctctggagacctggcaaggctgattctggggctcatgatgccaccggcccattacgatgccaagcagttgaagaaggccatggagggagccggcacagatgaaaaggctcttattgaaatcctggccactcggaccaatgctgaaatccgggccatcaatgaggcctataaggaggactatcacaagtccctggaggatgctctgagctcagacacatctggccacttcaggaggatcctcatttctctggccacggggcatcgtgaggagggaggagaaaacctggaccaggcacgggaagatgcccaggtggctgctgagatcttggaaatagcagacacacctagtggagacaaaacttccttggagacacgtttcatgacgatcctgtgtacccggagctatccgcacctccggagagtcttccaggagttcatcaagatgaccaactatgacgtggagcacaccatcaagaaggagatgtctggggatgtcagggatgcatttgtggccattgttcaaagtgtcaagaacaagcctctcttctttgccgacaaactttacaaatccatgaagggtgctggcacagatgagaagactctgaccaggatcatggtatcccgcagtgagattgacctgctcaacatccggagggaattcattgagaaatatgacaagtctctccaccaagccattgagggtgacacctccggagacttcctgaaggccttgctggctctctgtggtggtgaggactagggccacagctttggcgggcacttctgccaagaaatggttatcagcaccagccgccatggccaagcctgattgttccagctccagagactaaggaaggggcaggggt

SEQ ID NO: 2124 - DNA, 2174 bp, Homo sapiens
  source 1..2174: mol_type = unassigned DNA
cccggctccatcttgcgggagaccgggttgggctgtgacgctgctgctggggtcagaatgtcatacccaggctatcccccaacaggctacccacctttccctggatatcctcctgcaggtcaggagtcatcttttcccccttctggtcagtatccttatcctagtggctttcctccaatgggaggaggtgcctacccacaagtgccaagtagtggctacccaggagctggaggctaccctgcgcctggaggttatccagcccctggaggctatcctggtgccccacagccagggggagctccatcctatcccggagttcctccaggccaaggatttggagtcccaccaggtggagcaggcttttctgggtatccacagccaccttcacagtcttatggaggtggtccagcacaggttccactacctggtggctttcctggaggacagatgccttctcagtatcctggaggacaacctacttaccctagtcagatcaatacagattctttttcttcctatcctgttttctctcctgtttctttggattatagcagtgaacctgccacagtgactcaggtcactcaaggaactatccgaccagctgccaacttcgatgctataagagatgcagaaattcttcgtaaggcaatgaagggttttgggacagatgagcaggcaattgtggatgtggtggccaaccgttccaatgatcagaggcaaaaaattaaagcagcatttaagacctcctatggcaaggatttaatcaaagatctcaaatcagagttaagtggaaatatggaagaactgatcctggccctcttcatgcctcctacgtattacgatgcctggagcttacggaaagcaatgcagggagcaggaactcaggaacgtgtattgattgagattttgtgcacaagaacaaatcaggaaatccgagaaattgtcagatgttatcagtcagaatttggacgagaccttgaaaaggacattaggtcagatacatcaggacattttgaacgtttacttgtgtccatgtgccagggaaatcgtgatgagaaccagagtataaaccaccaaatggctcaggaagatgctcagcgtctctatcaagctggtgaggggagactagggaccgatgaatcttgctttaacatgatccttgccacaagaagctttcctcagctgagagctaccatggaggcttattctaggatggctaatcgagacttgttaagcagtgtgagccgtgagttttccggatatgtagaaagtggtttgaagaccatcttgcagtgtgccctgaaccgccctgccttctttgctgagaggctctactatgctatgaaaggtgctggcacagatgactccaccctggtccggattgtggtcactcgaagtgagattgaccttgtacaaataaaacagatgttcgctcagatgtatcagaagactctgggcacaatgattgcaggtgacacgagtggagattaccgaagacttcttctggctattgtgggccagtaggagggatttttttttttttaatgaaaaaaaatttctattcatagcttatccttcagagcaatgacctgcatgcagcaatatcaaacatcagctaaccgaaagagctttctgtcaaggaccgtatcagggtaatgtgcttggtttgcacatgttgttattgccttaattctaattttattttgttctctacatacaatcaatgtaaagccatatcacaatgatacagtaatattgcaatgtttgtaaaccttcattcttactagtttcattctaatcaagatgtcaaattgaataaaaatcacagcaatctctgattctgtgtaataatattgaataattttttagaaggttactgaaagctctgccttccggaatccctctaagtctgcttgatagagtggatagtgtgttaaaactgtgtactttaaaaaaaaattcaacctttacatctagaataatttgcatctcattttgcctaaattggttctgtattcataaacactttccacatagaaaatagattagtattacctgtggcaccttttaagaaagggtcaaatgtttatatgcttaagatacatagcctacttttttttcgcagttgttttctttttttaaattgagttatgacaaataaaaaattgcatata

SEQ ID NO: 2125 - DNA, 2108 bp, Homo sapiens
  source 1..2108: mol_type = unassigned DNA
cccggctccatcttgcgggagaccgggttgggctgtgacgctgctgctggggtcagaatgtcatacccaggctatcccccaacaggctacccacctttccctggatatcctcctgcaggtcaggagtcatcttttcccccttctggtcagtatccttatcctagtggctttcctccaatgggaggaggtgcctacccacaagtgccaagtagtggctacccaggagctggaggctaccctgcgcctggaggttatccagcccctggaggctatcctggtgccccacagccagggggagctccatcctatcccggagttcctccaggccaaggatttggagtcccaccaggtggagcaggcttttctgggtatccacagccaccttcacagtcttatggaggtggtccagcacaggttccactacctggtggctttcctggaggacagatgccttctcagtatcctggaggacaacctacttaccctagtcagcctgccacagtgactcaggtcactcaaggaactatccgaccagctgccaacttcgatgctataagagatgcagaaattcttcgtaaggcaatgaagggttttgggacagatgagcaggcaattgtggatgtggtggccaaccgttccaatgatcagaggcaaaaaattaaagcagcatttaagacctcctatggcaaggatttaatcaaagatctcaaatcagagttaagtggaaatatggaagaactgatcctggccctcttcatgcctcctacgtattacgatgcctggagcttacggaaagcaatgcagggagcaggaactcaggaacgtgtattgattgagattttgtgcacaagaacaaatcaggaaatccgagaaattgtcagatgttatcagtcagaatttggacgagaccttgaaaaggacattaggtcagatacatcaggacattttgaacgtttacttgtgtccatgtgccagggaaatcgtgatgagaaccagagtataaaccaccaaatggctcaggaagatgctcagcgtctctatcaagctggtgaggggagactagggaccgatgaatcttgctttaacatgatccttgccacaagaagctttcctcagctgagagctaccatggaggcttattctaggatggctaatcgagacttgttaagcagtgtgagccgtgagttttccggatatgtagaaagtggtttgaagaccatcttgcagtgtgccctgaaccgccctgccttctttgctgagaggctctactatgctatgaaaggtgctggcacagatgactccaccctggtccggattgtggtcactcgaagtgagattgaccttgtacaaataaaacagatgttcgctcagatgtatcagaagactctgggcacaatgattgcaggtgacacgagtggagattaccgaagacttcttctggctattgtgggccagtaggagggatttttttttttttaatgaaaaaaaatttctattcatagcttatccttcagagcaatgacctgcatgcagcaatatcaaacatcagctaaccgaaagagctttctgtcaaggaccgtatcagggtaatgtgcttggtttgcacatgttgttattgccttaattctaattttattttgttctctacatacaatcaatgtaaagccatatcacaatgatacagtaatattgcaatgtttgtaaaccttcattcttactagtttcattctaatcaagatgtcaaattgaataaaaatcacagcaatctctgattctgtgtaataatattgaataattttttagaaggttactgaaagctctgccttccggaatccctctaagtctgcttgatagagtggatagtgtgttaaaactgtgtactttaaaaaaaaattcaacctttacatctagaataatttgcatctcattttgcctaaattggttctgtattcataaacactttccacatagaaaatagattagtattacctgtggcaccttttaagaaagggtcaaatgtttatatgcttaagatacatagcctacttttttttcgcagttgttttctttttttaaattgagttatgacaaataaaaaattgcatata

SEQ ID NO: 2126 - DNA, 648 bp, Homo sapiens
  source 1..648: mol_type = unassigned DNA
tcagatttttttttcctttattttgaccctgacccttttgcccttggtctatctacttttctttttctttctttttttttttctttttccttgtcttgtcttgtcttttctttcaactggagtgcaatgatgcaaacacgactcactgccgccttgacctcctggcctcaagcaattctcccacctcagcttcctgaatagtttggactacagaatgtcatacccaggctatcccccaacaggctacccacctttccctggatatcctcctgcaggtcaggagtcatcttttcccccttctggtcagtatccttatcctagtggctttcctccaatgggaggaggtgcctacccacaagtgccaagtagtggctacccaggagctggaggctaccctgcgcctggaggttatccagcccctggaggctatcctggtgccccacagccagggggagctccatcctatcccggagttcctccaggccaaggatttggagtcccaccaggtggagcaggcttttctgggtatccacagccaccttcacagtcttatggaggtggtccagcacaggttccactacctggtggctttcctggaggacagatgccttctcagtatcctggaggacaacctacttaccctagtca

SEQ ID NO: 2127 - DNA, 1250 bp, Homo sapiens
  source 1..1250: mol_type = unassigned DNA
atcttgcgggagaccgggttgggctgtgacgctgctgctggggtcagcctgcaggtcaggagtcatcttttcccccttctggtcagtatccttatcctagtggctttcctccaatgggaggaggtgcctacccacaagtgccaagtagtggctacccaggagctggaggctaccctgcgcctggaggttatccagcccctggaggctatcctggtggctttcctggaggacagatgccttctcagtatcctggaggacaacctacttaccctagtcagcctgccacagtgactcaggtcactcaaggaactatccgaccagctgccaacttcgatgctataagagatgcagaaattcttcgtaaggcaatgaagggttttgggacagatgagcaggcaattgtggatgtggtggccaaccgttccaatgatcagaggcaaaaaattaaagcagcatttaagacctcctatggcaaggatttaatcaaagatctcaaatcagagttaagtggaaatatggaagaactgatcctggccctcttcatgcctcctacgtattacgatgcctggagcttacggaaagcaatgcagggagcaggaactcaggaacgtgtattgattgagattttgtgcacaagaacaaatcaggaaatccgagaaattgtcagatgttatcagtcagaatttggacgagaccttgaaaaggacattaggtcagatacatcaggacattttgaacgtttacttgtgtccatgtgccagggaaatcgtgatgagaaccagagtataaaccaccaaatggctcaggaagatgctcagcgtctctatcaagctggtgaggggagactagggaccgatgaatcttgctttaacatgatccttgccacaagaagctttcctcagctgagagctaccatggaggcttattctaggatggctaatcgagacttgttaagcagtgtgagccgtgagttttccggatatgtagaaagtggtttgaagaccatcttgcagtgtgccctgaaccgccctgccttctttgctgagaggctctactatgctatgaaaggtgctggcacagatgactccaccctggtccggattgtggtcactcgaagtgagattgaccttgtacaaataaaacagatgttcgctcagatgtatcagaagactctgggcacaatgattgcaggtgacacgagtggagattaccgaagacttcttctggctattgtgggccagtaggaggga

SEQ ID NO: 2128 - DNA, 1954 bp, Homo sapiens
  source 1..1954: mol_type = unassigned DNA
cccacacccaagtgagcggcctgctcactcctcagctgcaggagccagacgtgtggagtcccagcagaggccaacctgtgtctcttcatctccctgggaaaggtgcccccgaggtgaaagagatggcctggtggaaatcctggattgaacaggagggtgtcacagtgaagagcagctcccacttcaacccagaccctgatgcagagaccctctacaaagccatgaaggggatcgggaccaacgagcaggctatcatcgatgtgctcaccaagagaagcaacacgcagcggcagcagatcgccaagtccttcaaggctcagttcggcaaggacctcactgagaccttgaagtctgagctcagtggcaagtttgagaggctcattgtggcccttatgtacccgccatacagatacgaagccaaggagctgcatgacgccatgaagggcttaggaaccaaggagggtgtcatcattgagatcctggcctctcggaccaagaaccagctgcgggagataatgaaggcgtatgaggaagactatgggtccagcctggaggaggacatccaagcagacacaagtggctacctggagaggatcctggtgtgcctcctgcagggcagcagggatgatgtgagcagctttgtggacccaggactggccctccaagacgcacaggatctgtatgcggcaggcgagaagattcgtgggactgatgagatgaaattcatcaccatcctgtgcacgcgcagtgccactcacctgctgagagtgtttgaagagtatgagaaaattgccaacaagagcattgaggacagcatcaagagtgagacccatggctcactggaggaggccatgctcactgtggtgaaatgcacccaaaacctccacagctactttgcagagagactctactatgccatgaagggagcagggacgcgtgatgggaccctgataagaaacatcgtttcaaggagcgagattgacttaaatcttatcaaatgtcacttcaagaagatgtacggcaagaccctcagcagcatgatcatggaagacaccagcggtgactacaagaacgccctgctgagcctggtgggcagcgacccctgaggcacagaagaacaagagcaaagaccatgaagccagagtctccaggactcctcactcaacctcggccatggacgcaggttgggtgtgaggggggtcccagcctttcggtcttctatttccctatttccagtgctttccagccgggtttctgacccagagggtggaaccggcctggactcctcttcccaacttcctccaggtcatttcccagtgtgagcacaatgccaaccttagtgtttctccagccagacagatgcctcagcatgaagggcttggggacttgtggatcattccttcctccctgcaggagcttcccaagctggtcacagagtctcctgggcacaggttatacagaccccagccccattcccatctactgaaacagggtctccacaagaggggccagggaatatgggtttttaacaagcgtcttacaaaacacttctctatcatgcagccggagagctggctgggagcccttttgttttagaacacacatccttcagcagctgagaaacgaacacgaatccatcccaaccgagatgccattaacattcatctaaaaatgttaggctctaaatggacgaaaaattctctcgccatcttaataacaaaataaactacaaattcctgacccaaggacactgtgttataagaggcgtgggctcccctggtggctgaccaggtcagctgccctggccttgcacccctctgcatgcagcacagaagggtgtgaccatgccctcagcaccactcttgtccccactgaacggcaactgagactgggtacctggagattctgaagtgcctttgctgtggttttcaaaataataaagatttgtattcaa

SEQ ID NO: 2129 - DNA, 1861 bp, Homo sapiens
  source 1..1861: mol_type = unassigned DNA
cgggggcgaggggacggcaggcaggtgtggcgctgccctgggcgggcttgcacccccacacccaagtgagcggcctgctcactcctcagctgcaggagccagacgtgtggagtcccagcagaggccaacctgtgtctcttcatctccctgggaaaggtgcccccgaggtgaaagagatggcctggtggaaatcctggattgaacaggagggtgtcacagtgaagagcagctcccacttcaacccagaccctgatgcagagaccctctacaaagccatgaaggggatcggtgtcgggtcccaactgctcagccaccaagcagctgccttcgccttcccctcctccgccctcaccagtgtgtcaccctgggggcagcagggtcacttgtgctgtaaccctgcagggaccaacgagcaggctatcatcgatgtgctcaccaagagaagcaacacgcagcggcagcagatcgccaagtccttcaaggctcagttcggcaaggacctcactgagaccttgaagtctgagctcagtggcaagtttgagaggctcattgtggcccttatgtacccgccatacagatacgaagccaaggagctgcatgacgccatgaagggcagcagggatgatgtgagcagctttgtggacccaggactggccctccaagacgcacaggatctgtatgcggcaggcgagaagattcgtgggactgatgagatgaaattcatcaccatcctgtgcacgcgcagtgccactcacctgctgagagtgaaatgcacccaaaacctccacagctactttgcagagagactctactatgccatgaagggagcagggacgcgtgatgggaccctgataagaaacatcgtttcaaggagcgagattgacttaaatcttatcaaatgtcacttcaagaagatgtacggcaagaccctcagcagcatgatcatggaagacaccagcggtgactacaagaacgccctgctgagcctggtgggcagcgacccctgaggcacagaagaacaagagcaaagaccatgaagccagagtctccaggactcctcactcaacctcggccatggacgcaggttgggtgtgaggggggtcccagcctttcggtcttctatttccctatttccagtgctttccagccgggtttctgacccagagggtggaaccggcctggactcctcttcccaacttcctccaggtcatttcccagtgtgagcacaatgccaaccttagtgtttctccagccagacagatgcctcagcatgaagggcttggggacttgtggatcattccttcctccctgcaggagcttcccaagctggtcacagagtctcctgggcacaggttatacagaccccagccccattcccatctactgaaacagggtctccacaagaggggccagggaatatgggtttttaacaagcgtcttacaaaacacttctctatcatgcagccggagagctggctgggagcccttttgttttagaacacacatccttcagcagctgagaaacgaacacgaatccatcccaaccgagatgccattaacattcatctaaaaatgttaggctctaaatggacgaaaaattctctcgccatcttaataacaaaataaactacaaattcctgacccaaggacactgtgttataagaggcgtgggctcccctggtggctgaccaggtcagctgccctggccttgcacccctctgcatgcagcacagaagggtgtgaccatgccctcagcaccactcttgtccccactgaacggcaactgagactgggtacctggagattctgaagtgcctttgctgtggttttcaaaataataaagatttgtattcaactcaaa

SEQ ID NO: 2130 - DNA, 1179 bp, Homo sapiens
  source 1..1179: mol_type = unassigned DNA
agacgtgtggagtcccagcagaggccaacctgtgtctcttcatctccctgggaaaggtgcccccgaggtgaaagagatggcctggtggaaatcctgggacctcactgagaccttgaagtctgagctcagtggcaagtttgagaggctcattgtggcccttatgtacccgccatacagatacgaagccaaggagctgcatgacgccatgaagggcttaggaaccaaggagggtgtcatcattgagatcctggcctctcggaccaagaaccagctgcgggagataatgaaggcgtatgaggaagactatgggtccagcctggaggaggacatccaagcagacacaagtggctacctggagaggatcctggtgtgcctcctgcagggcagcagggatgatgtgagcagctttgtggacccaggactggccctccaagacgcacaggatctgtatgcggcaggcgagaagattcgtgggactgatgagatgaaattcatcaccatcctgtgcacgcgcagtgccactcacctgctgagagtgtttgaagagtatgagaaaattgccaacaagagcattgaggacagcatcaagagtgagacccatggctcactggaggaggccatgctcactgtggtgaaatgcacccaaaacctccacagctactttgcagagagactctactatgccatgaagggagcagggacgcgtgatgggaccctgataagaaacatcgtttcaaggagcgagattgacttaaatcttatcaaatgtcacttcaagaagatgtacggcaagaccctcagcagcatgatcatggaagacaccagcggtgactacaagaacgccctgctgagcctggtgggcagcgacccctgaggcacagaagaacaagagcaaagaccatgaagccagagtctccaggactcctcactcaacctcggccatggacgcaggttgggtgtgaggggggtcccagcctttcggtcttctatttccctatttccagtgctttccagccgggtttctgacccagagggtggaaccggcctggactcctcttcccaacttcctccaggtcatttcccagtgtgagcacaatgccaaccttagtgtttctccagccagacagatgcctcagcatgaagggcttggggacttgtggatcattccttcctccctgc

SEQ ID NO: 2131 - DNA, 1171 bp, Homo sapiens
  source 1..1171: mol_type = unassigned DNA
aggagccagacgtgtggagtcccagcagaggccaacctgtgtctcttcatctccctgggaaaggtgcccccgaggtgaaagagatggcctggtggaaatcctggattgaacaggagggtgtcacagtgaagagcagctcccacttcaacccagaccctgatgcagagaccctctacaaagccatgaaggggatcgggaccaacgagcaggctatcatcgatgtgctcaccaagagaagcaacacgcagcggcagcagatcgccaagtccttcaaggctcagttcggcaaggacctcactgagaccttgaagtctgagctcagtggcaagtttgagaggctcattgtggcccttatgtacccgccatacagatacgaagccaaggagctgcatgacgccatgaagggcttaggaaccaaggagggtgtcatcattgagatcctggcctctcggaccaagaaccagctgcgggagataatgaaggcgtatgaggaagggcagcagggatgatgtgagcagctttgtggacccaggactggccctccaagacgcacaggatctgtatgcggcaggcgagaagattcgtgggactgatgagatgaaattcatcaccatcctgtgcacgcgcagtgccactcacctgctgagagtgtttgaagagtatgagaaaattgccaacaagagcattgaggacagcatcaagagtgagacccatggctcactggaggaggccatgctcactgtggtgaaatgcacccaaaacctccacagctactttgcagagagactctactatgccatgaagggagcagggacgcgtgatgggaccctgataagaaacatcgtttcaaggagcgagattgacttaaatcttatcaaatgtcacttcaagaagatgtacggcaagaccctcagcagcatgatcatggaagacaccagcggtgactacaagaacgccctgctgagcctggtgggcagcgacccctgaggcacagaagaacaagagcaaagaccatgaagccagagtctccaggactcctcactcaacctcggccatggacgcaggtcatttcccagtgtgagcacaatgccaaccttagtgtttctccagccagacagatgcctcagcatgaagggcttggggacttgtggatcattccttcctccctgca

SEQ ID NO: 2132 - DNA, 1826 bp, Homo sapiens
  source 1..1826: mol_type = unassigned DNA
ggtcccacctggacccacagggaaggcagtgcataaaagcctcctgtgtttgaggctgagccgctgagaggctgagtggagttcactcacatggattgaggcccagttcctgggagaagagatgctgggcaggaaggtgtctgcatgtgggactctgtacagcccggtcctctcccacgtctgggaggggccagagtcagacaactgctgggttcgtccctaagagaggtcatctgactggctgttcagcctaggctgcacacacccccactttcctctaccaggccacaccggaggcagtgctcacacaggcaagctaccaggccacaacaacgacacccacctcacctctggcacctctgagcatccacgtacttgcaagaactcttgctcacatcagctaagagattgcacctgctgacctagagattccggcctgtgctcctgtgctgctgagcagggcaaccagtagcaccatgtctgtgactggcgggaagatggcaccgtccctcacccaggagatcctcagccacctgggcctggccagcaagactgcagcgtgggggaccctgggcaccctcaggaccttcttgaacttcagcgtggacaaggatgcgcagaggctactgagggccattactggccaaggcgtggaccgcagtgccattgtggacgtgctgaccaaccggagcagagagcaaaggcagctcatctcacgaaacttccaggagcgcacccaacaggacctgatgaagtctctacaggcagcactttccggcaacctggagaggattgtgatggctctgctgcagcccacagcccagtttgacgcccaggaattgaggacagctctgaaggcctcagattctgctgtggacgtggccattgaaattcttgccactcgaaccccaccccagctgcaggagtgcctggcagtctacaaacacaatttccaggtggaggctgtggatgacatcacatctgagaccagtggcatcttgcaggacctgctgttggccctggccaaggggggccgtgacagctactctggaatcattgactataatctggcagaacaagatgtccaggcactgcagcgggcagaaggacctagcagagaggaaacatgggtcccagtcttcacccagcgaaatcctgaacacctcatccgagtgtttgatcagtaccagcggagcactgggcaagagctggaggaggctgtccagaaccgtttccatggagatgctcaggtggctctgctcggcctagcttcggtgatcaagaacacaccgctgtactttgctgacaaacttcatcaagccctccaggaaactgagcccaattaccaagtcctgattcgcatccttatctctcgatgtgagactgaccttctgagtatcagagctgagttcaggaagaaatttgggaagtccctctactcttctctccaggatgcagtgaaaggggattgccagtcagccctcctggccttgtgcagggctgaagacatgtgagacttccctgccccaccccacatgacatccgaggatctgagatttccgtgtttggctgaacctgggagaccagctgggcctccaagtaggataacccctcactgagcaccacattctctagcttcttgttgaggctggaactgtttctttaaaatcccttaattttcccatctcaaaattatatctgtacctgggtcatccagctccttcttgggtgtggggaaatgagttttctttgatagtttctgcctcactcatccctcctgtaccctggccagaacatctcactgatactcgaattcttttggcaaa

SEQ ID NO: 2133 - DNA, 2118 bp, Homo sapiens
  source 1..2118: mol_type = unassigned DNA
acgcacactgagtccaggtcctcctgaaggtcaccagcacagcggggccctgtgttactgtagagagaagtcagttgcttagtttcagcctcctgccggcaccagatgctgaccaggccctcccaggtgctgctgaactccttatctgtggaccctgatgccgagtgcaagtatggcctgtacttcagggacggccggcgcaaggtggactacatcctggtgtaccatcacaagaggccctcgggcaaccggaccctggtcaggagggtgcagcacagcgacaccccctctggggctcgcagcgtcaagcaggaccaccccctgccgggcaagggggcgtcgctggatgcaggctcgggggagcccccgatggactaccacgaggatgacaagcgcttccgcagggaggagtacgagggcaacctcctggaggcgggcctggagctggagcgggacgaggacactaaaatccacggagtcgggtttgtgaaaatccatgccccctggaacgtgctgtgcagagaggccgagtttctgaaactgaagatgccgacgaagaagatgtaccacattaatgagacccgtggcctcctgaaaaaaatcaactctgtgctccagaaaatcacagatcccatccagcccaaagtggctgagcacaggccccagaccatgaagagactctcctatcccttctcccgggagaagcagcatctatttgacttgtctgataaggattcctttttcgacagcaaaacccggagcacgattgtctatgagatcttgaagagaacgacgtgtacaaaggccaagtacagcatgggcatcacgagcctgctggccaatggtgtgtacgcggctgcatacccactgcacgatggagactacaacggtgaaaacgtcgagttcaacgacagaaaactcctgtacgaagagtgggcacgctatggagttttctataagtaccagcccatcgacctggtcaggaagtattttggggagaagatcggcctgtacttcgcctggctgggcgtgtacacccagatgctcatccctgcctccatcgtgggaatcattgtcttcctgtacggatgcgccaccatggatgaaaacatccccagcatggagatgtgtgaccagagacacaatatcaccatgtgcccgctttgcgacaagacctgcagctactggaagatgagctcagcctgcgccacggcccgcgccagccacctcttcgacaaccccgccacggtcttcttctctgtcttcatggccctctgggctgccaccttcatggagcactggaagcggaaacagatgcgactcaactaccgctgggacctcacgggctttgaagaggaagaggatcatcctagagctgaatacgaagccagagtcttggagaagtctctgaagaaagagtccagaaacaaagagactgacaaagtgaagctgacatggagagatcggttcccagcctacctcactaacttggtctccatcatcttcatgattgcagtgacgtttgccatcgtcctcggcgtcatcatctacagaatctccatggccgccgccttggccatgaactcctccccctccgtgcggtccaacatccgggtcacagtcacagccaccgcagtcatcatcaacctagtggtcatcatcctcctggacgaggtgtatggctgcatagcccgatggctcaccaagatcgaggtcccaaagacggagaaaagctttgaggagaggctgatcttcaaggctttcctgctgaagtttgtgaattcctacacccccatcttttacgtggcgttcttcaaaggccggtttgttggacgcccgggcgactacgtgtacattttccgttccttccgaatggaagaggtaaccgaaattttattcatctctggcagccccttctgtcttgcttacgatttgtctacaccatgcacttgggagaagcagctgcagcacatttgttcagcaaagagcagcaggtttctttccttcttgctggaaacttttctgttcccctgatgtggtggggtgggctttaatcttatctggtgtgttcatatagaatcacctagaaggataaagtcgctgtagagttaatgaaag

SEQ ID NO: 2134 - DNA, 4790 bp, Homo sapiens
  source 1..4790: mol_type = unassigned DNA
aaaggcgggccggctggcgtccaagttcctgaccaggcgcgggccggcccgcgggaccagcagccgggtggcggcgcgatcggccccgagaggctcaggcgccccccgcatcgagcgcgcgggccgggcgggccagggcggcgggcggagcgggaggcggccacgtccccggcgggcctgggcgcggggaggcccggccccctgcgagcgcgccgcgaacgctgcggtctccgcccgcagaggccgccggggccgtggatggggagggcgcgccgcccggcggtcccagcgcacaggcggccacgatgagggtcaacgagaagtactcgacgctcccggccgaggaccgcagcgtccacatcatcaacatctgcgccatcgaggacatcggctacctgccgtccgagggcacgctgctgaactccttatctgtggaccctgatgccgagtgcaagtatggcctgtacttcagggacggccggcgcaaggtggactacatcctggtgtaccatcacaagaggccctcgggcaaccggaccctggtcaggagggtgcagcacagcgacaccccctctggggctcgcagcgtcaagcaggaccaccccctgccgggcaagggggcgtcgctggatgcaggctcgggggagcccccgatggactaccacgaggatgacaagcgcttccgcagggaggagtacgagggcaacctcctggaggcgggcctggagctggagcgggacgaggacactaaaatccacggagtcgggtttgtgaaaatccatgccccctggaacgtgctgtgcagagaggccgagtttctgaaactgaagatgccgacgaagaagatgtaccacattaatgagacccgtggcctcctgaaaaaaatcaactctgtgctccagaaaatcacagatcccatccagcccaaagtggctgagcacaggccccagaccatgaagagactctcctatcccttctcccgggagaagcagcatctatttgacttgtctgataaggattcctttttcgacagcaaaacccggagcacgattgtctatgagatcttgaagagaacgacgtgtacaaaggccaagtacagcatgggcatcacgagcctgctggccaatggtgtgtacgcggctgcatacccactgcacgatggagactacaacggtgaaaacgtcgagttcaacgacagaaaactcctgtacgaagagtgggcacgctatggagttttctataagtaccagcccatcgacctggtcaggaagtattttggggagaagatcggcctgtacttcgcctggctgggcgtgtacacccagatgctcatccctgcctccatcgtgggaatcattgtcttcctgtacggatgcgccaccatggatgaaaacatccccagcatggagatgtgtgaccagagacacaatatcaccatgtgcccgctttgcgacaagacctgcagctactggaagatgagctcagcctgcgccacggcccgcgccagccacctcttcgacaaccccgccacggtcttcttctctgtcttcatggccctctgggctgccaccttcatggagcactggaagcggaaacagatgcgactcaactaccgctgggacctcacgggctttgaagaggaagaggaggctgtcaaggatcatcctagagctgaatacgaagccagagtcttggagaagtctctgaagaaagagtccagaaacaaagagaagcgccggcatattccagaggagtcaacaaacaaatggaagcagagggttaagacagccatggcgggggtgaaattgactgacaaagtgaagctgacatggagagatcggttcccagcctacctcactaacttggtctccatcatcttcatgattgcagtgacgtttgccatcgtcctcggcgtcatcatctacagaatctccatggccgccgccttggccatgaactcctccccctccgtgcggtccaacatccgggtcacagtcacagccaccgcagtcatcatcaacctagtggtcatcatcctcctggacgaggtgtatggctgcatagcccgatggctcaccaagatcgaggtcccaaagacggagaaaagctttgaggagaggctgatcttcaaggctttcctgctgaagtttgtgaattcctacacccccatcttttacgtggcgttcttcaaaggccggtttgttggacgcccgggcgactacgtgtacattttccgttccttccgaatggaagagtgtgcgccagggggctgcctgatggagctatgcatccagctcagcatcatcatgctggggaaacagctgatccagaacaacctgttcgagatcggcatcccgaagatgaagaagctcatccgctacctgaagctgaagcagcagagcccccctgaccacgaggagtgtgtgaagaggaaacagcggtacgaggtggattacaacctggagcccttcgcgggcctcaccccagagtacatggaaatgatcatccagtttggcttcgtcaccctgtttgtcgcctccttccccctggccccactgtttgcgctgctgaacaacatcatcgagatccgcctggacgccaaaaagtttgtcactgagctccgaaggccggtagctgtcagagccaaagacatcggaatctggtacaatatcctcagaggcattgggaagcttgctgtcatcatcaatgccttcgtgatctccttcacgtctgacttcatcccgcgcctggtgtacctctacatgtacagtaagaacgggaccatgcacggcttcgtcaaccacaccctctcctccttcaacgtcagtgacttccagaacggcacggcccccaatgaccccctggacctgggctacgaggtgcagatctgcaggtataaagactaccgagagccgccgtggtcggaaaacaagtacgacatctccaaggacttctgggccgtcctggcagcccggctggcgtttgtcatcgtcttccagaacctggtcatgttcatgagcgactttgtggactgggtcatcccggacatccccaaggacatcagccagcagatccacaaggagaaggtgctcatggtggagctgttcatgcgggaggagcaagacaagcagcagctgctggaaacctggatggagaaggagcggcagaaggacgagccgccgtgcaaccaccacaacaccaaagcctgcccagacagcctcggcagcccagcccccagccatgcctaccacgggggcgtcctgtagctatgccagcggggctgggcaggccagccgggcatcctgaccgatgggcaccctctcccagggcaggcggcttcccgctcccaccagggcccggtgggtcctgggttttctgcaaacatggaggaccactttctgataggacattttcctttcttctttctgttttctttcccttgtttttgcacaaagccattatgcagggaatattttttaatctgtagtattcaagatgaatcaaaatgatggctggtaatacggcaataaggtagcaaaggcaggtgctttgcagaaagaatgcttggaaacttgagtctccctagaggtgaaaagtgagcagaggcccgtagaaaccctcctctgaatcctcctaattccttaagatagatgcaaaatggtaagccgaggcatcgcgcaaaagctggtgcgatgcttcagggaaaatggaaaacccacgcaagaataatgattgattccggttccaaaaggtgtcacctacctgtttcagaaaagttagactttccatcgccttttccttccatcagttgagtggctgagagagaagtgcctcatccctgagccacacagggggcgtgggagcatcccagttatccctggaaagctagaaggggacagaggtgtccctgattaagcaggaaacagcacccttggcgtccccagcaggctccccactgtcagccacacacctgcccccatcacaccaagccgacctcagagttgttcatcttccttatgggacaaaaccggttgaccagaaaatgggcagagagagatgacctcggaagcatttccacagatggtgtcagggtttcaagaagtcttagggcttccaggggtcccctggaagctttagaatatttatgggttttttttcaaatatcaattatatggtagattgaggattttttttctgtagctcaaaggtggagggagtttattagttaaccaaatatcgttgagaggaatttaaaatactgttactaccaaagatttttattaataaaggcttatattttggtaacacttctctatatttttactcacaggaatgtcactgttggacaattattttaaaagtgtataaaaccaagtctcataaatgatatgagtgatctaaatttgcagcaatgatactaaacaactctctgaaatttctcaagcaccaagagaaacatcattttagcaaaggccaggaggaaaaatagaaataaatttgtcttgaagatctcattgatgtgatgttacattccctttaatctgccaactgtggtcaaagttcataggtgtcgtacatttccattatttgctaaaatcatgcaatctgatgcttctcttttctcttgtacagtaagtagtttgaagtgggttttgtatataaatactgtattaaaaattaggcaattaccaaaaatccttttatggaaaccatttttttaaaaagtgaatgtacacaaatccacagaggactgtggctggacattcatctaaataaatttgaatatacga

SEQ ID NO: 2135 - DNA, 4443 bp, Homo sapiens
  source 1..4443: mol_type = unassigned DNA
ggatggggagggcgcgccgcccggcggtcccagcgcacaggcggccacgatgagggtcaacgagaagtactcgacgctcccggccgaggaccgcagcgtccacatcatcaacatctgcgccatcgaggacatcggctacctgccgtccgagggcacgctgctgaactccttatctgtggaccctgatgccgagtgcaagtatggcctgtacttcagggacggccggcgcaaggtggactacatcctggtgtaccatcacaagaggccctcgggcaaccggaccctggtcaggagggtgcagcacagcgacaccccctctggggctcgcagcgtcaagcaggaccaccccctgccgggcaagggggcgtcgctggatgcaggctcgggggagcccccgatggactaccacgaggatgacaagcgcttccgcagggaggagtacgagggcaacctcctggaggcgggcctggagctggagcgggacgaggacactaaaatccacggagtcgggtttgtgaaaatccatgccccctggaacgtgctgtgcagagaggccgagtttctgaaactgaagatgccgacgaagaagatgtaccacattaatgagacccgtggcctcctgaaaaaaatcaactctgtgctccagaaaatcacagatcccatccagcccaaagtggctgagcacaggccccagaccatgaagagactctcctatcccttctcccgggagaagcagcatctatttgacttgtctgataaggattcctttttcgacagcaaaacccggagcacgattgtctatgagatcttgaagagaacgacgtgtacaaaggccaagtacagcatgggcatcacgagcctgctggccaatggtgtgtacgcggctgcatacccactgcacgatggagactacaacggtgaaaacgtcgagttcaacgacagaaaactcctgtacgaagagtgggcacgctatggagttttctataagtaccagcccatcgacctggtcaggaagtattttggggagaagatcggcctgtacttcgcctggctgggcgtgtacacccagatgctcatccctgcctccatcgtgggaatcattgtcttcctgtacggatgcgccaccatggatgaaaacatccccagcatggagatgtgtgaccagagacacaatatcaccatgtgcccgctttgcgacaagacctgcagctactggaagatgagctcagcctgcgccacggcccgcgccagccacctcttcgacaaccccgccacggtcttcttctctgtcttcatggccctctgggctgccaccttcatggagcactggaagcggaaacagatgcgactcaactaccgctgggacctcacgggctttgaagaggaagaggatcatcctagagctgaatacgaagccagagtcttggagaagtctctgaagaaagagtccagaaacaaagagactgacaaagtgaagctgacatggagagatcggttcccagcctacctcactaacttggtctccatcatcttcatgattgcagtgacgtttgccatcgtcctcggcgtcatcatctacagaatctccatggccgccgccttggccatgaactcctccccctccgtgcggtccaacatccgggtcacagtcacagccaccgcagtcatcatcaacctagtggtcatcatcctcctggacgaggtgtatggctgcatagcccgatggctcaccaagatcgaggtcccaaagacggagaaaagctttgaggagaggctgatcttcaaggctttcctgctgaagtttgtgaattcctacacccccatcttttacgtggcgttcttcaaaggccggtttgttggacgcccgggcgactacgtgtacattttccgttccttccgaatggaagagtgtgcgccagggggctgcctgatggagctatgcatccagctcagcatcatcatgctggggaaacagctgatccagaacaacctgttcgagatcggcatcccgaagatgaagaagctcatccgctacctgaagctgaagcagcagagcccccctgaccacgaggagtgtgtgaagaggaaacagcggtacgaggtggattacaacctggagcccttcgcgggcctcaccccagagtacatggaaatgatcatccagtttggcttcgtcaccctgtttgtcgcctccttccccctggccccactgtttgcgctgctgaacaacatcatcgagatccgcctggacgccaaaaagtttgtcactgagctccgaaggccggtagctgtcagagccaaagacatcggaatctggtacaatatcctcagaggcattgggaagcttgctgtcatcatcaatgccttcgtgatctccttcacgtctgacttcatcccgcgcctggtgtacctctacatgtacagtaagaacgggaccatgcacggcttcgtcaaccacaccctctcctccttcaacgtcagtgacttccagaacggcacggcccccaatgaccccctggacctgggctacgaggtgcagatctgcaggtataaagactaccgagagccgccgtggtcggaaaacaagtacgacatctccaaggacttctgggccgtcctggcagcccggctggcgtttgtcatcgtcttccagaacctggtcatgttcatgagcgactttgtggactgggtcatcccggacatccccaaggacatcagccagcagatccacaaggagaaggtgctcatggtggagctgttcatgcgggaggagcaagacaagcagcagctgctggaaacctggatggagaaggagcggcagaaggacgagccgccgtgcaaccaccacaacaccaaagcctgcccagacagcctcggcagcccagcccccagccatgcctaccacgggggcgtcctgtagctatgccagcggggctgggcaggccagccgggcatcctgaccgatgggcaccctctcccagggcaggcggcttcccgctcccaccagggcccggtgggtcctgggttttctgcaaacatggaggaccactttctgataggacattttcctttcttctttctgttttctttcccttgtttttgcacaaagccattatgcagggaatattttttaatctgtagtattcaagatgaatcaaaatgatggctggtaatacggcaataaggtagcaaaggcaggtgctttgcagaaagaatgcttggaaacttgagtctccctagaggtgaaaagtgagcagaggcccgtagaaaccctcctctgaatcctcctaattccttaagatagatgcaaaatggtaagccgaggcatcgcgcaaaagctggtgcgatgcttcagggaaaatggaaaacccacgcaagaataatgattgattccggttccaaaaggtgtcacctacctgtttcagaaaagttagactttccatcgccttttccttccatcagttgagtggctgagagagaagtgcctcatccctgagccacacagggggcgtgggagcatcccagttatccctggaaagctagaaggggacagaggtgtccctgattaagcaggaaacagcacccttggcgtccccagcaggctccccactgtcagccacacacctgcccccatcacaccaagccgacctcagagttgttcatcttccttatgggacaaaaccggttgaccagaaaatgggcagagagagatgacctcggaagcatttccacagatggtgtcagggtttcaagaagtcttagggcttccaggggtcccctggaagctttagaatatttatgggttttttttcaaatatcaattatatggtagattgaggattttttttctgtagctcaaaggtggagggagtttattagttaaccaaatatcgttgagaggaatttaaaatactgttactaccaaagatttttattaataaaggcttatattttggtaacacttctctatatttttactcacaggaatgtcactgttggacaattattttaaaagtgtataaaaccaagtctcataaatgatatgagtgatctaaatttgcagcaatgatactaaacaactctctgaaatttctcaagcaccaagagaaacatcattttagcaaaggccaggaggaaaaatagaaataaatttgtcttgaagatctcattgatgtgatgttacattccctttaatctgccaactgtggtcaaagttcataggtgtcgtacatttccattatttgctaaaatcatgcaatctgatgcttctcttttctcttgtacagtaagtagtttgaagtgggttttgtatataaatactgtattaaaaattaggcaattaccaaaaatccttttatggaaaccatttttttaaaaagtgaatgtacacaaatccacagaggactgtggctggacattcatctaaataaatttgaatatacg

SEQ ID NO: 2136 - DNA, 3289 bp, Homo sapiens
  source 1..3289: mol_type = unassigned DNA
tgagtccaggtcctcctgaaggtcaccagcacagcggggccctgtgttactgtagagagaagtcagttgcttagtttcagcctcctgccggcaccagatgctgaccaggccctcccaggtggtgagcaatgctgtttccaggagaggcatcctagggccagagaggccaaggtgccagggacatggccccaactgtcccctaaccaggggtagaggagtctagacccttgacatcaacacctatgaaagctgctgaactccttatctgtggaccctgatgccgagtgcaagtatggcctgtacttcagggacggccggcgcaaggtggactacatcctggtgtaccatcacaagaggccctcgggcaaccggaccctggtcaggagggtgcagcacagcgacaccccctctggggctcgcagcgtcaagcaggaccaccccctgccgggcaagggggcgtcgctggatgcaggctcgggggagcccccgatggactaccacgaggatgacaagcgcttccgcagggaggagtacgagggcaacctcctggaggcgggcctggagctggagcgggacgaggacactaaaatccacggagtcgggtttgtgaaaatccatgccccctggaacgtgctgtgcagagaggccgagtttctgaaactgaagatgccgacgaagaagatgtaccacattaatgagacccgtggcctcctgaaaaaaatcaactctgtgctccagaaaatcacagatcccatccagcccaaagtggctgagcacaggccccagaccatgaagagactctcctatcccttctcccgggagaagcagcatctatttgacttgtctgataaggattcctttttcgacagcaaaacccggagcacgattgtctatgagatcttgaagagaacgacgtgtacaaaggccaagtacagcatgggcatcacgagcctgctggccaatggtgtgtacgcggctgcatacccactgcacgatggagactacaacggtgaaaacgtcgagttcaacgacagaaaactcctgtacgaagagtgggcacgctatggagttttctataagtaccagcccatcgacctggtcaggaagtattttggggagaagatcggcctgtacttcgcctggctgggcgtgtacacccagatgctcatccctgcctccatcgtgggaatcattgtcttcctgtacggatgcgccaccatggatgaaaacatccccagcatggagatgtgtgaccagagacacaatatcaccatgtgcccgctttgcgacaagacctgcagctactggaagatgagctcagcctgcgccacggcccgcgccagccacctcttcgacaaccccgccacggtcttcttctctgtcttcatggccctctgggctgccaccttcatggagcactggaagcggaaacagatgcgactcaactaccgctgggacctcacgggctttgaagaggaagaggatcatcctagagctgaatacgaagccagagtcttggagaagtctctgaagaaagagtccagaaacaaagagactgacaaagtgaagctgacatggagagatcggttcccagcctacctcactaacttggtctccatcatcttcatgattgcagtgacgtttgccatcgtcctcggcgtcatcatctacagaatctccatggccgccgccttggccatgaactcctccccctccgtgcggtccaacatccgggtcacagtcacagccaccgcagtcatcatcaacctagtggtcatcatcctcctggacgaggtgtatggctgcatagcccgatggctcaccaagatcgaggtcccaaagacggagaaaagctttgaggagaggctgatcttcaaggctttcctgctgaagtttgtgaattcctacacccccatcttttacgtggcgttcttcaaaggccggtttgttggacgcccgggcgactacgtgtacattttccgttccttccgaatggaagagtgtgcgccagggggctgcctgatggagctatgcatccagctcagcatcatcatgctggggaaacagctgatccagaacaacctgttcgagatcggcatcccgaagatgaagaagctcatccgctacctgaagctgaagcagcagagcccccctgaccacgaggagtgtgtgaagaggaaacagcggtacgaggtggattacaacctggagcccttcgcgggcctcaccccagagtacatggaaatgatcatccagtttggcttcgtcaccctgtttgtcgcctccttccccctggccccactgtttgcgctgctgaacaacatcatcgagatccgcctggacgccaaaaagtttgtcactgagctccgaaggccggtagctgtcagagccaaagacatcggaatctggtacaatatcctcagaggcattgggaagcttgctgtcatcatcaatgccttcgtgatctccttcacgtctgacttcatcccgcgcctggtgtacctctacatgtacagtaagaacgggaccatgcacggcttcgtcaaccacaccctctcctccttcaacgtcagtgacttccagaacggcacggcccccaatgaccccctggacctgggctacgaggtgcagatctgcaggtataaagactaccgagagccgccgtggtcggaaaacaagtacgacatctccaaggacttctgggccgtcctggcagcccggctggcgtttgtcatcgtcttccagaacctggtcatgttcatgagcgactttgtggactgggtcatcccggacatccccaaggacatcagccagcagatccacaaggagaaggtgctcatggtggagctgttcatgcgggaggagcaagacaagcagcagctgctggaaacctggatggagaaggagcggcagaaggacgagccgccgtgcaaccaccacaacaccaaagcctgcccagacagcctcggcagcccagcccccagccatgcctaccacgggggcgtcctgtagctatgccagcggggctgggcaggccagccgggcatcctgaccgatgggcaccctctcccagggcaggcggcttcccgctcccaccagggcccggaatgtcactgttggacaattattttaaaagtgtataaaaccaagtctcataaatgatatgagtgatctaaatttgcagcaatgatactaaacaactctctgaaatttctcaagcaccaagagaaacatcattttagcaaaggccaggaggaaaaatagaaataaatttgtcttgaagatctca

SEQ ID NO: 2137 - DNA, 4533 bp, Homo sapiens
  source 1..4533: mol_type = unassigned DNA
ggatggggagggcgcgccgcccggcggtcccagcgcacaggcggccacgatgagggtcaacgagaagtactcgacgctcccggccgaggaccgcagcgtccacatcatcaacatctgcgccatcgaggacatcggctacctgccgtccgagggcacgctgctgaactccttatctgtggaccctgatgccgagtgcaagtatggcctgtacttcagggacggccggcgcaaggtggactacatcctggtgtaccatcacaagaggccctcgggcaaccggaccctggtcaggagggtgcagcacagcgacaccccctctggggctcgcagcgtcaagcaggaccaccccctgccgggcaagggggcgtcgctggatgcaggctcgggggagcccccgatggactaccacgaggatgacaagcgcttccgcagggaggagtacgagggcaacctcctggaggcgggcctggagctggagcgggacgaggacactaaaatccacggagtcgggtttgtgaaaatccatgccccctggaacgtgctgtgcagagaggccgagtttctgaaactgaagatgccgacgaagaagatgtaccacattaatgagacccgtggcctcctgaaaaaaatcaactctgtgctccagaaaatcacagatcccatccagcccaaagtggctgagcacaggccccagaccatgaagagactctcctatcccttctcccgggagaagcagcatctatttgacttgtctgataaggattcctttttcgacagcaaaacccggagcacgattgtctatgagatcttgaagagaacgacgtgtacaaaggccaagtacagcatgggcatcacgagcctgctggccaatggtgtgtacgcggctgcatacccactgcacgatggagactacaacggtgaaaacgtcgagttcaacgacagaaaactcctgtacgaagagtgggcacgctatggagttttctataagtaccagcccatcgacctggtcaggaagtattttggggagaagatcggcctgtacttcgcctggctgggcgtgtacacccagatgctcatccctgcctccatcgtgggaatcattgtcttcctgtacggatgcgccaccatggatgaaaacatccccagcatggagatgtgtgaccagagacacaatatcaccatgtgcccgctttgcgacaagacctgcagctactggaagatgagctcagcctgcgccacggcccgcgccagccacctcttcgacaaccccgccacggtcttcttctctgtcttcatggccctctgggctgccaccttcatggagcactggaagcggaaacagatgcgactcaactaccgctgggacctcacgggctttgaagaggaagagaaagcacttctggatcatcctagagctgaatacgaagccagagtcttggagaagtctctgaagaaagagtccagaaacaaagagaagcgccggcatattccagaggagtcaacaaacaaatggaagcagagggttaagacagccatggcgggggtgaaattgactgacaaagtgaagctgacatggagagatcggttcccagcctacctcactaacttggtctccatcatcttcatgattgcagtgacgtttgccatcgtcctcggcgtcatcatctacagaatctccatggccgccgccttggccatgaactcctccccctccgtgcggtccaacatccgggtcacagtcacagccaccgcagtcatcatcaacctagtggtcatcatcctcctggacgaggtgtatggctgcatagcccgatggctcaccaagatcgaggtcccaaagacggagaaaagctttgaggagaggctgatcttcaaggctttcctgctgaagtttgtgaattcctacacccccatcttttacgtggcgttcttcaaaggccggtttgttggacgcccgggcgactacgtgtacattttccgttccttccgaatggaagagtgtgcgccagggggctgcctgatggagctatgcatccagctcagcatcatcatgctggggaaacagctgatccagaacaacctgttcgagatcggcatcccgaagatgaagaagctcatccgctacctgaagctgaagcagcagagcccccctgaccacgaggagtgtgtgaagaggaaacagcggtacgaggtggattacaacctggagcccttcgcgggcctcaccccagagtacatggaaatgatcatccagtttggcttcgtcaccctgtttgtcgcctccttccccctggccccactgtttgcgctgctgaacaacatcatcgagatccgcctggacgccaaaaagtttgtcactgagctccgaaggccggtagctgtcagagccaaagacatcggaatctggtacaatatcctcagaggcattgggaagcttgctgtcatcatcaatgccttcgtgatctccttcacgtctgacttcatcccgcgcctggtgtacctctacatgtacagtaagaacgggaccatgcacggcttcgtcaaccacaccctctcctccttcaacgtcagtgacttccagaacggcacggcccccaatgaccccctggacctgggctacgaggtgcagatctgcaggtataaagactaccgagagccgccgtggtcggaaaacaagtacgacatctccaaggacttctgggccgtcctggcagcccggctggcgtttgtcatcgtcttccagaacctggtcatgttcatgagcgactttgtggactgggtcatcccggacatccccaaggacatcagccagcagatccacaaggagaaggtgctcatggtggagctgttcatgcgggaggagcaagacaagcagcagctgctggaaacctggatggagaaggagcggcagaaggacgagccgccgtgcaaccaccacaacaccaaagcctgcccagacagcctcggcagcccagcccccagccatgcctaccacgggggcgtcctgtagctatgccagcggggctgggcaggccagccgggcatcctgaccgatgggcaccctctcccagggcaggcggcttcccgctcccaccagggcccggtgggtcctgggttttctgcaaacatggaggaccactttctgataggacattttcctttcttctttctgttttctttcccttgtttttgcacaaagccattatgcagggaatattttttaatctgtagtattcaagatgaatcaaaatgatggctggtaatacggcaataaggtagcaaaggcaggtgctttgcagaaagaatgcttggaaacttgagtctccctagaggtgaaaagtgagcagaggcccgtagaaaccctcctctgaatcctcctaattccttaagatagatgcaaaatggtaagccgaggcatcgcgcaaaagctggtgcgatgcttcagggaaaatggaaaacccacgcaagaataatgattgattccggttccaaaaggtgtcacctacctgtttcagaaaagttagactttccatcgccttttccttccatcagttgagtggctgagagagaagtgcctcatccctgagccacacagggggcgtgggagcatcccagttatccctggaaagctagaaggggacagaggtgtccctgattaagcaggaaacagcacccttggcgtccccagcaggctccccactgtcagccacacacctgcccccatcacaccaagccgacctcagagttgttcatcttccttatgggacaaaaccggttgaccagaaaatgggcagagagagatgacctcggaagcatttccacagatggtgtcagggtttcaagaagtcttagggcttccaggggtcccctggaagctttagaatatttatgggttttttttcaaatatcaattatatggtagattgaggattttttttctgtagctcaaaggtggagggagtttattagttaaccaaatatcgttgagaggaatttaaaatactgttactaccaaagatttttattaataaaggcttatattttggtaacacttctctatatttttactcacaggaatgtcactgttggacaattattttaaaagtgtataaaaccaagtctcataaatgatatgagtgatctaaatttgcagcaatgatactaaacaactctctgaaatttctcaagcaccaagagaaacatcattttagcaaaggccaggaggaaaaatagaaataaatttgtcttgaagatctcattgatgtgatgttacattccctttaatctgccaactgtggtcaaagttcataggtgtcgtacatttccattatttgctaaaatcatgcaatctgatgcttctcttttctcttgtacagtaagtagtttgaagtgggttttgtatataaatactgtattaaaaattaggcaattaccaaaaatccttttatggaaaccatttttttaaaaagtgaatgtacacaaatccacagaggactgtggctggacattcatctaaataaatttgaatatacg

SEQ ID NO: 2138 - DNA, 2465 bp, Homo sapiens
  source 1..2465: mol_type = unassigned DNA
atgctggatgcagcatccaaagccagagaagccccagaggcagctcccgggtgggatgatccccagggggagggccgcaggggcagaggcgagggactgtcctgggcagtgggtccccacccggatccaggagtcctgatgcaaggggaagtttggtctggaagattcagccatgcagtcatccagtttggcttcgtcaccctgtttgtcgcctccttccccctggccccactgtttgcgctgctgaacaacatcatcgagatccgcctggacgccaaaaagtttgtcactgagctccgaaggccggtagctgtcagagccaaagacatcggaatctggtacaatatcctcagaggcattgggaagcttgctgtcatcatcaatgccttcgtgatctccttcacgtctgacttcatcccgcgcctggtgtacctctacatgtacagtaagaacgggaccatgcacggcttcgtcaaccacaccctctcctccttcaacgtcagtgacttccagaacggcacggcccccaatgaccccctggacctgggctacgaggtgcagatctgcaggtataaagactaccgagagccgccgtggtcggaaaacaagtacgacatctccaaggacttctgggccgtcctggcagcccggctggcgtttgtcatcgtcttccagaacctggtcatgttcatgagcgactttgtggactgggtcatcccggacatccccaaggacatcagccagcagatccacaaggagaaggtgctcatggtggagctgttcatgcgggaggagcaagacaagcagcagctgctggaaacctggatggagaaggagcggcagaaggacgagccgccgtgcaaccaccacaacaccaaagcctgcccagacagcctcggcagcccagcccccagccatgcctaccacgggggcgtcctgtagctatgccagcggggctgggcaggccagccgggcatcctgaccgatgggcaccctctcccagggcaggcggcttcccgctcccaccagggcccggtgggtcctgggttttctgcaaacatggaggaccactttctgataggacattttcctttcttctttctgttttctttcccttgtttttgcacaaagccattatgcagggaatattttttaatctgtagtattcaagatgaatcaaaatgatggctggtaatacggcaataaggtagcaaaggcaggtgctttgcagaaagaatgcttggaaacttgagtctccctagaggtgaaaagtgagcagaggcccgtagaaaccctcctctgaatcctcctaattccttaagatagatgcaaaatggtaagccgaggcatcgcgcaaaagctggtgcgatgcttcagggaaaatggaaaacccacgcaagaataatgattgattccggttccaaaaggtgtcacctacctgtttcagaaaagttagactttccatcgccttttccttccatcagttgagtggctgagagagaagtgcctcatccctgagccacacagggggcgtgggagcatcccagttatccctggaaagctagaaggggacagaggtgtccctgattaagcaggaaacagcacccttggcgtccccagcaggctccccactgtcagccacacacctgcccccatcacaccaagccgacctcagagttgttcatcttccttatgggacaaaaccggttgaccagaaaatgggcagagagagatgacctcggaagcatttccacagatggtgtcagggtttcaagaagtcttagggcttccaggggtcccctggaagctttagaatatttatgggttttttttcaaatatcaattatatggtagattgaggattttttttctgtagctcaaaggtggagggagtttattagttaaccaaatatcgttgagaggaatttaaaatactgttactaccaaagatttttattaataaaggcttatattttggtaacacttctctatatttttactcacaggaatgtcactgttggacaattattttaaaagtgtataaaaccaagtctcataaatgatatgagtgatctaaatttgcagcaatgatactaaacaactctctgaaatttctcaagcaccaagagaaacatcattttagcaaaggccaggaggaaaaatagaaataaatttgtcttgaagatctcattgatgtgatgttacattccctttaatctgccaactgtggtcaaagttcataggtgtcgtacatttccattatttgctaaaatcatgcaatctgatgcttctcttttctcttgtacagtaagtagtttgaagtgggttttgtatataaatactgtattaaaaattaggcaattaccaaaaatccttttatggaaaccatttttttaaaaagtgaatgtacacaaatccacagaggactgtggctggacattcatctaaataaatttgaatatacg

SEQ ID NO: 2139 - DNA, 4455 bp, Homo sapiens
  source 1..4455: mol_type = unassigned DNA
ggatggggagggcgcgccgcccggcggtcccagcgcacaggcggccacgatgagggtcaacgagaagtactcgacgctcccggccgaggaccgcagcgtccacatcatcaacatctgcgccatcgaggacatcggctacctgccgtccgagggcacgctgctgaactccttatctgtggaccctgatgccgagtgcaagtatggcctgtacttcagggacggccggcgcaaggtggactacatcctggtgtaccatcacaagaggccctcgggcaaccggaccctggtcaggagggtgcagcacagcgacaccccctctggggctcgcagcgtcaagcaggaccaccccctgccgggcaagggggcgtcgctggatgcaggctcgggggagcccccgatggactaccacgaggatgacaagcgcttccgcagggaggagtacgagggcaacctcctggaggcgggcctggagctggagcgggacgaggacactaaaatccacggagtcgggtttgtgaaaatccatgccccctggaacgtgctgtgcagagaggccgagtttctgaaactgaagatgccgacgaagaagatgtaccacattaatgagacccgtggcctcctgaaaaaaatcaactctgtgctccagaaaatcacagatcccatccagcccaaagtggctgagcacaggccccagaccatgaagagactctcctatcccttctcccgggagaagcagcatctatttgacttgtctgataaggattcctttttcgacagcaaaacccggagcacgattgtctatgagatcttgaagagaacgacgtgtacaaaggccaagtacagcatgggcatcacgagcctgctggccaatggtgtgtacgcggctgcatacccactgcacgatggagactacaacggtgaaaacgtcgagttcaacgacagaaaactcctgtacgaagagtgggcacgctatggagttttctataagtaccagcccatcgacctggtcaggaagtattttggggagaagatcggcctgtacttcgcctggctgggcgtgtacacccagatgctcatccctgcctccatcgtgggaatcattgtcttcctgtacggatgcgccaccatggatgaaaacatccccagcatggagatgtgtgaccagagacacaatatcaccatgtgcccgctttgcgacaagacctgcagctactggaagatgagctcagcctgcgccacggcccgcgccagccacctcttcgacaaccccgccacggtcttcttctctgtcttcatggccctctgggctgccaccttcatggagcactggaagcggaaacagatgcgactcaactaccgctgggacctcacgggctttgaagaggaagagaaagcacttctggatcatcctagagctgaatacgaagccagagtcttggagaagtctctgaagaaagagtccagaaacaaagagactgacaaagtgaagctgacatggagagatcggttcccagcctacctcactaacttggtctccatcatcttcatgattgcagtgacgtttgccatcgtcctcggcgtcatcatctacagaatctccatggccgccgccttggccatgaactcctccccctccgtgcggtccaacatccgggtcacagtcacagccaccgcagtcatcatcaacctagtggtcatcatcctcctggacgaggtgtatggctgcatagcccgatggctcaccaagatcgaggtcccaaagacggagaaaagctttgaggagaggctgatcttcaaggctttcctgctgaagtttgtgaattcctacacccccatcttttacgtggcgttcttcaaaggccggtttgttggacgcccgggcgactacgtgtacattttccgttccttccgaatggaagagtgtgcgccagggggctgcctgatggagctatgcatccagctcagcatcatcatgctggggaaacagctgatccagaacaacctgttcgagatcggcatcccgaagatgaagaagctcatccgctacctgaagctgaagcagcagagcccccctgaccacgaggagtgtgtgaagaggaaacagcggtacgaggtggattacaacctggagcccttcgcgggcctcaccccagagtacatggaaatgatcatccagtttggcttcgtcaccctgtttgtcgcctccttccccctggccccactgtttgcgctgctgaacaacatcatcgagatccgcctggacgccaaaaagtttgtcactgagctccgaaggccggtagctgtcagagccaaagacatcggaatctggtacaatatcctcagaggcattgggaagcttgctgtcatcatcaatgccttcgtgatctccttcacgtctgacttcatcccgcgcctggtgtacctctacatgtacagtaagaacgggaccatgcacggcttcgtcaaccacaccctctcctccttcaacgtcagtgacttccagaacggcacggcccccaatgaccccctggacctgggctacgaggtgcagatctgcaggtataaagactaccgagagccgccgtggtcggaaaacaagtacgacatctccaaggacttctgggccgtcctggcagcccggctggcgtttgtcatcgtcttccagaacctggtcatgttcatgagcgactttgtggactgggtcatcccggacatccccaaggacatcagccagcagatccacaaggagaaggtgctcatggtggagctgttcatgcgggaggagcaagacaagcagcagctgctggaaacctggatggagaaggagcggcagaaggacgagccgccgtgcaaccaccacaacaccaaagcctgcccagacagcctcggcagcccagcccccagccatgcctaccacgggggcgtcctgtagctatgccagcggggctgggcaggccagccgggcatcctgaccgatgggcaccctctcccagggcaggcggcttcccgctcccaccagggcccggtgggtcctgggttttctgcaaacatggaggaccactttctgataggacattttcctttcttctttctgttttctttcccttgtttttgcacaaagccattatgcagggaatattttttaatctgtagtattcaagatgaatcaaaatgatggctggtaatacggcaataaggtagcaaaggcaggtgctttgcagaaagaatgcttggaaacttgagtctccctagaggtgaaaagtgagcagaggcccgtagaaaccctcctctgaatcctcctaattccttaagatagatgcaaaatggtaagccgaggcatcgcgcaaaagctggtgcgatgcttcagggaaaatggaaaacccacgcaagaataatgattgattccggttccaaaaggtgtcacctacctgtttcagaaaagttagactttccatcgccttttccttccatcagttgagtggctgagagagaagtgcctcatccctgagccacacagggggcgtgggagcatcccagttatccctggaaagctagaaggggacagaggtgtccctgattaagcaggaaacagcacccttggcgtccccagcaggctccccactgtcagccacacacctgcccccatcacaccaagccgacctcagagttgttcatcttccttatgggacaaaaccggttgaccagaaaatgggcagagagagatgacctcggaagcatttccacagatggtgtcagggtttcaagaagtcttagggcttccaggggtcccctggaagctttagaatatttatgggttttttttcaaatatcaattatatggtagattgaggattttttttctgtagctcaaaggtggagggagtttattagttaaccaaatatcgttgagaggaatttaaaatactgttactaccaaagatttttattaataaaggcttatattttggtaacacttctctatatttttactcacaggaatgtcactgttggacaattattttaaaagtgtataaaaccaagtctcataaatgatatgagtgatctaaatttgcagcaatgatactaaacaactctctgaaatttctcaagcaccaagagaaacatcattttagcaaaggccaggaggaaaaatagaaataaatttgtcttgaagatctcattgatgtgatgttacattccctttaatctgccaactgtggtcaaagttcataggtgtcgtacatttccattatttgctaaaatcatgcaatctgatgcttctcttttctcttgtacagtaagtagtttgaagtgggttttgtatataaatactgtattaaaaattaggcaattaccaaaaatccttttatggaaaccatttttttaaaaagtgaatgtacacaaatccacagaggactgtggctggacattcatctaaataaatttgaatatacg

SEQ ID NO: 2140 - DNA, 3212 bp, Homo sapiens
  source 1..3212: mol_type = unassigned DNA
gaccgcatctaggccccgccgcgtccgccacgcccagcgctcggcggcgcccgccccactggcctggcccgccccccgcaccgagcactctttcgcccggcctccggttctcgccggctctcggacccgcctccgaagacgtggagcgctgcggcggctgatttgtcaaagatgaaagtgaccttatcagctttggatacttctgagagttctttcacacctttggtggtcatagaacttgctcaggatgtcaaagaagaaaccaaagaatggctgaaaaacagaattatagctaaaaaaaaagatggaggtgcccagttgttgtttagaccattgttaaataaatatgaacaagaaacactagaaaatcagaacttatatcttgttggtgcctccaagattagaatgttactaggggcagaagcagtgggattggtaaaagagtgcaatgataacaccatgagagccttcacatacagaaccagacagaacttcaaaggttttgatgataacaatgatgatttcctgacaatggcagaatgtcaattcattatcaaacatgaacttgaaaatcttagagctaaagatgaaaaaatgatccctggttaccctcaggcaaagttgtatccaggaaaatcattgttgagaagattgctcacgtctggcatcgtgattcaggtgtttccactgcatgacagtgaagccctgaagaagcttgaggacacctggtacactcggtttgctttgaagtatcagcccatagacagtattcgtggctactttggggaaacaattgctctgtactttggatttttggagtatttcacttttgcattaatccccatggctgtcattgggttaccttactacttgtttgtgtgggaagactatgacaagtacgtgatctttgcctcgttcaacctcatctggtccacggtgattctggaactgtggaagcgtggctgtgccaacatgacctacaggtgggggacactgctcatgaagagaaagtttgaggagccccggccaggatttcatggtgtcttgggtatcaattccatcactgggaaggaggagcctctgtaccccagctacaagagacagttgcgcatttacctggtctccctgccattcgtgtgcctctgcctctatttctcactgtatgtcatgatgatttacttcgacatggaggtttgggccttgggtctacatgagaacagcgggtctgagtggaccagtgtcctgttgtatgtgcccagcatcatctatgccattgtgattgagatcatgaatcgtctctatcgatatgctgccgagtttttaacttcatgggagaatcacagattggaatctgcctatcagaaccatctaattctgaaagttttagtgttcaacttcctcaattgctttgcctcactcttctatattgcctttgtcttgaaagatatgaagcttttgcgccagagcttggccactctcctaattacctcccagatcctcaaccaaattatggaatcttttcttccttattggctccaaaggaagcatggtgtgcgggtgaagaggaaggtgcaggctttaaaggcagacattgatgctacattatatgaacaagtcatcctggaaaaagaaatgggaacttatttgggcacctttgatgattacttggagttattcctgcagtttggttatgtgagccttttctcctgtgtttacccattagcagctgcctttgctgtgttaaataacttcactgaagtaaattcagatgccttaaaaatgtgcagggtcttcaaacgtccattctcagaaccttcagccaatattggtgtgtggcagttggcttttgaaacgatgagtgttatatctgtggtcactaactgtgcgctgattggaatgtcaccacaagtgaatgcagtctttccagaatcaaaagcagacctcattttgattgtagtagcagtggagcacgcactcctggctttaaagtttatacttgcatttgccatacctgataagccacggcatatccagatgaaactagccagactggaatttgagtctttggaggcactcaagcagcagcaaatgaagctcgtgaccgagaacctgaaggaggaaccaatggaaagcgggaaggagaaggcaacctgagtgcccagcgtgcccagctgccctgttggcagaggcctgtgtctgtgccacacctgccacggtggcagggggggtacccggggcagcatcgtggctcctgaacccagacccaatgcttagccaaacgaagtggctcccatgtggcaagcacccttctcagtttcgcagtggcttggctcgggatccttggcagttcccccagccccaccctgtctgctccttcccagttccttcccgggccccacacgctgctccagctgccaactttgctgcagagccactgccgcccttgagcctctcaccatgagtgagccaccagctctccacgttcccctcatagcagtgtcactcccaaccccaccatggcccagggacccgtggacaggttggggatggggtgtgtgcccactgtgctcatcacaggagcctcagttgagagtgagcggggtacagtaaggcagtgcttcccacactggacctctttcctggttctcttttgcaatacattaacagaccctttatcaacataaacaatagtaactgagctattaaaggcaacctctctgactccttctgcctacataggtaccgcaatgggcttcccttttctgaagcacttggtgaggtcactgaaggtggagcggtgagatcaggagcccagggtgaggggcttggctggaggccaggcaccaaagcttgtagctgaaggctgggccatttttgagaactgctgctggtggtgcccacctacagggacactagggctgctttcacatgcagggtgtacccatggtgccaagccaagggccagcagccactcctggtgccctggcctgggcttgggcttgcagagaaaagggccctccttgcccagtggtgctgcccacctccctagctgtgtccatggactgccctgcattcacaggcacaagaatgccatgtaggccagtgctgcccacgtatacagcccttcccaccagcgctggccgtcctgctgtagccaagacactacagacccgtgggcacctccactcggacagcagcagatgccctggccc

SEQ ID NO: 2141 - DNA, 2039 bp, Homo sapiens
  source 1..2039: mol_type = unassigned DNA
ccggttctcgccggctctcggacccgcctccgaagacgtggagcgctgcggcggctgatttgtcaaagatgaaagtgaccttatcagctttggatacttctgagagttctttcacacctttggtggtcatagaacttgctcaggatgtcaaagaagaaaccaaagaatggctgaaaaacagaattatagctaaaaaaaaagatggaggtgcccagttgttgtttagaccattgttaaataaatatgaacaagaaacactagaaaatcagaacttatatcttgttggtgcctccaagattagaatgttactaggggcagaagcagtgggattggtaaaagagtgcaatgataacaccatgagagccttcacatacagaaccagacagaacttcaaaggttttgatgataacaatgatgatttcctgacaatggcagaatgtcaattcattatcaaacatgaacttgaaaatcttagagctaaagatgaaaaaatgatccctggttaccctcaggcaaagttgtatccaggaaaatcattgttgagaagattgctcacgtctggcatcgtgattcaggtgtttccactgcatgacagtgaagccctgaagaagcttgaggacacctggtacactcggtttgctttgaagtatcagcccatagagaatcacagattggaatctgcctatcagaaccatctaattctgaaagttttagtgttcaacttcctcaattgctttgcctcactcttctatattgcctttgtcttgaaagatatgaagcttttgcgccagagcttggccactctcctaattacctcccagatcctcaaccaaattatggaatcttttcttccttattggctccaaaggaagcatggtgtgcgggtgaagaggaaggtgcaggctttaaaggcagacattgatgctacattatatgaacaagtcatcctggaaaaagaaatgggaacttatttgggcacctttgatgattacttggagttattcctgcagtttggttatgtgagccttttctcctgtgtttacccattagcagctgcctttgctgtgttaaataacttcactgaagtaaattcagatgccttaaaaatgtgcagggtcttcaaacgtccattctcagaaccttcagccaatattggtgtgtggcagttggcttttgaaacgatgagtgttatatctgtggtcactaactgtgcgctgattggaatgtcaccacaagtgaatgcagtctttccagaatcaaaagcagacctcattttgattgtagtagcagtggagcacgcactcctggctttaaagtttatacttgcatttgccatacctgataagccacggcatatccagatgaaactagccagactggaatttgagtctttggaggcactcaagcagcagcaaatgaagctcgtgaccgagaacctgaaggaggaaccaatggaaagcgggaaggagaaggcaacctgagtgcccagcgtgcccagctgccctgttggcagaggcctgtgtctgtgccacacctgccacggtggcagggggggtacccggggcagcatcgtggctcctgaacccagacccaatgcttagccaaacgaagtggctcccatgtggcaagcacccttctcagtttcgcagtggcttggctcgggatccttggcagttcccccagccccaccctgtctgctccttcccagttccttcccgggccccacacgctgctccagctgccaactttgctgcagagccactgccgcccttgagcctctcaccatgagtgagccaccagctctccacgttcccctcatagcagtgtcactcccaaccccaccatggcccagggacccgtggacaggttggggatggggtgtgtgcccactgtgctcatcacaggagcctcagttgagagtgagcggggtacagtaaggcagtgcttcccacactggacctctttcctggttctcttttgcaatacattaacagaccctttatcaacataaacaatagtaactgagctattaaaggcaa

SEQ ID NO: 2142 - DNA, 511 bp, Homo sapiens
  source 1..511: mol_type = unassigned DNA
atcccctccaaggaagcgccgccccttcctacggctacgggaaggatcgtccagtggctgaggctggacagagcacagatttgtcaaagatgaaagtgaccttatcagctttggatacttctgagagttctttcacacctttggtggtcatagaacttgctcaggatgtcaaagaagaaaccaaagaatggctgaaaaacagaattatagctaaaaaaaaagatggaggtgcccagttgttgtttagaccattgttaaataaatatgaacaagaaacactagaaaatcagaacttatatcttgttggtgcctccaagattagaatgttactaggggcagaagcagtgggattggtaaaagagtgcaatgataacaccatgagagccttcacatacagaaccagacagaacttcaaaggttttgatgataacaatgatgatttcctgacaatggcagaatgtcaattcattatcaaacatgaacttgaaaatcttagagctaaagatgaaaa

SEQ ID NO: 2143 - DNA, 641 bp, Homo sapiens
  source 1..641: mol_type = unassigned DNA
gcgtccgccatccccagccagcatgcactagttctcccgcccgacgctcccgggtgtaagcgcggggcgggacagtcagcccagagggactggcgagactcacccgaatgagttaggtgttttagctaatttgaataatgactgtattcatgcatcaccccgtcggtgttggctgtcaggtggcaccttggggacggagtagagatggggtttcaccatgttggccaggatggtctcaatcttctgacctcatgatccgcccacctcggcctcccaaggtgctgggattacagatttgtcaaagatgaaagtgaccttatcagctttggatacttctgagagttctttcacacctttggtggtcatagaacttgctcaggatgtcaaagaagaaaccaaagaatggctgaaaaacagaattatagctaaaaaaaaagatggaggtgcccagttgttgtttagaccattgttaaataaatatgaacaagaaacactagaaaatcagaacttatatcttgttggtgcctccaagattagaatgttactaggggcagaagcagtgggattggtaaaagagtgcaatgataacaccatgagagccttcacatacagaaccagacagaacttcaaaggttttgatg

SEQ ID NO: 2144 - DNA, 497 bp, Homo sapiens
  source 1..497: mol_type = unassigned DNA
ggctttgcgtccgccatccccagccagcatgcactagttctcccgcccgacgctcccgggtgtaagcgcggggcgggacagtcagcccagagggactggcgagactcacccgaatgagttaggtgttttagctaatttgaataatgactgtattcatgcatcaccccgtcggtgttggctgtcaggtggcaccttggggacggaggtgcgtccggtcctggaagagcctagctagtgtccgatagatggtgcagtggcaaatgaaatggcgtaatcgagagatggggtttcaccatgttggccaggatggtctcaatcttctgacctcatgatccgcccacctcggcctcccaaggtgctgggattacagatttgtcaaagatgaaagtgaccttatcagctttggatacttctgagagttctttcacacctttggtggtcatagaacttgctcaggatgtcaaagaagaaaccaaagaatggctgaaaaacagaat

SEQ ID NO: 2145 - DNA, 560 bp, Homo sapiens
  source 1..560: mol_type = unassigned DNA
ttcctacggctacgggaaggatcgtccagtggctgaggctggacagagcacagtagagatggggtttcaccatgttggccaggatggtctcaatcttctgacctcatgatccgcccacctcggcctcccaaggtgctgggattacagatttgtcaaagatgaaagtgaccttatcagctttggatacttctgagagttctttcacacctttggtggtcatagaacttgctcaggatgtcaaagaagaaaccaaagaatggctgaaaaacagaattatagctaaaaaaaaagatggaggtgcccagttgttgtttagaccattgttaaataaatatgaacaagaaacactagaaaatcagaacttatatcttgttggtgcctccaagattagaatgttactaggggcagaagcagtgggattggtaaaagagtgcaatgataacaccatgagagccttcacatacagaaccagacagaacttcaaaggttttgatgataacaatgatgatttcctgacaatggcagaatgtcaattcattatcaaacatgaacttgaaaat

SEQ ID NO: 2146 - DNA, 575 bp, Homo sapiens
  source 1..575: mol_type = unassigned DNA
agggcacctcggaccccccagctgtccgcagcagagcccggccccttgcagccacagagccccggccgctgcaggctccaggagctccgcctggtcgccgccctgcgttcccgggccgcctcccgatttgtcaaagatgaaagtgaccttatcagctttggatacttctgagagttctttcacacctttggtggtcatagaacttgctcaggatgtcaaagaagaaaccaaagaatggctgaaaaacagaattatagctaaaaaaaaagatggaggtgcccagttgttgtttagaccattgttaaataaatatgaacaagaaacactagaaaatcagaacttatatcttgttggtgcctccaagattagaatgttactaggggcagaagcagtgggattggtaaaagagtgcaatgataacaccatgagagccttcacatacagaaccagacagaacttcaaaggttttgatgataacaatgatgatttcctgacaatggcagaatgtcaattcattatcaaacatgaacttgaaaatcttagagctaaagatgaaaaaatgatccctggttacc

SEQ ID NO: 2147 - DNA, 545 bp, Homo sapiens
  source 1..545: mol_type = unassigned DNA
gctctcggacccgcctccgaagacgtggagcgctgcggcggctggcagctgccctaggtacaaggagggaggctcccacaattgctctcaccattaactgcctgcctgtagatttgtcaaagatgaaagtgaccttatcagctttggatacttctgagagttctttcacacctttggtggtcatagaacttgctcaggatgtcaaagaagaaaccaaagaatggctgaaaaacagaattatagctaaaaaaaaagatggaggtgcccagttgttgtttagaccattgttaaataaatatgaacaagaaacactagaaaatcagaacttatatcttgttggtgcctccaagattagaatgttactaggggcagaagcagtgggattggtaaaagagtgcaatgataacaccatgagagccttcacatacagaaccagacagaacttcaaaggttttgatgataacaatgatgatttcctgacaatggcagaatgtcaattcattatcaaacatgaacttgaaaatcttagagctaaagatgaaaaa

SEQ ID NO: 2148 - DNA, 2419 bp, Homo sapiens
  source 1..2419: mol_type = unassigned DNA
gcactctttcgcccggcctccggttctcgccggctctcggacccgcctccgaagacgtggagcgctgcggcggctgatttgtcaaagatgaaagtgaccttatcagctttggatacttctgagagttctttcacacctttggtggtcatagaacttgctcaggatgtcaaagaagaaaccaaagaatggctgaaaaacagaattatagctaaaaaaaaagatggagataacaatgatgatttcctgacaatggcagaatgtcaattcattatcaaacatgaacttgaaaatcttagagctaaagatgaaaaaatgatccctggttaccctcaggcaaagttgtatccaggaaaatcattgttgagaagattgctcacgtctggcatcgtgattcaggtgtttccactgcatgacagtgaagccctgaagaagcttgaggacacctggtacactcggtttgctttgaagtatcagcccatagacagtattcgtggctactttggggaaacaattgctctgtactttggatttttggagtatttcacttttgcattaatccccatggctgtcattgggttaccttactacttgtttgtgtgggaagactatgacaagtacgtgatctttgcctcgttcaacctcatctggtccacggtgattctggaactgtggaagcgtggctgtgccaacatgacctacaggtgggggacactgctcatgaagagaaagtttgaggagccccggccaggatttcatggtgtcttgggtatcaattccatcactgggaaggaggagcctctgtaccccagctacaagagacagttgcgcatttacctggtctccctgccattcgtgtgcctctgcctctatttctcactgtatgtcatgatgatttacttcgacatggaggtttgggccttgggtctacatgagaacagcgggtctgagtggaccagtgtcctgttgtatgtgcccagcatcatctatgccattgtgattgagatcatgaatcgtctctatcgatatgctgccgagtttttaacttcatgggagaatcacagattggaatctgcctatcagaaccatctaattctgaaagttttagtgttcaacttcctcaattgctttgcctcactcttctatattgcctttgtcttgaaagatatgaagcttttgcgccagagcttggccactctcctaattacctcccagatcctcaaccaaattatggaatcttttcttccttattggctccaaaggaagcatggtgtgcgggtgaagaggaaggtgcaggctttaaaggcagacattgatgctacattatatgaacaagtcatcctggaaaaagaaatgggaacttatttgggcacctttgatgattacttggagttattcctgcagtttggttatgtgagccttttctcctgtgtttacccattagcagctgcctttgctgtgttaaataacttcactgaagtaaattcagatgccttaaaaatgtgcagggtcttcaaacgtccattctcagaaccttcagccaatattggtgtgtggcagttggcttttgaaacgatgagtgttatatctgtggtcactaactgtgcgctgattggaatgtcaccacaagtgaatgcagtctttccagaatcaaaagcagacctcattttgattgtagtagcagtggagcacgcactcctggctttaaagtttatacttgcatttgccatacctgataagccacggcatatccagatgaaactagccagactggaatttgagtctttggaggcactcaagcagcagcaaatgaagctcgtgaccgagaacctgaaggaggaaccaatggaaagcgggaaggagaaggcaacctgagtgcccagcgtgcccagctgccctgttggcagaggcctgtgtctgtgccacacctgccacggtggcagggggggtacccggggcagcatcgtggctcctgaacccagacccaatgcttagccaaacgaagtggctcccatgtggcaagcacccttctcagtttcgcagtggcttggctcgggatccttggcagttcccccagccccaccctgtctgctccttcccagttccttcccgggccccacacgctgctccagctgccaactttgctgcagagccactgccgcccttgagcctctcaccatgagtgagccaccagctctccacgttcccctcatagcagtgtcactcccaaccccaccatggcccagggacccgtggacaggttggggatggggtgtgtgcccactgtgctcatcacaggagcctcagttgagagtgagcggggtacagtaaggcagtgcttcccacactggacctctttcctggttctcttttgcaatacattaacagaccctttatcaacataaacaatagtaactgagct

SEQ ID NO: 2149 - DNA, 2450 bp, Homo sapiens
  source 1..2450: mol_type = unassigned DNA
actggcctggcccgccccccgcaccgagcactctttcgcccggcctccggttctcgccggctctcggacccgcctccgaagacgtggagcgctgcggcggctgatttgtcaaagatgaaagtgaccttatcagctttggatacttctgagagttctttcacacctttggtggtcatagaacttgctcaggatgtcaaagaagaaaccaaagaatggctgaaaaacagaattatagctaaaaaaaaagatggaggtgcccagttgttgtttagaccattgttaaataaatatgaacaagaaacactagaaaatcagaacttatatcttgttggtgcctccaagattagaatgttactaggggcagaagcagtgggattggtaaaagagtgcaatgataacaccatgagagccttcacatacagaaccagacagaacttcaaaggttttgatgataacaatgatgatttcctgacaatggcagaatgtcaattcattatcaaacatgaacttgaaaatcttagagctaaagatgaaaaaatgatccctggttaccctcaggcaaagttgtatccaggaaaatcattgttgagaagattgctcacgtctggcatcgtgattcaggtgtttccactgcatgacagtgaagccctgaagaagcttgaggacacctggtacactcggtttgctttgaagtatcagcccatagacagtattcgtggctactttggggaaacaattgctctgtactttggatttttggagtatttcacttttgcattaatccccatggctgtcattgggttaccttactacttgtttgtgtgggaagactatgacaagtacgtgatctttgcctcgttcaacctcatctggtccacggtgattctggaactgtggaagcgtggctgtgccaacatgacctacaggtgggggacactgctcatgaagagaaagtttgaggagccccggccaggatttcatggtgtcttgggtatcaattccatcactgggaaggaggagcctctgtaccccagctacaagagacagttgcgcatttacctggtctccctgccattcgtgtgcctctgcctctatttctcactgtatgtcatgatgatttacttcgacatggaggtttgggccttgggtctacatgagaacagcgggtctgagtggaccagtgtcctgttgtatgtgcccagcatcatctatgccattgtgattgagatcatgaatcgtctctatcgatatgctgccgagtttttaacttcatgggagaatcacagattggaatctgcctatcagaaccatctaattctgaaagttttagtgttcaacttcctcaattgctttgcctcactcttctatattgcctttgtcttgaaagatatgaagcttttgcgccagagcttggccactctcctaattacctcccagatcctcaaccaaattatggaatcttttcttccttattggctccaaaggaagcatggtgtgcgggtgaagaggaaggtgcaggctttaaaggcagacattgatgctacattatatgaacaagtcatcctggaaaaagaaatgggaacttatttgggcacctttgatgattacttggagttattcctgcagtttggttatgtgagccttttctcctgtgtttacccattagcagctgcctttgctgtgttaaataacttcactgaagtaaattcagatgccttaaaaatgtgcagggtcttcaaacgtccattctcagaaccttcagccaatattggtgtgtggcagttggcttttgaaacgatgagtgttatatctgtggtcactaactgtgcgctgattggaatgtcaccacaagtgaatgcagtctttccagaatcaaaagcagacctcattttgattgtagtagcagtggaggctgcaagctgcaagctggtctctcttccacggtattcatggagcaccaactcagtgccaggcactgtcataggtcctggggtctagtcatggccctgctctctggagaccacataccagcaaatgaagctcgtgaccgagaacctgaaggaggaaccaatggaaagcgggaaggagaaggcaacctgagtgcccagcgtgcccagctgccctgttggcagaggcctgtgtctgtgccacacctgccacggtggcagggggggtacccggggcagcatcgtggctcctgaacccagacccaatgcttagccaaacgaagtggctcccatgtggcaagcacccttctcagtttcgcagtggcttggctcgggatccttggcagttcccccagccccaccctgtctgctccttcccagttccttcccgggccccacacgctgctccagctgccaactttgctgcagagccactgccgcccttgagcctctcaccatgagtgagccaccagctctccacgttcccctcatagcagtgtcact

SEQ ID NO: 2150 - DNA, 2019 bp, Homo sapiens
  source 1..2019: mol_type = unassigned DNA
ggcccgccccccgcaccgagcactctttcgcccggcctccggttctcgccggctctcggacccgcctccgaagacgtggagcgctgcggcggctgatttgtcaaagatgaaagtgaccttatcagctttggatacttctgagagttctttcacacctttggtggtcatagaacttgctcaggatgtcaaagaagaaaccaaagaatggctgaaaaacagaattatagctaaaaaaaaagatggagtgagaagattgctcacgtctggcatcgtgattcaggtgtttccactgcatgacagtgaagccctgaagaagcttgaggacacctggtacactcggtttgctttgaagtatcagcccatagacagtattcgtggctactttggggaaacaattgctctgtactttggatttttggagtatttcacttttgcattaatccccatggctgtcattgggttaccttactacttgtttgtgtgggaagactatgacaagtacgtgatctttgcctcgttcaacctcatctggtccacggtgattctggaactgtggaagcgtggctgtgccaacatgacctacaggtgggggacactgctcatgaagagaaagtttgaggagccccggccaggatttcatggtgtcttgggtatcaattccatcactgggaaggaggagcctctgtaccccagctacaagagacagttgcgcatttacctggtctccctgccattcgtgtgcctctgcctctatttctcactgtatgtcatgatgatttacttcgacatggaggtttgggccttgggtctacatgagaacagcgggtctgagtggaccagtgtcctgttgtatgtgcccagcatcatctatgccattgtgattgagatcatgaatcgtctctatcgatatgctgccgagtttttaacttcatgggagaatcacagattggaatctgcctatcagaaccatctaattctgaaagttttagtgttcaacttcctcaattgctttgcctcactcttctatattgcctttgtcttgaaagatatgaagcttttgcgccagagcttggccactctcctaattacctcccagatcctcaaccaaattatggaatcttttcttccttattggctccaaaggaagcatggtgtgcgggtgaagaggaaggtgcaggctttaaaggcagacattgatgctacattatatgaacaagtcatcctggaaaaagaaatgggaacttatttgggcacctttgatgattacttggagttattcctgcagtttggttatgtgagccttttctcctgtgtttacccattagcagctgcctttgctgtgttaaataacttcactgaagtaaattcagatgccttaaaaatgtgcagggtcttcaaacgtccattctcagaaccttcagccaatattggtgtgtggcagttggcttttgaaacgatgagtgttatatctgtggtcactaactgtgcgctgattggaatgtcaccacaagtgaatgcagtctttccagaatcaaaagcagacctcattttgattgtagtagcagtggagcacgcactcctggctttaaagtttatacttgcatttgccatacctgataagccacggcatatccagatgaaactagccagactggaatttgagtctttggaggcactcaagcagcagcaaatgaagctcgtgaccgagaacctgaaggaggaaccaatggaaagcgggaaggagaaggcaacctgagtgcccagcgtgcccagctgccctgttggcagaggcctgtgtctgtgccacacctgccacggtggcagggggggtacccggggcagcatcgtggctcctgaacccagacccaatgcttagccaaacgaagtggctcccatgtggcaagcacccttctcagtttcgcagtggcttggctcgggatccttggcagttcccccagccccaccctgtctgctccttcccagttccttcccgggccccacacgctgctccagctgcca

SEQ ID NO: 2151 - DNA, 3717 bp, Homo sapiens
  source 1..3717: mol_type = unassigned DNA
ccaggctccttctctataaagtgggatctatcatgaccagcctaccttatcaatataggagagaaaatcttcatgcctgaagatatacccctgctccctggctccccacgccggctgagccctcaggcagggtccagagggggccagggccccaaacatggacagcagtgtctcaagatgccaggtccccgggccccaggtctgcagggcggttccaacagagatcctggccagccctgcggtggagagagcacccgcagcagctctgtcatcaacaactatctggatgccaatgagcctgtgtccttggaggcccgtcttagccgcatgcacttccatgacagtcagaggaaggtcgactatgtacttgcctaccactaccggaaacgcggggtgcacctggcccaaggcttccctggccactcgctggctatcgtctccaatggggagacaggcaaggagcctcatgctgggggcccaggtgacattgagctgggaccgctcgatgccctggaggaggagaggaaggagcagcgggaggaatttgagcacaatctgatggaggctggactggagcttgagaaggacttggagaataaaagccagggatccatctttgtccggatacacgccccgtggcaggtgctggccagagaggcagaattcttgaagatcaaagttcctaccaagaaaatgtacgagatcaaagcaggaggcagcattgcaaagaagttcagcgcggctctgcagaagctgagctcgcacctgcagccccgagttccagaacacagcaacaacaagatgaaaaacctctcctacccattctccagggagaagatgtacctgtacaacatccaggaaaaggacaccttctttgataatgccacccgcagccgcattgtgcacgagatcctgaagcgcacagcctgctcccgagccaacaacacgatgggtattaactctctgatcgcaaacaatatctatgaggctgcctaccctcttcatgacggtgaatacgatagtccagaggacgatatgaatgacaggaagctgctatatcaagaatgggcgcgctatggagtgttctataagttccaacctattgacctcatcagaaagtattttggagaaaaaattggactgtattttgcctggctgggattatatacatcattcctcatcccatcttctgtaattggagtgattgtgtttctttatggatgtgcaacaattgaagaagatattcccagcagagagatgtgtgaccagcagaatgccttcaccatgtgtcccctgtgtgacaagtcctgtgattactggaacctcagctcagcctgtgggaccgcgcaggccagccacctgtttgacaaccctgccaccgtcttcttctctatcttcatggctctgtgggctaccatgttcctggaaaactggaagaggctacagatgcgactgggctacttttgggacctgactggcatagaagaggaagaagaacgtgcccaggaacattccaggcctgagtatgaaaccaaagttcgagagaaaatgctaaaggagagcaaccagtctgctgtccagaaattggaaacaaacacgacggagtgtggcgatgaggatgatgaagataaactgacctggaaggatcgtttcccaggttacctgatgaactttgcctccatcttattcatgattgccctgacattctcaatcgtctttggggtgatagtgtatcgaataacaactgcagccgctctgtctctcaataaggctacacgctccaatgtccgggtgacagtgacagcaacagcagtcatcatcaacctcgtggtcatcctcatcctggacgagatctacggcgctgtggccaagtggctcaccaaaattgaggttccgaaaacagaacagacttttgaagagcgcctgatcctcaaagctttcttgctcaagtttgtcaatgcctactcccccatcttctatgtggcctttttcaaagggaggtttgtgggcaggcctggaagctacgtctatgtattcgatggttaccgcatggaagagtgtgctccagggggctgtctcatggagctctgcattcagctcagcatcatcatgttggggaagcagttgatccagaacaacatctttgagattggagtcccgaagctaaagaaactatttcgaaagctgaaagatgagaccgaagctggagaaactgactctgcccattcgaaacatccagagcagtgggacctagactacagcttggaaccatacacaggactgactccggagtacatggaaatgatcatccagtttggttttgtcaccctcttcgtggcctcctttcccctggcacctgtgtttgccctcctcaacaacgtcattgaagtgcggctcgatgcaaagaagtttgttacagagctgagacggccggatgctgtaagaaccaaagatatcggaatctggtttgacattctctctggaattggcaagttctctgttatcagcaacgcttttgtcattgcgatcacctccgactttatcccccgcctggtgtaccagtactcctacagtcacaatgggactctgcacggctttgtcaaccacaccctctcctttttcaacgtcagccagctgaaggaggggacgcagccagaaaactcacagtttgaccaggaggttcagttctgcaggtttaaggattaccgagagccgccatgggccccgaacccttatgagttttcgaaacagtactggtttattctgtccgcccgtctggcttttgtcataatcttccagaacctcgtgatgttcctgagcgtcctcgtggactggatgattccagacatccccacggacatcagcgaccagatcaagaaagagaagagcttattagtggatttcttcctgaaagaggagcatgagaagctcaagctgatggatgagccggctctgaggagcccaggaggtggggatcgaagcaggagccgggcagccagctcagcaccttcaggccaaagccagctgggcagcatgatgtcgtcaggctctcagcacaccaatgtgtgagcagttcagcctgcagcagaggagggcacggcagcagagacacgcacatgcacgtaagcatgttcctacacccacatggcgtgctgtctgtctgcaggggcctggcttgatggggtcttgaagagggggcagtgtgtaaaaagaaagagcctgacagaatgagtgtaggaaggaagagaaatgatgctacatctcagaaacttcaagcttaagtttcttttaggtccccttttaagctgcatccttttgagggattggaaccccactggggtctctccaccccagagtctcaggcaccgcgagcattcccatgtaccctggggcaccctcttgtacttcaccatcatttctgactttgaccagctgtaagagaaatgcagtcaggagcacagcatcccctacttactatcactacaagaaaactgagtcacttgcagtggggctgccacagtctcagcagatgcaaattaagttacaaggctgaatggtgcagccgctggacctgatagtaaggtgcaaaggtccaaacctgggcttgtctccacttcacgtcacaaaaacgtttggagctaaatgcagataaccatcattttatgaaagttcagatttaaaataataaaataaatggacacattctttataaagatg

SEQ ID NO: 2152 - DNA, 3717 bp, Homo sapiens
  source 1..3717: mol_type = unassigned DNA
ccaggctccttctctataaagtgggatctatcatgaccagcctaccttatcaatataggagagaaaatcttcatgcctgaagatatacccctgctccctggctccccacgccggctgagccctcaggcagggtccagagggggccagggccccaaacatggacagcagtgtctcaagatgccaggtccccgggccccaggtctgcagggcggttccaacagagatcctggccagccctgcggtggagagagcacccgcagcagctctgtcatcaacaactatctggatgccaatgagcctgtgtccttggaggcccgtcttagccgcatgcacttccatgacagtcagaggaaggtcgactatgtacttgcctaccactaccggaaacgcggggtgcacctggcccaaggcttccctggccactcgctggctatcgtctccaatggggagacaggcaaggagcctcatgctgggggcccaggtgacattgagctgggaccgctcgatgccctggaggaggagaggaaggagcagcgggaggaatttgagcacaatctgatggaggctggactggagcttgagaaggacttggagaataaaagccagggatccatctttgtccggatacacgccccgtggcaggtgctggccagagaggcagaattcttgaagatcaaagttcctaccaagaaagagatgtacgagatcaaagcaggaggcagcattgcaaagaagttcagcgcggctctgcagaagctgagctcgcacctgcagccccgagttccagaacacagcaacaacaagatgaaaaacctctcctacccattctccagggagaagatgtacctgtacaacatccaggaaaaggacaccttctttgataatgccacccgcagccgcattgtgcacgagatcctgaagcgcacagcctgctcccgagccaacaacacgatgggtattaactctctgatcgcaaacaatatctatgaggctgcctaccctcttcatgacggtgaatacgatagtccagaggacgatatgaatgacaggaagctgctatatcaagaatgggcgcgctatggagtgttctataagttccaacctattgacctcatcagaaagtattttggagaaaaaattggactgtattttgcctggctgggattatatacatcattcctcatcccatcttctgtaattggagtgattgtgtttctttatggatgtgcaacaattgaagaagatattcccagcagagagatgtgtgaccagcagaatgccttcaccatgtgtcccctgtgtgacaagtcctgtgattactggaacctcagctcagcctgtgggaccgcgcaggccagccacctgtttgacaaccctgccaccgtcttcttctctatcttcatggctctgtgggctaccatgttcctggaaaactggaagaggctacagatgcgactgggctacttttgggacctgactggcatagaagaggaagaagaacgtgcccaggaacattccaggcctgagtatgaaaccaaagttcgagagaaaatgctaaaggagagcaaccagtctgctgtccagaaattggaaacaaacacgacggagtgtggcgatgaggatgatgaagataaactgacctggaaggatcgtttcccaggttacctgatgaactttgcctccatcttattcatgattgccctgacattctcaatcgtctttggggtgatagtgtatcgaataacaactgcagccgctctgtctctcaataaggctacacgctccaatgtccgggtgacagtgacagcaacagcagtcatcatcaacctcgtggtcatcctcatcctggacgagatctacggcgctgtggccaagtggctcaccaaaattgaggttccgaaaacagaacagacttttgaagagcgcctgatcctcaaagctttcttgctcaagtttgtcaatgcctactcccccatcttctatgtggcctttttcaaagggaggtttgtgggcaggcctggaagctacgtctatgtattcgatggttaccgcatggaagagtgtgctccagggggctgtctcatggagctctgcattcagctcagcatcatcatgttggggaagcagttgatccagaacaacatctttgagattggagtcccgaagctaaagaaactatttcgaaagctgaaagatgagaccgaagctggagaaactgactctgcccattcgaaacatccagagcagtgggacctagactacagcttggaaccatacacaggactgactccggagtacatggaaatgatcatccagtttggttttgtcaccctcttcgtggcctcctttcccctggcacctgtgtttgccctcctcaacaacgtcattgaagtgcggctcgatgcaaagaagtttgttacagagctgagacggccggatgctgtaagaaccaaagatatcggaatctggtttgacattctctctggaattggcaagttctctgttatcagcaacgcttttgtcattgcgatcacctccgactttatcccccgcctggtgtaccagtactcctacagtcacaatgggactctgcacggctttgtcaaccacaccctctcctttttcaacgtcagccagctgaaggaggggacgcagccagaaaactcacagtttgaccaggaggttcagttctgcaggtttaaggattaccgagagccgccatgggccccgaacccttatgagttttcgaaacagtactggtttattctgtccgcccgtctggcttttgtcataatcttccagaacctcgtgatgttcctgagcgtcctcgtggactggatgattccagacatccccacggacatcagcgaccagatcaagaaagagaagagcttattagtggatttcttcctgaaagaggagcatgagaagctcaagctgatggatgagccggctctgaggagcccaggaggtggggatcgaagcaggagccgggcagccagctcagcaccttcaggccaaagccagctgggcagcatgatgtcgtcaggctctcagcacaccaatgtgtgagcagttcagcctgcagcagaggagggcacggcagcagagacacgcacatgcacgtaagcatgttcctacacccacatggcgtgctgtctgtctgcaggggcctggcttgatggggtcttgaagagggggcagtgtgtaaaaagaaagagcctgacagaatgagtgtaggaaggaagagaaatgatgctacatctcagaaacttcaagcttaagtttcttttaggtccccttttaagctgcatccttttgagggattggaaccccactggggtctctccaccccagagtctcaggcaccgcgagcattcccatgtaccctggggcaccctcttgtacttcaccatcatttctgactttgaccagctgtaagagaaatgcagtcaggagcacagcatcccctacttactatcactacaagaaaactgagtcacttgcagtggggctgccacagtctcagcagatgcaaattaagttacaaggctgaatggtgcagccgctggacctgatagtaaggtgcaaaggtccaaacctgggcttgtctccacttcacgtcacaaaaacgtttggagctaaatgcagataaccatcattttatgaaagttcagatttaaaataataaaataaatggacacattctttataaag

SEQ ID NO: 2153 - DNA, 3673 bp, Homo sapiens
  source 1..3673: mol_type = unassigned DNA
ggtctgcgtccacatcatggcgactcccgggccgcgcgatatacccctgctccctggctccccacgccggctgagccctcaggcagggtccagagggggccagggccccaaacatggacagcagtgtctcaagatgccaggtccccgggccccaggtctgcagggcggttccaacagagatcctggccagccctgcggtggagagagcacccgcagcagctctgtcatcaacaactatctggatgccaatgagcctgtgtccttggaggcccgtcttagccgcatgcacttccatgacagtcagaggaaggtcgactatgtacttgcctaccactaccggaaacgcggggtgcacctggcccaaggcttccctggccactcgctggctatcgtctccaatggggagacaggcaaggagcctcatgctgggggcccaggtgacattgagctgggaccgctcgatgccctggaggaggagaggaaggagcagcgggaggaatttgagcacaatctgatggaggctggactggagcttgagaaggacttggagaataaaagccagggatccatctttgtccggatacacgccccgtggcaggtgctggccagagaggcagaattcttgaagatcaaagttcctaccaagaaagagatgtacgagatcaaagcaggaggcagcattgcaaagaagttcagcgcggctctgcagaagctgagctcgcacctgcagccccgagttccagaacacagcaacaacaagatgaaaaacctctcctacccattctccagggagaagatgtacctgtacaacatccaggaaaaggacaccttctttgataatgccacccgcagccgcattgtgcacgagatcctgaagcgcacagcctgctcccgagccaacaacacgatgggtattaactctctgatcgcaaacaatatctatgaggctgcctaccctcttcatgacggtgaatacgatagtccagaggacgatatgaatgacaggaagctgctatatcaagaatgggcgcgctatggagtgttctataagttccaacctattgacctcatcagaaagtattttggagaaaaaattggactgtattttgcctggctgggattatatacatcattcctcatcccatcttctgtaattggagtgattgtgtttctttatggatgtgcaacaattgaagaagatattcccagcagagagatgtgtgaccagcagaatgccttcaccatgtgtcccctgtgtgacaagtcctgtgattactggaacctcagctcagcctgtgggaccgcgcaggccagccacctgtttgacaaccctgccaccgtcttcttctctatcttcatggctctgtgggctaccatgttcctggaaaactggaagaggctacagatgcgactgggctacttttgggacctgactggcatagaagaggaagaagaacgtgcccaggaacattccaggcctgagtatgaaaccaaagttcgagagaaaatgctaaaggagagcaaccagtctgctgtccagaaattggaaacaaacacgacggagtgtggcgatgaggatgatgaagataaactgacctggaaggatcgtttcccaggttacctgatgaactttgcctccatcttattcatgattgccctgacattctcaatcgtctttggggtgatagtgtatcgaataacaactgcagccgctctgtctctcaataaggctacacgctccaatgtccgggtgacagtgacagcaacagcagtcatcatcaacctcgtggtcatcctcatcctggacgagatctacggcgctgtggccaagtggctcaccaaaattgaggttccgaaaacagaacagacttttgaagagcgcctgatcctcaaagctttcttgctcaagtttgtcaatgcctactcccccatcttctatgtggcctttttcaaagggaggtttgtgggcaggcctggaagctacgtctatgtattcgatggttaccgcatggaagagtgtgctccagggggctgtctcatggagctctgcattcagctcagcatcatcatgttggggaagcagttgatccagaacaacatctttgagattggagtcccgaagctaaagaaactatttcgaaagctgaaagatgagaccgaagctggagaaactgactctgcccattcgaaacatccagagcagtgggacctagactacagcttggaaccatacacaggactgactccggagtacatggaaatgatcatccagtttggttttgtcaccctcttcgtggcctcctttcccctggcacctgtgtttgccctcctcaacaacgtcattgaagtgcggctcgatgcaaagaagtttgttacagagctgagacggccggatgctgtaagaaccaaagatatcggaatctggtttgacattctctctggaattggcaagttctctgttatcagcaacgcttttgtcattgcgatcacctccgactttatcccccgcctggtgtaccagtactcctacagtcacaatgggactctgcacggctttgtcaaccacaccctctcctttttcaacgtcagccagctgaaggaggggacgcagccagaaaactcacagtttgaccaggaggttcagttctgcaggtttaaggattaccgagagccgccatgggccccgaacccttatgagttttcgaaacagtactggtttattctgtccgcccgtctggcttttgtcataatcttccagaacctcgtgatgttcctgagcgtcctcgtggactggatgattccagacatccccacggacatcagcgaccagatcaagaaagagaagagcttattagtggatttcttcctgaaagaggagcatgagaagctcaagctgatggatgagccggctctgaggagcccaggaggtggggatcgaagcaggagccgggcagccagctcagcaccttcaggccaaagccagctgggcagcatgatgtcgtcaggctctcagcacaccaatgtgtgagcagttcagcctgcagcagaggagggcacggcagcagagacacgcacatgcacgtaagcatgttcctacacccacatggcgtgctgtctgtctgcaggggcctggcttgatggggtcttgaagagggggcagtgtgtaaaaagaaagagcctgacagaatgagtgtaggaaggaagagaaatgatgctacatctcagaaacttcaagcttaagtttcttttaggtccccttttaagctgcatccttttgagggattggaaccccactggggtctctccaccccagagtctcaggcaccgcgagcattcccatgtaccctggggcaccctcttgtacttcaccatcatttctgactttgaccagctgtaagagaaatgcagtcaggagcacagcatcccctacttactatcactacaagaaaactgagtcacttgcagtggggctgccacagtctcagcagatgcaaattaagttacaaggctgaatggtgcagccgctggacctgatagtaaggtgcaaaggtccaaacctgggcttgtctccacttcacgtcacaaaaacgtttggagctaaatgcagataaccatcattttatgaaagttcagatttaaaataataaaataaatggacacattctttataaag

SEQ ID NO: 2154 - DNA, 1085 bp, Homo sapiens
  source 1..1085: mol_type = unassigned DNA
ggaagagtgtgtgacttggtgaagcagctcccaagcacccaagatgcccaggagcctctggaagcagcagttggtccccagtgtcttcccctgaacccctaggaacatgtagggttcaagggctcagtcccagtctcagaggggaaaaggcatgtgagcgtgcaactggcagccagaacctcgtgatgttcctgagcgtcctcgtggactggatgattccagacatccccacggacatcagcgaccagatcaagaaagagaagagcttattagtggatttcttcctgaaagaggagcatgagaagctcaagctgatggatgagccggctctgaggagcccaggaggtggggatcgaagcaggagccgggcagccagctcagcaccttcaggccaaagccagctgggcagcatgatgtcgtcaggctctcagcacaccaatgtgtgagcagttcagcctgcagcagaggagggcacggcagcagagacacgcacatgcacgtaagcatgttcctacacccacatggcgtgctgtctgtctgcaggggcctggcttgatggggtcttgaagagggggcagtgtgtaaaaagaaagagcctgacagaatgagtgtaggaaggaagagaaatgatgctacatctcagaaacttcaagcttaagtttcttttaggtccccttttaagctgcatccttttgagggattggaaccccactggggtctctccaccccagagtctcaggcaccgcgagcattcccatgtaccctggggcaccctcttgtacttcaccatcatttctgactttgaccagctgtaagagaaatgcagtcaggagcacagcatcccctacttactatcactacaagaaaactgagtcacttgcagtggggctgccacagtctcagcagatgcaaattaagttacaaggctgaatggtgcagccgctggacctgatagtaaggtgcaaaggtccaaacctgggcttgtctccacttcacgtcacaaaaacgtttggagctaaatgcagataaccatcattttatgaaagttcagatttaaaataataaaataaatggacacattcttt

SEQ ID NO: 2155 - DNA, 3717 bp, Homo sapiens
  source 1..3717: mol_type = unassigned DNA
ccaggctccttctctataaagtgggatctatcatgaccagcctaccttatcaatataggagagaaaatcttcatgcctgaagatatacccctgctccctggctccccacgccggctgagccctcaggcagggtccagagggggccagggccccaaacatggacagcagtgtctcaagatgccaggtccccgggccccaggtctgcagggcggttccaacagagatcctggccagccctgcggtggagagagcacccgcagcagctctgtcatcaacaactatctggatgccaatgagcctgtgtccttggaggcccgtcttagccgcatgcacttccatgacagtcagaggaaggtcgactatgtacttgcctaccactaccggaaacgcggggtgcacctggcccaaggcttccctggccactcgctggctatcgtctccaatggggagacaggcaaggagcctcatgctgggggcccaggtgacattgagctgggaccgctcgatgccctggaggaggagaggaaggagcagcgggaggaatttgagcacaatctgatggaggctggactggagcttgagaaggacttggagaataaaagccagggatccatctttgtccggatacacgccccgtggcaggtgctggccagagaggcagaattcttgaagatcaaagttcctaccaagaaagagatgtacgagatcaaagcaggaggcagcattgcaaagaagttcagcgcggctctgcagaagctgagctcgcacctgcagccccgagttccagaacacagcaacaacaagatgaaaaacctctcctacccattctccagggagaagatgtacctgtacaacatccaggaaaaggacaccttctttgataatgccacccgcagccgcattgtgcacgagatcctgaagcgcacagcctgctcccgagccaacaacacgatgggtattaactctctgatcgcaaacaatatctatgaggctgcctaccctcttcatgacggtgaatacgatagtccagaggacgatatgaatgacaggaagctgctatatcaagaatgggcgcgctatggagtgttctataagttccaacctattgacctcatcagaaagtattttggagaaaaaattggactgtattttgcctggctgggattatatacatcattcctcatcccatcttctgtaattggagtgattgtgtttctttatggatgtgcaacaattgaagaagatattcccagcagagagatgtgtgaccagcagaatgccttcaccatgtgtcccctgtgtgacaagtcctgtgattactggaacctcagctcagcctgtgggaccgcgcaggccagccacctgtttgacaaccctgccaccgtcttcttctctatcttcatggctctgtgggctaccatgttcctggaaaactggaagaggctacagatgcgactgggctacttttgggacctgactggcatagaagaggaagaaccaagagttcaagaacattccaggcctgagtatgaaaccaaagttcgagagaaaatgctaaaggagagcaaccagtctgctgtccagaaattggaaacaaacacgacggagtgtggcgatgaggatgatgaagataaactgacctggaaggatcgtttcccaggttacctgatgaactttgcctccatcttattcatgattgccctgacattctcaatcgtctttggggtgatagtgtatcgaataacaactgcagccgctctgtctctcaataaggctacacgctccaatgtccgggtgacagtgacagcaacagcagtcatcatcaacctcgtggtcatcctcatcctggacgagatctacggcgctgtggccaagtggctcaccaaaattgaggttccgaaaacagaacagacttttgaagagcgcctgatcctcaaagctttcttgctcaagtttgtcaatgcctactcccccatcttctatgtggcctttttcaaagggaggtttgtgggcaggcctggaagctacgtctatgtattcgatggttaccgcatggaagagtgtgctccagggggctgtctcatggagctctgcattcagctcagcatcatcatgttggggaagcagttgatccagaacaacatctttgagattggagtcccgaagctaaagaaactatttcgaaagctgaaagatgagaccgaagctggagaaactgactctgcccattcgaaacatccagagcagtgggacctagactacagcttggaaccatacacaggactgactccggagtacatggaaatgatcatccagtttggttttgtcaccctcttcgtggcctcctttcccctggcacctgtgtttgccctcctcaacaacgtcattgaagtgcggctcgatgcaaagaagtttgttacagagctgagacggccggatgctgtaagaaccaaagatatcggaatctggtttgacattctctctggaattggcaagttctctgttatcagcaacgcttttgtcattgcgatcacctccgactttatcccccgcctggtgtaccagtactcctacagtcacaatgggactctgcacggctttgtcaaccacaccctctcctttttcaacgtcagccagctgaaggaggggacgcagccagaaaactcacagtttgaccaggaggttcagttctgcaggtttaaggattaccgagagccgccatgggccccgaacccttatgagttttcgaaacagtactggtttattctgtccgcccgtctggcttttgtcataatcttccagaacctcgtgatgttcctgagcgtcctcgtggactggatgattccagacatccccacggacatcagcgaccagatcaagaaagagaagagcttattagtggatttcttcctgaaagaggagcatgagaagctcaagctgatggatgagccggctctgaggagcccaggaggtggggatcgaagcaggagccgggcagccagctcagcaccttcaggccaaagccagctgggcagcatgatgtcgtcaggctctcagcacaccaatgtgtgagcagttcagcctgcagcagaggagggcacggcagcagagacacgcacatgcacgtaagcatgttcctacacccacatggcgtgctgtctgtctgcaggggcctggcttgatggggtcttgaagagggggcagtgtgtaaaaagaaagagcctgacagaatgagtgtaggaaggaagagaaatgatgctacatctcagaaacttcaagcttaagtttcttttaggtccccttttaagctgcatccttttgagggattggaaccccactggggtctctccaccccagagtctcaggcaccgcgagcattcccatgtaccctggggcaccctcttgtacttcaccatcatttctgactttgaccagctgtaagagaaatgcagtcaggagcacagcatcccctacttactatcactacaagaaaactgagtcacttgcagtggggctgccacagtctcagcagatgcaaattaagttacaaggctgaatggtgcagccgctggacctgatagtaaggtgcaaaggtccaaacctgggcttgtctccacttcacgtcacaaaaacgtttggagctaaatgcagataaccatcattttatgaaagttcagatttaaaataataaaataaatggacacattctttataaag
